United States Patent Application Publication US 2024/0327476 A1 - sequence listing, part 131

SEQ ID NO: 248613 - RNA, 7251 nt, synthetic construct
  misc_feature 1..7251: note = Description of Artificial Sequence: Synthetic coding sequence
  source 1..7251: mol_type = other RNA
atgacaacactgttgtgggttttcgttacactgcgggtgataaccgcggccgttaccgtagaaacttccgatcacgacaactcactgtccgtttcaattccccagcccagccccctacgcgttctgctgggaacatcccttacaatcccttgctacttcattgatcctatgcaccccgtaacaactgcccctagtaccgcccccctggctccacggatcaaatggtccagggtgtccaaagaaaaagaggttgtgttgctggtagcgacagagggtagggtcagagtgaacagcgcttaccaggacaaagtgtccctacctaactaccctgccatcccttcagatgccacactcgaagtacagtctctgcgttccaatgattcgggtgtgtaccgttgtgaagtgatgcatgggatcgaagactctgaagcaactcttgaagtggtcgtcaagggaatcgtcttccactacagagccattagcacccgatatacgttggacttcgatagggcccagagagcctgcctacaaaattccgcaatcatcgctacgccagaacagcttcaggctgcctacgaagacggattccaccagtgtgatgcaggatggctcgctgaccagactgtaaggtacccgattcacacgcctagagaaggctgctacggtgacaaagatgaattccctggagttcggacctacggtatccgcgacacaaacgagacttatgacgtgtattgtttcgccgaggaaatggaaggtgaagtattctacgcgacgtcgcctgagaagtttacctttcaggaagccgccaacgaatgccgaaggctcggcgcccgattggcaacgaccggccaattatacttagcctggcaagctggtatggatatgtgtagcgccggatggctcgcggaccgctctgtgcgctatcccatatcgaaagccagacctaattgcggcggaaacctcttgggagtacggacagtatacgtgcacgctaaccagactggatacccagaccccagctcgcgatacgacgctatctgctatacgggagaagattttgtggacattcctgaaaacttttttggagtcgggggcgaggaagatataaccgtccagaccgttacttggcctgacatggagctcccgctacctagaaatatcacagagggcgaggccaggggctctgtaatattgaccgttaaacccatattcgaggtcagtccctccccactagagcctgaggagcccttcacattcgctcccgaaatcggcgcgaccgcattcgctgaagttgaaaacgagaccggagaagcgacccgcccatggggctttcccacccctggcttaggtcccgctacggcttttacatcagaagacttagtggttcaagtgacagcggtaccagggcagccacatcttccaggtggagtggtattccactacagaccaggtccaaccaggtattcattaaccttcgaggaggcccagcaggcctgtctgcgtactggggcagtaattgcatctcctgaacaactccaggccgcttatgaggcaggttacgaacagtgtgatgcaggctggctgcgagatcagacagtgcggtacccaatcgtgtcaccccgtaccccctgtgtaggcgataaagattcgtctcctggtgttcgcacctacggcgttcggcctagcactgaaacttatgatgtgtattgcttcgtcgaccgtcttgagggagaggttttctttgctacccggcttgagcagttcacattccaggaagcccttgagttctgcgagtctcacaacgccaccttagccacaacagggcagctctatgctgcatggtcaagaggcctcgataaatgctatgccggatggctggcggatggaagtttaaggtatccaatagttaccccccgccccgcatgtgggggcgataagcccggcgtgcgtaccgtgtatctgtacccaaatcaaactggtctgccagatcccttatctaggcaccacgcgttttgctttcggggtatcagtgctgtaccctcaccaggtgaagaagaaggcggaactcctacctcaccctcaggcgtggaagagtggattgtaactcaagtagtgcctggagtcgcagctgtccccgtagaagaggaaactacggctgtcccttccggagagacgacagctattctggaatttacaacggaaccagaaaatcagactgaatgggaacccgcttatacgccggttggaacatcaccactgccagggattctcccgacttggccacctacaggagccgccactgaggaaagcaccgagggtccatctgccaccgaagtgccttctgcctctgaggagcccagcccgtccgaagtccccttccctagcgaagagccctcaccatcggaggagccatttccttctgtacgcccctttcctagcgtagaactgtttccaagtgaagaaccctttccttcaaaggagccctctccatccgaagaacctagcgcctcagaggagccctatacaccgtccccacccgttccaagttggaccgagctgccctcatctggtgaagaaagcggtgcccctgatgtgagtggtgatttcactggtagcggggacgttagcggacatcttgacttctccggccagctgtcaggcgacagagcttccggtttaccgagtggtgatctcgattccagcggtctgacatccacggtggggagcggtcttccagtggaaagtggacttccttccggcgacgaggaacgcatcgaatggccctctacacccacagtgggggagctcccctcaggggctgaaattttggaaggatctgcatcaggagtaggggatctgtcgggtctgccatcaggtgaggttttggagacatctgcgtcgggcgtgggtgatttaagtggcctgccaagcggagaagtgctggagactaccgcacccggtgtggaagatatttcaggattgccttccggggaagtgctcgaaaccactgctcctggcgtcgaagacatatccggcttacctagtggagaagttctggaaacaacagcccccggggttgaagacatttctggcctccctagcggggaggtccttgaaaccactgcacctggggttgaagatatatctggcctcccttccggcgaagtgcttgagaccactgcaccgggagttgaagacattagcggccttccttccggcgaagtcctggagactgcagcgccgggcgtagaggacataagtggattgccaagcggcgaggtccttgaaaccgcagctccaggcgtagaggatatatccggactcccgtctggagaggtactggagaccgctgccccaggggtggaagatattagtggcttgccctccggagaagttctggaaaccgcggctccaggcgtggaggatatatccggactaccaagcggtgaggtgctggaaacagccgctccgggcgtggaggacattagtggtctgccatcaggagaggtgctagagactgcagccccaggagtggaggacatatcagggttacccagtggtgaagtcttagagaccgctgctccgggtgtggaagacatctcaggtctgccttctggggaggtgctcgaaacggcggcccccggagtcgaagatatctccggattgcccagtggagaagtattggaaacggcggcacccggcgtggaggatataagcggtctcccgtctggagaagtgctagaaacggccgcccctggagttgaagacatatccggccttccaagcggcgaggttcttgagaccgctgcccccggcgtagaggatatcagtggcctgccttcaggagaggtgctagaaactactgctccaggagttgaagagataagtggacttccctctggagaagttcttgagaccacagcaccaggcgtagacgagatttccggcctgccaagcggggaggtgttagagacaactgctcctggagtggaagagatctctgggttaccctcaggagaggttctcgagacgtcgacatcagctgtgggagacttatcagggctaccttccgggggagaagttctcgaaatctctgtgtctggagttgaagatatctctggactgccatccggcgaggtggtggaaacaagcgcgtcgggaatcgaggacgtgtctgaactgcccagtggagaaggactggagacttcagccagcggtgttgaagatttatcgaggctccctagcggtgaagaagtgttggagatttctgcatcagggtttggcgatttgtcagggcttccttcgggcggagaaggcttggaaacctcggcatccgaggttggaacagacctctcaggcttaccctccggtagagagggacttgagacgtccgcgagcggagcggaagacctcagcggacttccttctgggaaagaggacttagtagggagcgccagcggggatctggacctaggaaaactgccatccgggacactgggttcaggccaggctcctgaaacatccggcctcccatctggctttagcggcgaatatagtggagtggacctcggaagcggaccccccagcggactgcctgatttctctggtctacccagcgggttcccaaccgtttcactagtagacagtacactcgtcgaagtggtcacagcaagcacagcaagtgagctcgagggcagaggaactattgggatttcaggcgccggggagatcagcggactgccatcgagcgagttagacatatctggaagagcatccgggctgccttcggggacagagttatccggccaggcctccggcagtcccgacgtcagtggagagattcccggtctgtttggagtgagcggccagccatcaggattccctgacactagcggtgaaacatcaggcgtaactgagctctccggacttagcagtgggcagccaggtattagcggcgaggcatcaggcgtcctgtatggcacctcccagcctttcggaatcacagatctgtctggagaaacatcgggcgtgcccgacctgtctgggcaaccgtcagggctcccaggattcagtggagccacgtcaggcgtacctgacctcgtgtccggcacaacatcagggtcaggggaaagcagtggcatcacctttgtcgatacgtctttagtggaagtggcaccgacaacatttaaagaggaggagggactcgggtctgtggagttatcaggtctgcctagcggcgaagctgatctcagcggcaagagtggaatggtggatgtgagcggtcagttttctgggaccgtggattcctctggcttcactagccaaacccctgaattcagcggtttaccctcaggaatcgcagaagtgagcggcgaaagttctagggctgagattgggtcctcacttcctagcggggcctactacgggagcggtaccccatcctcattccccaccgtttcacttgtcgacaggactctcgtggagagtgttacccaagcgcccactgctcaagaagccggggaaggtccctctggtatcctcgagctgtcaggagcacactccggagccccagatatgagcggcgaacactcgggcttcttagacctgagcggtctgcagtcaggcctgatcgaaccctcgggcgaacctcccggaacaccttatttctctggcgattttgctagcactacaaacgtgtcgggcgaatcctcagtggcaatgggaaccagtggggaagcctcaggtctgcctgaagttacattgatcacaagtgaatttgtggaaggcgtcacggagcctacaataagccaggagctcggccagcgccctcctgtgacccatacccctcagttattcgaaagctccgggaaagtgtcaacagcaggcgacatctcaggcgccaccccagtcctccctggaagcggagtcgaagtcagtagcgtccctgaatccagctcagagaccagtgcttatcccgaagcaggattcggtgctagcgctgccccagaggcatcccgggaagacagcggatcccctgatctgtcagaaacaacttctgcttttcatgaagctaatctcgagcgtagcagcggactgggggtgagtggcagcaccctcacttttcaagagggagaagcaagcgcagctccggaagtctctggagagtccacgacaacctctgatgtgggcacagaagcacccggcctgcctagcgctaccccgactgcctccggcgacaggaccgagatatctggagatttaagcggccacacctcccaactcggagtggtaatctcaaccagcatcccggagagtgagtggacccagcaaacacagcggcctgccgaaacacacctcgagatcgaatcatcttcattactttatagtggcgaggagacccatacagtggaaaccgctactagtccgaccgacgcttccatccccgccagcccggaatggaaaagagagtccgaatccaccgccgccgcccccgccagatcttgcgcggaagagccttgcggcgctggtacctgcaaggagactgaaggccacgtcatatgtttatgcccccctggttatacgggagaacactgtaatatagaccaagaagtgtgcgaggagggatggaataaataccagggacattgttaccgacactttcctgaccgcgagacgtgggtggacgccgagagacgatgcagggaacagcagagccacctaagcagtatagtgacaccggaggagcaggagtttgtgaacaataacgcgcaagactaccagtggattgggctgaacgatcgaacgattgagggggactttaggtggagtgatggccatcccatgcaatttgagaattggagacctaaccaacctgacaatttcttcgccgccggcgaggactgcgtggtgatgatttggcacgagaagggggagtggaacgacgtcccgtgtaattaccatttgccatttacatgcaagaaaggaaccgtcgcttgtggtgagccccccgttgtggagcacgcgcggacatttggacaaaagaaagatcgctacgaaatcaatagcctggtacgttaccagtgtacagagggattcgtacagcgccacatgccaacaattcgatgtcagccatccggacattgggaggaacctcagatcacttgtacagaccctaccacatacaaaagacgccttcaaaaacgaagctctagacatccacgacgctcccgacctagcaccgcacactag

SEQ ID NO: 248614 - RNA, 7296 nt, synthetic construct
  misc_feature 1..7296: note = Description of Artificial Sequence: Synthetic coding sequence
  source 1..7296: mol_type = other RNA
atgaccactctgttatgggtgtttgtcacacttagggtaatcacagccgccgtaaccgttgagacaagtgatcacgacaatagcctctccgtaagtatcccacagccttcccccctccgagtcctcttagggactagcctcactatcccatgttactttattgatcctatgcatccagttacaacagcgccatcaactgcaccattagccccgaggattaaatggtcgagagtgtccaaagaaaaagaggtggtgctcctggtagcgaccgagggcagagtgcgggttaactcagcctaccaagataaggtcagtctgccaaactacccagcgatcccaagtgatgccacgctcgaagtccagagcctgagatcaaacgactccggggtttaccgctgtgaagtaatgcacgggatagaagactccgaagctacacttgaggtggtagtcaagggaattgtttttcactatcgcgccatcagtacaagatacaccttggatttcgaccgagcgcagagagcctgtctacaaaattccgccataatcgcaacccccgaacagctgcaggcggcgtatgaagatggtttccatcaatgtgacgccggttggctggcagatcagacagtcagatacccaattcataccccacgcgagggctgctacggggataaagatgaattcccgggagtgcgaacgtacggcattcgggacaccaacgaaacgtatgacgtgtactgttttgcagaagagatggaaggcgaagtgttttacgcgactagcccagaaaaattcacattccaggaagccgccaacgaatgcagacgtctcggggccaggctcgcaaccaccggtcagctttatcttgcttggcaggctgggatggatatgtgctcagcaggatggttagcagaccggtcagtccgctacccaatttccaaagcgagacccaattgtggcggcaatcttctgggagtgagaacagtctacgttcacgccaaccagacaggataccctgacccctcatcccggtacgacgccatttgttatactggcgaagattttgtagacatccctgagaacttttttggcgtgggcggggaggaagatattaccgtgcagactgtcacatggccagacatggaactgccccttccaaggaacattactgagggcgaagctagaggaagcgtaattctgacagttaagcctatttttgaagtgagtcctagcccccttgaaccagaggagccttttacgttcgcccccgagattggagccacagcctttgccgaagtggaaaacgagacaggcgaggccacccgaccctggggctttcccacccccggcctcggccctgctaccgcttttacttctgaagatctcgtcgttcaggtgaccgcagtccccggacagccccacctaccaggaggagtggtcttccactatcggcctggccctacacgatactctttgacatttgaagaagcacagcaggcatgcctgcgcactggagccgttatcgcttccccggaacagttgcaagctgcgtatgaggccggatacgagcagtgtgatgcagggtggctccgagaccagacggtaagatacccgatcgtgtcgccaagaactccatgtgtgggcgacaaagacagcagcccaggcgtaagaacctatggcgtaaggccctccactgaaacttatgacgtttactgcttcgtggaccgtcttgaaggcgaggtcttttttgcaaccaggctcgagcaatttaccttccaagaagctcttgaattctgcgagagccataatgcgacgctcgcaacaactggacaactgtacgcagcgtggtcaagaggactggacaagtgttacgccgggtggctagcggacggctcactgagatatccaatcgtgactcctcgacctgcttgtggcggggataaaccaggagtgaggactgtctatctgtatcccaatcagaccggcctgcccgatccactgtcaaggcaccatgcgttttgtttccgagggatcagtgcagtaccatcacctggagaggaggaggggggaactcccacttcaccgtctggtgtcgaggagtggatcgttacacaggtcgtgcccggcgtcgccgccgtgccagtcgaggaagaaactaccgctgtgccgtctggagagactaccgcaatcttggagttcacaactgaacccgaaaaccaaacagagtgggaaccagcatataccccggttggtacttcccccctcccgggcatactgcctacctggcctcccacaggagctgccaccgaggaaagcaccgaggggcctagcgcaactgaagtgccatctgctagtgaggagccatccccgtccgaagtacctttcccaagcgaggaacctagcccttccgaggaacccttccctagtgtccgcccctttccctcagttgagttgtttccgtccgaagaaccgtttcctagcaaagaacctagcccgagtgaagagccaagcgccagtgaggaaccttatacccctagccctcccgtgccgagttggaccgagctccccagttctggcgaggaaagtggagctcccgacgtaagcggagattttactggatccggcgacgtaagtgggcaccttgacttttctggccagctgtcaggggatagagcgagtgggttgccttccggcgatttggactcttcgggactgacatctaccgtggggagtggcctcccagtggagagcgggctgccatcaggcgacgaggagagaatagagtggccttccacaccgaccgtgggagaactcccgagtggagctgaaatcctggaagggagtgcctcaggcgtgggcgatttgagtggactgcccagtggagaagtgctcgagacaagcgctagcggggtcggagatctgagcggcttgccaagcggcgaggttctggagactacagcccctggagtggaggatattagcggcttaccctctggagaagtgttggaaacaaccgctcctggcgtggaagatatcagcggactgccatccggagaggtgcttgagacgaccgcaccaggtgtagaggatatcagcggactaccatcgggcgaagtactggagactacggctcccggcgtagaggacatatcaggcttacccagtggggaggttttggaaacaacagctcctggcgtcgaggacataagtggactgccttctggagaagtactagaaaccactgccccaggcgtggaggacattagcggcctgccaagtggggaagttctcgaaacagcagcacccggagtagaagatattagcgggttaccgtccggcgaagttctagaaaccgctgcacccggtgtagaagatatctctggcctgccatcaggtgaagttttagagactgccgcaccaggagtggaagacattagcggcctgccctcaggagaggtactagagacggcggcgcccggtgtggaggatatatcaggactgccttccggggaagtgttggagaccgcagcgccaggagtggaggatatctcgggtctgccttcaggggaagtcctcgaaacggccgcgcccggagtggaagacatctccggtttgccttctggggaagtactggaaacagccgcaccaggggtggaggatataagcggactcccgagtggtgaggtcctggagactgctgctcctggcgtagaagatatttctggcctgccctccggagaggtactcgaaacagcagcaccaggcgttgaggacatatctgggcttccgagcggcgaggtcctggagactgcggcccctggagttgaagacatatccggactgccttcaggagaggtgcttgagacagcggcaccaggtgtagaagacattagcggcctcccttctggagaagtgttagagactgcagctccaggcgtggaagacatctctgggctgccatcaggcgaagtgctcgagacagctgctcccggcgtggaggacatctccggcttgccaagcggcgaggtcctggaaaccgcggcccccggcgtcgaggacattagcggcctgcctagtggggaagttcttgaaacagccgcccctggagttgaggacataagtggactgccatcgggggaggtactggagaccgcagccccaggtgtggaggatatttcaggtttaccaagcggcgaagtcctggaaacaaccgcacctggcgtggaagaaatcagcggcctgccgtccggcgaagtgcttgagactacggcccccggagtcgacgaaatcagtggcttgccatccggcgaagtccttgaaacaactgcgcccggcgtcgaagaaatcagtggcctgcccagtggagaggtgctggaaacttctaccagcgcggtcggcgacctcagcggactaccatccggaggagaggtgctcgagatctctgtgtcaggcgttgaagatatatctggcttaccctccggagaagtcgtggaaacatcagccagcggtatcgaggacgtcagtgaactcccgagtggcgaggggcttgagacaagcgcttcaggcgtggaggacttatccagacttccgtctggggaagaagtgttagagattagcgcgagcgggttcggcgatctgagtggtttaccgtccgggggagagggtttggaaacgtcagcaagtgaagtgggaactgacttatcaggtctccccagtgggcgtgagggactggagacatcagcgtccggagcggaagacctgtctggactcccttcaggcaaagaggaccttgtaggatccgcatcgggcgatcttgacttaggtaagctcccttctggaacactggggtccggccaagctcctgagacatctggactgccatccgggtttagtggcgagtattctggcgtcgacttagggtccggtcctccttctggcctccccgactttagcgggctcccatcgggctttccaacagtctctttggtggactctacactcgtcgaagtggtgactgcaagcactgcatctgagctcgagggccggggaactatcggcatcagcggtgccggcgagatctctgggctgccatcctctgagttggacatctccggcagagccagcgggctaccaagcggaacagaattgagcggccaagcatccggctcaccagatgtcagcggtgagatccctggactgtttggcgtgtctggtcagccctcagggtttcctgatactagcggtgagacaagcggcgtgaccgaacttagcggactgtcctctggccaaccaggaatatctggggaggcatccggggtgttgtatggtacttcacagcccttcggcatcaccgacctatctggtgaaactagtggcgtccccgacctctcaggccagcctagcggactgcccgggttcagcggggcaacttccggcgttcccgacttggtctctggtacaacctctgggtctggagaaagtagcgggattacattcgtggatacaagtcttgtggaagtggcaccaacgactttcaaggaggaggagggacttggaagcgtggaactgagcgggctaccttctggagaagccgacctttcaggaaagagcgggatggtggacgttagtgggcagtttagcggtacggtcgactcatcaggctttacctcacaaactcccgagttttctggcctacctagcggtatcgcggaagttagcggagagagctcacgcgcagagattggctcttccctcccttccggtgcatattatggaagtggaacaccttccagctttccgacagtctctctcgtcgatcgaacccttgtcgaatctgtcacgcaagccccaacagcccaagaagctggtgaagggccgtctggcattctggaactcagcggcgcgcactcgggagctcctgacatgtcaggcgagcactcaggatttctagatctatctggattgcagtctggactgatagaaccgtccggggagccaccagggaccccttatttctccggcgacttcgcttctacgactaacgtttcaggagaatcatcagtggctatggggacctcaggggaagcatccggacttcctgaagttacactgattacttccgaatttgttgaaggtgtgaccgaacccaccatctcccaagaacttggccaacggccacccgtgacccacacaccacagctatttgagagctctggcaaggtcagtacagccggcgatatttctggcgctacacccgtgctccccggatctggtgtggaggtatcaagcgtccctgaatcctcaagtgagacgtcagcttatccagaggcaggctttggcgcctccgcagctcctgaagcaagcagggaagatagtggatcccccgatttaagcgaaacaacctcagctttccacgaagctaacctggagcgatcatctggacttggcgtatctggatctaccttaacttttcaagagggagaggcctccgctgcccctgaagtgagtggggagagcacgacaacatccgacgtgggcaccgaagccccaggtctgccctccgctacacctacagcctctggcgatagaacggaaatcagtggagatctgtcgggacacacctcacagctgggcgtcgtcattagtacatctataccagagtctgaatggacgcagcagacacagcggccagccgagacacaccttgagattgagtcatcctcactgctatactctggcgaggaaacccatactgtagagaccgcgacctcacccaccgacgcttctatccccgcctcaccagagtggaagagagagagtgagagcacagcggccgaccaagaagtttgcgaagaaggctggaataagtatcaaggacattgctaccgccattttccagatagggaaacttgggtggacgcagaaagaagatgcagagaacagcaatcccacttgtcatcgatcgttaccccagaagagcaagagtttgttaataacaacgcccaggactaccagtggatcggccttaacgacaggacaattgagggcgacttcagatggagcgacggacacccaatgcagttcgaaaactggcggcccaatcaacctgataattttttcgcagctggtgaagactgcgtcgttatgatatggcacgagaaaggcgaatggaatgacgtgccttgcaactaccacctgccgttcacttgtaagaaaggcacagccactacatacaagcgaagactacagaaacgttcaagccggcaccctcgacgttcacgaccatctaccgcccactag

SEQ ID NO: 248615 - RNA, 7593 nt, synthetic construct
  misc_feature 1..7593: note = Description of Artificial Sequence: Synthetic coding sequence
  source 1..7593: mol_type = other RNA
atgactaccttactctgggtcttcgttacacttcgggtgatcaccgcagctgtgactgtcgaaacatccgaccatgacaatagtttgtctgtttccattcctcagccttcccccctccgagttctccttggaacgtctctgacaatcccctgctatttcatagatccgatgcacccggtgactactgctccttccactgctcccttagccccccgcatcaagtggtccagagtctctaaggaaaaggaagtggtactgctcgtggctaccgagggacgagttcgcgtaaatagtgcataccaagataaagtgagtctccccaattacccagctatcccctccgacgccaccttagaagtgcagagcctgaggagtaatgacagcggggtgtatagatgcgaggtcatgcatgggattgaagacagcgaagcaactttggaagtggttgtaaagggaattgtgtttcactatagggccatctctactagatacacactggattttgatagagctcaacgcgcatgcctgcagaatagcgctatcatcgccacccctgaacagcttcaggcagcatatgaagacgggtttcaccagtgtgacgcaggttggctcgccgatcaaaccgtcaggtaccctatacataccccaagagagggatgctatggcgataaggatgaatttcccggagttcggacctacgggattagagatacaaacgagacatacgacgtgtactgcttcgcagaagagatggagggggaggtgttttacgctacctcacctgagaaatttactttccaggaggccgccaatgaatgtagaaggctcggtgctcgcctcgccacaaccgggcagctctatttagcttggcaggcaggtatggacatgtgtagcgcaggatggcttgccgatagatctgttcgatatcccatttcgaaagcaagaccaaactgtggcggaaaccttttgggagtgcgcacagtgtacgtgcacgctaaccagaccggctaccctgacccatctagtaggtatgacgctatttgttatactggcgaagactttgtggatattcctgagaacttctttggtgttggtggagaggaagatattaccgttcaaaccgtgacgtggccagacatggagcttcccttacctaggaatattaccgagggcgaagctaggggttcagtgatcctgacagtcaagccgatcttcgaagtgagtccaagccctttggagccagaagagccttttacatttgccccagagatcggtgctacagcatttgcggaggttgaaaacgaaacaggagaggctacccggccatgggggttccccacaccgggactgggtccagccaccgcctttacatcagaggatcttgtcgtgcaagttacagccgttcctggtcagccacacctgcctggcggcgtagtcttccattatagacccggccctacgcgttattcactgacttttgaagaggcccagcaggcatgtttacgaacaggagccgtgattgcttctcctgagcaactgcaggcagcatacgaagctgggtatgaacagtgtgacgctggatggctgcgtgatcaaactgttaggtaccctattgtaagtccccggactccatgtgtgggcgacaaggacagtagccccggcgtgcgaacctacggagtgagaccttctactgagacctatgatgtctattgctttgttgatagattagaaggagaggttttcttcgctacgagactcgagcagttcacattccaggaagccctagaattttgcgaaagtcataatgcaactctagccactactggacaactgtacgccgcatggtctagaggccttgacaaatgctacgccggatggctagcagatggctccctcagatatcccatcgtgacacctaggccagcctgcggcggcgacaaacctggtgtgcgtaccgtttacctgtaccccaatcagactggcctcccagaccccttatctcggcatcacgcattctgtttccgaggaattagcgccgtcccatctccaggtgaagaagagggggggactccaacctccccgagtggggtcgaagagtggatcgttacacaagtagtcccaggcgtggctgctgtgccagtcgaggaggagactactgctgtacccagcggcgagaccaccgctatattagaatttacaaccgagcctgaaaatcagacagagtgggaacccgcatatacccccgtcgggacttctccactacctggtatcttgcctacctggcctcctacaggcgccgccaccgaggaaagcactgaaggaccctcggctactgaagtaccgagtgcctctgaagaaccatctccctctgaagtgccctttccttccgaagaacctagcccttctgaagaacccttcccgagcgtccgcccattcccaagtgtcgagctctttcctagcgaggagccattcccctccaaggagccatcgcctagtgaggaaccaagtgccagcgaggagccttacaccccttccccccccgtgccatcttggacagaactgccctctagcggagaagaaagtggcgccccagacgtcagtggagattttaccggctctggtgatgtgtcaggtcaccttgattttagcggtcagttatctggcgatcgcgcctccggattgccgtctggcgatctagatagcagcgggctgacttccaccgtgggttcaggcctcccagtggaatccggccttccaagtggcgatgaggaacgcattgaatggcctagtactcccaccgtcggggagcttccgtcaggcgccgagatactggaagggtccgcctcaggagttggagatttgtctggattgccttcgggcgaggtgctggagacctctgcaagcggtgttggagatctcagtggtctgcctagtggggaagttttagagactacagcacccggcgtggaagatatttctgggttgccgtccggcgaggtgctagagactaccgctcctggagtcgaagatataagcggactgccctccggagaagtgttggagaccaccgccccaggcgtcgaagacattagtggactgccctcaggtgaagtgctagaaactaccgctcccggtgtcgaggacatatctgggctcccctcaggcgaagtgctggaaaccaccgcgcctggagtggaagacatatccggcctgcctagcggagaagtactagaaactactgccccaggggtcgaggacatctcggggcttccatctggagaggtactggagacggctgcccccggtgttgaggacatttccggactacccagcggagaagtgttagagacagcagcccccggtgtggaggatatttccgggcttccttcaggagaggtgctggaaaccgcggcccccggggtggaagacatatccggcttgcccagcggagaggttctggaaacagctgcccctggcgtggaagatatttctggcctccccagcggtgaagttctcgagacagctgcacctggggtggaggatatcagtgggttaccatctggcgaggtgcttgaaactgccgcacctggcgtggaggacattagcggactaccctcaggcgaagttttggaaaccgccgcaccaggtgttgaagatatcagcgggctaccgtcaggagaggttttggagactgcagccccaggcgtggaggacattagcgggctgccgtcaggcgaagtcctggagactgcagcacccggagttgaagatatctcgggtctgccttctggcgaagtattagagaccgccgcacccggagtagaggacatctccggcctgccatcaggggaggtgctggaaactgcagccccgggcgtggaagacatcagcggactgcctagtggtgaagtcctcgagacggcagctcctggcgtagaggacatctcagggctaccctcaggggaagtactagaaactgctgcacctggcgtcgaagacatctccggtttgccttccggtgaggtgcttgaaactgccgcaccaggcgtcgaggacatttctggcctgcccagcggtgaagttctggagacagcagcacctggggttgaagatatatccggcttaccttccggcgaagtattggaaacagccgccccaggagtggaagacataagcggactgccaagcggagaagtgctcgagactaccgcgcccggcgttgaagaaatatctggcctgccttccggtgaagttttagaaactactgctcctggcgtggacgagatttcaggcctccctagcggcgaggttctagagacgactgcacccggcgttgaagagatcagtggtctgccctctggtgaggttctagaaacgtctacatccgctgtcggcgatctaagtgggctcccgagcggcggagaggtgttggaaatcagcgtctcgggagtggaagacattagcggattgccgtcaggagaggtggttgagacttccgcatctggcatagaagatgtgtccgaactaccctctggggaaggattagagactagcgcatcaggggttgaggatcttagtagactcccgtctggagaggaggttcttgagatttcggcaagcggttttggggatttgagtggcctgcctagcggaggagaaggactggagacatcagcaagcgaggtagggacagatctcagcggtctgccctctggccgagaggggcttgaaacgtccgcttctggcgccgaggatcttagtggcttgccatcaggcaaagaagatctggttggttctgcatccggcgatctggacttaggcaagctccccagcggaaccctcggcagtggccaggcccctgagacatccgggcttccatccggtttctccggcgagtacagcggcgttgacctgggatccggccccccttccgggcttcctgacttctctggactcccatccggctttccaaccgtcagcctggtagacagtaccctggtggaagttgtcaccgcctcgaccgcttctgagctggaaggaagaggtactatcgggatatcaggcgccggtgaaatcagcgggctcccatcttccgaactagacatctccggccgggcctctggactgccaagtggaaccgagttgtctggccaggcttccggatctccagacgtttccggagaaatacctggattattcggcgtttcagggcagccaagcggctttcccgataccagtggggagacctcaggggttaccgaactaagtggcctgtcgagcggacaaccggggattagcggggaggccagcggtgtgctttacggcaccagccaaccattcggcatcacggacttatcgggagaaacttctggcgtacccgacctgtctggacagccatcaggactgcccggcttttctggagcaacgtccggcgtacccgatctggtctctggtactacatccgggtctggcgagagttcaggcattactttcgttgacacctcactagttgaagtagctcctacgacgtttaaagaggaggaaggcttgggctctgttgagttgtctggtctgccaagtggtgaagccgatctgagtggaaaatctggcatggtggacgtgagtggacagtttagcgggactgttgactcctccggcttcacaagccaaactcccgagttctctggcctgccttctggcattgccgaggtatcaggtgagagttcgagggctgagattgggagctccctgccgagcggagcctactatggtagcggcactccgtcttccttccccacggtcagtctagttgataggacactcgttgaatcggtgacacaagcccctaccgctcaggaggccggagaggggccaagtgggatactggaattaagtggagctcacagcggagcaccagacatgagtggagagcattccgggtttttagatctctcaggattgcaaagcgggttgatcgagcccagtggagagcccccagggactccttattttagcggcgattttgccagtaccacaaacgtctcgggagagtctagcgttgcaatggggacatcaggcgaggcaagtgggttgcccgaagttaccttgatcacatccgagtttgtagaaggtgtgaccgagccaaccatttcacaggagttgggccagcgtcctcccgttactcacacaccccagctctttgagtcatccggaaaagtcagcacagcgggtgacatttctggcgctaccccagtcttaccaggcagcggtgtcgaggtgagctcagtacctgagagtagcagcgaaacgagcgcctaccctgaggccggcttcggagcgtctgcagcccccgaagcttcacgagaagattccggcagtcccgacctgagcgagacaaccagcgcttttcatgaggcaaacctggaacgaagcagcggacttggcgtgtcaggtagtacgttaacctttcaagaaggtgaagcaagtgctgctcccgaggtaagcggagagagcacgacaacctctgatgtgggtacagaagcccccgggctgccatccgccactcctactgcctctggagatcgaaccgagattagcggtgacctgtcaggacatacttcccaactgggggtagtcatatccacctctatccccgaatcagaatggacacaacagacgcagagaccggccgagacacaccttgagatcgaatctagttccctgctgtactccggtgaggagacccatacagttgagacagctacctccccaaccgatgcctccattccagcttcacccgagtggaagcgcgagagtgaaagtaccgctgctgccccggccagaagctgtgccgaagaaccctgtggagccggaacctgcaaggaaaccgaaggacatgtgatctgcttgtgtccgcccggttataccggcgaacattgcaatatcgaccaagaagtatgtgaagaaggctggaacaaataccagggacactgctacagacatttccccgatagagaaacatgggtcgacgcagagcgacggtgtcgcgaacagcagtcacacctgtctagcattgtcaccccagaggaacaggaattcgtgaataacaacgcccaggattaccagtggattggtctcaacgatcggacaatagaaggcgatttcaggtggtctgatggccatccaatgcagttcgaaaactggagaccgaatcagcccgacaatttttttgccgccggagaggattgcgtggtcatgatttggcatgaaaaaggagaatggaacgacgtgccctgtaactaccatctgccttttacttgcaagaaaggaaccgtggcctgtggtgaacctccggtggtcgaacacgccagaacgttcggacagaaaaaggacagatacgagataaatagcttggtgagatatcagtgcaccgaaggatttgttcaacgccacatgcctacaatccgctgccagcctagtggccattgggaggagcctcagataacatgcacagatccaactacatacaaaaggaggctacaaaaaagatccagtcgacatcctcgcagaagccgccctagtaccgcccattag

SEQ ID NO: 248616 - RNA, 7479 nt, synthetic construct
  misc_feature 1..7479: note = Description of Artificial Sequence: Synthetic coding sequence
  source 1..7479: mol_type = other RNA
atgacaaccctgctgtgggtgtttgtgaccctacgtgtcatcactgcagccgtgaccgtagaaacaagcgaccatgacaactccctaagcgtctctatcccccaacctagtccacttcgagtcctgctcggtacctcactcaccattccttgttatttcatcgaccctatgcatcccgttactaccgcgccgtctacagctcccctcgcacctcggatcaagtggagccgggtgtccaaagaaaaagaagtggttctgctggtggccaccgaaggcagagtcagggttaactcagcgtatcaggataaagtgtccttacctaactacccagccatacccagcgatgcaacgctcgaggtgcagagtttgcgatccaacgactctggcgtttatcggtgtgaggtgatgcacggcatagaggactcagaagccacattggaagtggtcgtgaaaggcatcgtattccattatagggcaatttctaccaggtatacacttgacttcgatcgagcccagagagcgtgcttacagaactccgcaatcatcgccacacctgaacaactccaagctgcctatgaagacggattccatcaatgtgatgcagggtggcttgcagatcagaccgtaaggtacccaattcacaccccaagagaaggttgttacggcgataaagacgaattcccaggcgtcaggacgtacggtatcagggacacgaatgagacctatgatgtgtactgtttcgctgaggagatggagggcgaggtgttttatgctacaagtcccgaaaaattcacgtttcaagaggctgctaatgaatgcaggaggctgggggcccgtctggccactacaggtcagctctacttggcctggcaagccggaatggacatgtgttccgcaggttggttggcagatagaagtgtcaggtatcccatctctaaggctaggcccaattgtgggggaaacttgttgggggtgcgaactgtgtacgtgcatgccaatcaaaccggataccccgatccaagctctaggtatgatgcaatctgttacacaggcgaggattttgtggatatccctgaaaatttctttggcgtggggggcgaggaagacatcactgtgcaaactgttacttggcccgacatggagctccctctacccaggaacatcaccgaaggggaagcgcgtgggtccgttattttgactgtgaaacccatttttgaggtgtcacccagtccactcgagccagaggagccatttactttcgcccctgagatcggagccaccgcatttgctgaagtggaaaacgagacaggtgaggccacacggccctgggggttcccaacaccgggtctgggaccggcaaccgcctttactagcgaagacctagtcgtccaagtgacagccgtacctggccaacctcatcttcccggcggcgtagtgttccattataggccagggcccactagatattccctgactttcgaagaagcccagcaggcctgcctgcggacgggagccgtgattgccagccccgaacagctgcaggcggcgtacgaagcaggttacgagcagtgtgacgccgggtggttacgagatcagacggtccggtacccaatcgtgagtccccgaaccccttgcgtgggagataaggatagctcccccggagtcagaacatacggcgtacggccctctacagaaacatacgatgtgtactgcttcgtggatcggcttgaaggcgaagtattttttgctacacgtttagaacagtttacatttcaggaggcgctcgagttttgcgaatcccacaatgctaccctggctacaactggacagctttacgcagcctggagtcggggcctggataaatgctacgccggttggctggcagatggcagcctccgatatcctatcgtgacccctcggccggcatgcggaggcgacaaaccaggagtccgaactgtttatctctatcctaaccagacagggctacctgaccctctctcacgccaccacgccttctgcttcagaggtatttctgccgtaccctcccccggtgaagaagaaggaggaacgcccacttccccatctggcgtcgaggaatggatagtcactcaggtcgtccccggcgtcgccgcggtgcccgtagaagaggagaccactgccgtaccatcaggcgaaactactgctatcctggagtttactacagagcccgaaaatcaaacggagtgggaaccagcttatacgcccgttggaacatctccactacctggaattctgcctacttggccaccaactggagctgcaactgaagaatcgaccgaaggtcctagtgctaccgaagtgccctccgccagtgaagagccctccccttctgaggttccatttcctagcgaggagccctctccgagcgaagaaccgttcccatccgtgcgtccgtttccctccgtagaactgtttccatccgaagagccttttccttccaaagaaccctctccgtccgaggaacctagcgccagcgaagagccctatacacccagtccccccgttccatcatggacagagcttccatcttcaggcgaggagagcggcgcacccgacgtgagtggagattttacagggtcaggcgacgtctctgggcacctagatttttccgggcagcttagtggcgatcgagccagcggactgccatccggcgatttagatagtagcggtctcactagtactgtgggttctggcctgccagttgaaagtggactccctagtggtgatgaggaaaggatcgaatggccatcgacacccacggtgggcgaactcccaagtggtgccgagattctggagggatccgcgagcggagtcggtgatctgtctgggctgccgagtggagaggtgctggaaacaagcgcatcaggagtgggcgatctgtctggtttgcccagtggagaggttctcgagacaactgcacctggagtggaagatatctctggacttccctcaggcgaagtcctcgaaactacagcacctggcgtggaagacatcagcggactgccatcgggagaagtgcttgagaccactgctcccggcgtcgaggatatttcagggctcccctccggcgaggtcttggagaccacagctcctggcgtcgaggacatatcaggactacccagcggcgaagtgctggaaacgactgctcctggcgtggaagatatcagcgggctaccctcgggcgaagtcctggaaacaacggcccctggtgtggaggacatctctggactcccctccggcgaagtattagagactgcagcccccggagttgaagatatttcaggcctccctagtggggaagtgctcgagactgccgcacctggcgtggaagatatctctggcctgcctagcggagaagtcctcgagacagcagctccgggcgtcgaggatatttctggtcttccgagtggcgaagtgctcgagaccgcagctcccggggttgaggacattagcggactaccctcaggtgaggttctcgaaacagctgcccccggcgtggaagatatatctgggctcccatcaggagaggtgctcgagaccgccgccccaggtgttgaggatattagtgggctccccagcggtgaggtgttggagaccgcagcgcctggtgtagaggatataagtgggctcccaagcggcgaggtgctagagacagctgctcctggagtggaggacatttcgggattgccatctggtgaggttttggaaaccgccgcccccggtgtcgaagacatcagcggactaccatcaggtgaggtgctggaaactgccgcccccggagtagaggacatcagcggactgcctagtggcgaagtgctagaaactgccgcacctggcgtggaagacatttctggccttccctctggcgaggtccttgagactgctgcacccggagtggaggatattagcggactgccctccggagaagtcctcgagaccgcagcccccggagtggaggatatctcaggcttgcccagcggagaagtgctggagactgctgccccaggtgtagaggacatctctggcctgccatctggcgaggtcttagaaacggccgctcccggcgtagaggacatttcgggcctgccgtccggggaagtgctcgagaccgccgcaccaggcgttgaagacataagcggcctacccagcggtgaggtactggagacaacagctcctggggtggaggagatatccggtctgcccagcggagaagtattagagaccacggcccctggcgttgacgaaataagcggcctgccctctggagaagttcttgagactactgccccaggcgtggaggaaattagcggcttacctagcggagaagttctggagactagtacttctgccgtgggagatttatcaggcctgccctccggtggtgaagttctcgaaattagcgtttctggcgttgaagatatcagtggtttgccctccggtgaggtcgtcgagactagcgcctccggcatcgaggatgttagcgagttaccatccggcgaagggcttgaaacaagtgctagcggcgtagaagacctgtcgagactgcccagtggcgaagaagtactcgagattagcgcatccggcttcggggatttatcaggactacccagtggcggagaaggactggagacatcagccagcgaagtggggacagatctgagcggacttccctccggtagggagggtctggagacatctgcctctggggccgaggatttaagcggcctgccttctggtaaagaagaccttgtcggaagcgcttctggagaccttgatctaggaaaactaccatcgggcacacttggcagtggtcaagccccagagaccagcggactaccctccggcttttctggcgaatatagcggcgtggaccttggctcaggaccccccagcggcctcccagacttttccggcttgccctccggcttccccacagtgagtctcgtagactccacccttgtggaagttgtgactgcttcaaccgcgagcgaactggaggggagaggaactatcggaataagcggagctggtgaaatctcaggcctgcccagtagcgagttagatattagtggacgtgcaagtggcttacctagcggcacagaactcagtggccaggcctcaggatccccagacgttagtggcgagatccccggactatttggggtaagcggtcaacccagcggcttccccgatacaagtggagaaacctccggtgtgaccgaattgtcgggactgagcagtggacagcccggaataagcggggaagccagcggagtgctgtatggaacttcccaaccattcgggatcaccgacctttcgggagaaacatccggagtgcccgacctcagcgggcagcccagtgggcttccagggtttagtggcgcaacctccggggtacctgatctggtgagcggtacgacttcaggatctggcgagtctagtggaataacgttcgtcgacacctctctggtcgaagttgcaccaaccacatttaaagaagaggaggggttggggtctgttgagcttagcgggctcccaagtggagaggccgacctgagtggaaagagtggaatggttgatgtaagtggacaatttagtgggacagttgattcttccgggttcacctctcagacaccagaattctccggcctgccttctgggatcgccgaagtctctggtgaatcctcacgcgctgaaatcggttcctctttgccttctggggcgtactacggttcaggcacaccatcgtcctttcccacagtcagccttgtagaccggacgctggtcgaatccgtgacccaagcacccacggcacaggaagcaggcgagggtccctcaggtatcctggaattgtctggagctcacagtggggcccccgatatgagtggagaacattctggatttcttgacttgtcgggactgcagagcggccttatcgagccaagcggtgagcctcccggaacaccatactttagtggagatttcgcaagcacaactaacgtctctggagaatcctccgtggcaatggggacttctggcgaagctagcggactcccagaagtcacgctcattacaagcgagttcgttgaaggagttaccgagcctactatatcccaggaactgggccaaagaccccccgtcactcacaccccacaacttttcgagtcctcaggtaaggtgtccacggcaggagacatttctggggctacacccgtactccccgggtctggagttgaggtctcttccgtgcctgagtcgtcttctgagacatccgcataccccgaagcaggattcggggcctcagcagccccagaggcaagtcgagaagactccggcagtccagacctgagcgaaaccacaagcgcatttcacgaggcaaatctggaaaggagcagcggtttaggtgtgtctggaagcactctcacctttcaagagggagaggctagcgccgccccagaagtgagtggtgaatcaactacaacaagtgacgtgggtacagaggcccccggattaccaagcgcaacccccaccgcaagcggcgacagaactgagatctccggggacctgagcgggcacactagccaattaggggtggttataagtacgagcattcccgaatcggagtggacccagcagacacagcgcccagcggagactcatttagagatcgaatcatcaagcttgctgtattccggggaagaaacgcacacggtggaaacagcaacaagccctacagacgcttcaatccctgccagtcccgaatggaagagagagtcagaatctactgctgccgatcaagaagtctgcgaggagggatggaacaaataccagggacactgttaccggcatttcccagatcgcgaaacatgggtggatgctgaaaggagatgtagggagcagcaatctcatttgtcctctatagtaacacccgaagaacaagagtttgtcaacaacaatgctcaggattaccaatggattggcctgaacgaccgcacaatcgaaggagatttcaggtggagcgatgggcatcctatgcagtttgagaactggcgacccaatcaacctgataatttttttgcagcaggggaagactgcgtggtaatgatttggcatgagaagggtgagtggaacgacgtgccctgcaactatcacctgccttttacttgtaaaaagggtaccgtcgcctgcggagagccccctgtcgtggaacacgctcgaacgttcggacagaaaaaggataggtacgagattaatagccttgttagataccagtgcacagaaggattcgtacagcgccacatgccgacaatccggtgccaaccttcagggcattgggaagagcctcagattacgtgtacagatcccactacatataaacgccgcctccagaaaagatcttctcgtcaccctcgccggagccgcccctccaccgcgcattag

SEQ ID NO: 248617 - RNA, 7593 nt, synthetic construct
  misc_feature 1..7593: note = Description of Artificial Sequence: Synthetic coding sequence
  source 1..7593: mol_type = other RNA
atgacaaccctcctgtgggtgtttgtaactctaagagtcatcactgccgcagttacagtcgagacttctgaccatgacaattccttatctgtgtccattccacagccttctccactccgtgttcttctgggaacaagcctgaccatcccctgttatttcatcgatccaatgcatccagtcactacagctccatctacagctcccttagccccacgtatcaaatggtcacgagttagcaaggaaaaggaagtggtgttactggtagctaccgaagggcgcgtccgggtcaattcagcctatcaggacaaggtctctctccccaactatcccgctataccttctgatgcgaccctcgaggtacaatctctgcgttcaaacgacagcggggtgtatagatgtgaagtcatgcacggtatcgaagatagtgaagcgacgcttgaagtagtggttaaggggatcgtcttccactaccgcgctattagcaccagatatacattggactttgatagggcccagcgcgcatgcttacagaattccgcgatcatcgccacacctgaacagctgcaggcagcctacgaggacggattccaccagtgtgacgctggatggctagctgaccagacagtccgctaccctatacacactccacgagagggttgttatggtgacaaagatgagttcccaggagtgaggacttacggtatcagagatacgaacgaaacctacgatgtctactgctttgctgaagaaatggaaggcgaggtgttttatgctaccagccccgagaaattcactttccaggaggccgcgaatgagtgtaggagacttggcgcgaggttagctactactggtcaattgtacctcgcttggcaggcaggcatggacatgtgctcagcaggttggcttgccgacagatccgtccgatacccaattagcaaggctaggccaaactgtggcggcaatcttctgggcgtgaggaccgtttacgtgcacgcgaaccaaaccggctacccagacccttcaagcagatacgacgctatctgctatacgggagaggatttcgtggacatacccgagaatttcttcggcgtcggcggagaggaagacattacagtgcagaccgtcacttggcctgacatggaactgcccctgcctcggaacattacagaaggagaagcgcgcggctcagtaattctcaccgtcaaacccatcttcgaagttagtccatctcccctcgagccagaagaaccctttaccttcgctcctgaaataggcgctacagccttcgcggaggtcgaaaatgaaaccggcgaagctaccagaccttggggattcccaaccccaggcttgggcccggccacagcattcacatcggaggacttggtagtgcaagtaaccgccgtccctgggcagccacacctcccggggggagttgtctttcactatagacctggtcctacacgctatagcttaacctttgaggaggctcaacaagcatgtttgcggacgggagccgtgattgcttcccctgaacagcttcaggctgcatacgaagcagggtatgaacagtgcgatgcaggatggctcagagatcaaacagtcagatatcccatcgtatcccctcgaacaccttgtgtaggtgacaaagattcatcccccggagtgagaacctatggcgtgagacctagcacggaaacctacgatgtctactgctttgtcgatcggctggaaggagaagtcttttttgctaccaggttagaacaatttacattccaagaggccctggagttttgtgaatcacacaatgccacattggctacaacgggccaactatacgccgcatggtcaagaggactggacaaatgctatgctggatggcttgcagacgggagccttcgctatcccatcgtgactcctaggcctgcgtgcggcggtgataagccaggcgttagaaccgtttatctgtacccaaatcagactggcctgcctgatcccctgtcaagacatcacgcattctgctttcgtgggatatcggcagtaccatcaccaggtgaagaagagggaggcacaccaacatctccaagcggtgtggaggaatggattgtaacccaggtggtcccaggcgtcgccgctgttcctgtggaagaggagaccactgccgtaccttctggagagacaaccgcaatcctggagtttaccacggagcccgagaaccagactgaatgggaacccgcttatacacccgtcggaacatcccccctccccgggatattgcctacatggcctccgaccggagcagccacagaagagagtacggagggaccttctgcaacagaggtacccagcgcatccgaagagccttccccctccgaagtccccttccccagtgaagaacctagcccatctgaagaaccttttccctctgtgagacccttcccttcagtagaactctttccatccgaggaacccttcccctcgaaggaaccatccccctccgaagagccctcagcatctgaggagccttacacaccttcccccccagtgccaagttggaccgagctgccatcttcaggcgaagagtccggggctcctgatgttagtggggatttcacaggttcaggcgatgtcagcggacacctagatttctctggacagctgagcggtgatcgcgcttcaggtctgccgtccggcgatctcgacagcagtggactcacctctacagtcggctcagggctgcccgtagagtcaggattacctagtggtgacgaggagaggattgaatggcctagtacccctacagtgggcgagctgccctccggcgccgaaatccttgagggatccgcctccggagtgggcgacctgtcaggcctgccttctggagaggtgctcgagacgtctgccagcggagtcggtgatttgagtggactaccctccggagaggttctggagacaaccgcacctggcgtagaggacataagtggtctgccgagcggcgaagtgcttgagactaccgctccaggagtcgaagacatctcaggtctcccttccggggaagttctggagacaacagctcccggggtggaggacattagtgggcttccgtcaggggaagtgctcgaaacgactgcacctggtgtggaggacatatccggtctgcccagcggagaggtactggaaaccaccgcacccggcgtggaagatataagcggactgcccagcggagaggtactagagactaccgcccccggcgtcgaggacattagtggcttgccctctggcgaagttcttgagactgccgcacccggcgtagaagatatcagtggactgccctccggcgaagtgctagaaaccgcagctcccggcgtcgaagacatctcgggactaccgtcgggagaggtgctcgaaacagctgcacccggagtggaagatatatccgggttgccttctggcgaagttcttgagaccgcagcaccgggagttgaggatatatccggcctgccatctggtgaggtcttggagactgctgcccccggggtggaagacatctctggcctgccctcaggagaagttttagagaccgcagccccaggggttgaagacatctcaggcctgccatccggggaggtcctggaaaccgctgcccctggcgtcgaagacatcagcgggctacccagtggagaagtgctagagacagctgccccaggagtggaggacatctcaggtctgccatccggtgaagtgttagaaactgcagctccaggcgtggaggacataagtggtctgccttcaggcgaagtattggagaccgctgcccctggggttgaggacatcagtgggttgccatcaggagaggtgctcgagaccgctgcgcccggtgtggaagatatctctggattgccctcgggggaggtgctggaaaccgctgccccgggcgtggaagacatcagcggattgccatcgggtgaggtcctggaaacagctgccccaggcgttgaggacatttcaggacttccgagtggtgaggtattagaaacagcggctccaggcgtggaagatatttccggtctgccctccggagaagtccttgaaacagcggctcctggagtggaagatatatcggggttgccaagcggagaagtccttgagacggcagctcccggcgttgaagacatatcaggcctgcctagcggtgaggtgttagaaaccacagcacccggcgtggaagagatctccggtttgccctccggagaggtgttagagacaaccgcacccggtgtggacgagatttccggactcccatccggtgaggtccttgaaacaaccgccccgggcgtcgaagaaatcagcgggctgcccagtggggaagtgctcgagaccagtacaagtgcggtgggcgatctctcaggtcttccttcaggcggagaggtcctagaaataagtgtgagcggagttgaggacataagtgggcttccatccggtgaagtggtagagaccagtgccagcgggattgaggatgtaagcgaactaccttcgggggaaggcctagagacgagcgcaagtggcgtggaagatctatctcggctccccagcggagaagaggtgttagagatctcagcaagcggatttggggacttatcaggactgcctagcgggggtgaaggactggaaactagtgccagtgaagtgggcacagatctgagcggactgccttctgggagggagggtttggaaacatctgccagtggagccgaagacttgagtggtctcccctccggtaaagaggacctagtcgggtctgcctccggagaccttgatctcggaaaactgccctctggaaccctcggatccggtcaggcaccagagacctcagggcttcctagtggatttagtggcgaatattcaggggtagacttagggagtgggcccccatctggacttcccgacttttccggtttgccatctggctttcccacagtctccttagtggactcaactttggtcgaagtggtcaccgccagtactgctagcgaactggaaggccgcggtacaattgggatctcaggagcgggtgagatttccggactgcctagctccgaattagatatctcgggacgcgcttccggactcccatctggcaccgagctttccggtcaagcgagcggcagtcctgacgtcagtggagaaattcccggcctctttggtgtaagcgggcagccctcaggatttcctgacactagtggagaaacctcaggagtaacggagctatcaggtttgtctagcggacaacccgggatctctggggaagcaagcggagtgttgtacgggacaagccagcctttcgggatcacagacttgtctggcgaaacaagtggggttcccgacctatctgggcaaccttctggcttaccaggcttctctggcgctacgagtggtgtacctgatctcgtttccggcacaacctccgggtcaggtgagtcatccggaattaccttcgttgacaccagcttggtagaggtggcaccgactacttttaaggaagaggaaggtctcggttcagtagagctctccggacttccgagcggcgaagccgacctttcaggaaaaagtggcatggtcgacgtgtccggtcaatttagtggtactgtcgacagcagcggttttacttcccagacccctgaattcagcggactgccctctgggatcgctgaagtgagtggagagagcagccgcgcagaaattggcagtagtttgccttctggcgcctactacggatcggggacccctagtagtttccccacagtgtcacttgtggatcggacacttgttgagagtgttacccaggctccaacagctcaagaggctggcgaaggaccgagcggaatcctcgagttatctggtgcccattccggagcccccgacatgtctggcgagcacagcgggtttttggacctcagtgggttgcagagtggcctgatcgaacccagcggggaaccaccaggtaccccatacttctctggcgacttcgcgtcaactaccaatgttagtggcgaaagcagtgtggctatgggcacctcaggagaggcctccggattacctgaagtgaccttaattacctcagaatttgttgaaggcgtaactgaacccaccattagccaagaactcgggcaacgcccccctgtcacccatacaccacagctcttcgagtcttcaggcaaggtctcaactgccggtgatatttcaggtgccaccccagttctgccgggaagcggggtcgaggtgtcatcagttccagagagcagcagcgagaccagcgcatacccggaggcaggatttggcgcatccgctgcccctgaggcctcccgcgaagactctggctccccagacttaagtgagacgacatctgctttccatgaagctaatctggagcgatcttctggcctgggcgtcagcgggtccaccttaacattccaagaaggcgaagcctcagcagcccccgaagttagcggtgaaagtaccaccacttcagacgtgggtaccgaagcccctggcctcccgtcagccaccccaacagccagcggcgaccgcacagaaattagcggagatttgagcggccacactagtcaactcggtgttgttatctctacttccatcccagaatcagaatggacacagcagacacagcgtcccgcagaaacacacctagaaattgagtcatcctcactattatattccggtgaggaaacacacacagtggaaacggctacctccccgaccgatgccagcatacctgcgtctcctgagtggaaaagagagtctgagagcactgccgctgcccccgctaggtcctgcgcagaagagccatgtggcgcaggaacatgcaaagagaccgagggccacgtcatttgcctgtgcccgccaggttatacaggagagcattgcaatatagaccaggaagtatgtgaagagggctggaataagtatcagggtcattgctaccgacacttccctgatcgagaaacatgggttgacgccgaaagaagatgtagagagcagcagagccatttgtcttcaatcgtgactcccgaagagcaggagttcgttaacaacaatgcacaggactatcagtggatcggcttaaatgataggaccatcgaaggcgattttagatggagcgatggacaccctatgcaatttgagaactggcgacccaaccaacctgacaacttcttcgcagccggggaggactgtgtggttatgatatggcacgaaaaaggcgaatggaacgatgtcccttgcaattatcatctgccctttacctgtaagaaaggtaccgtcgcctgtggagagccccccgtagtggaacacgctagaacctttggtcagaaaaaagatagatacgagattaatagcttggtgagatatcagtgtactgaaggctttgtccaacggcacatgcctacaatccggtgtcagcccagtggtcactgggaagaaccccagattacatgtaccgaccccacaacatacaagaggagactccagaaacgatcctcacgccaccctcgtagaagccgaccctccaccgcccattag

SEQ ID NO: 248618 - RNA, 1758 nt, synthetic construct
  misc_feature 1..1758: note = Description of Artificial Sequence: Synthetic coding sequence
  source 1..1758: mol_type = other RNA
atggccgccgtggaactcgagtggatccctgaaactctttataacactgccattagtgcggtcgtcgacaattatataagaagcaggcgcgatatcaggagtcttccagaaaatatccagttcgacgtttattataaactttaccagcaaggaaggttatgtcagctaggaagtgaattctgtgagctggaggtcttcgctaaagtactgagagccttggataagaggcatctgcttcaccattgtttccaggccttgatggaccacggagtgaaagttgcgtcagtgctggcctattctttctcacgtaggtgttcttacattgccgaaagtgacgccgccgtaaaagaaaaagctattcaggttggattcgtgctgggcgggttccttagcgacgccggatggtattccgacgccgaaaaagtttttctgtcttgcctgcagctttgtacactgcatgatgagatgttacactggttcagagctgtggaatgttgcgtgagactcttacacgttcgaaatggaaattgtaaatatcaccttggcgaagagacgttcaaacttgcccaaacttacatggataagctgtcaaagcacggacaacaagccaacaaggcagcactgtacggggaactttgcgcactgctgtttgctaaatcccactacgatgaagcctacaaatggtgcattgaagctatgaaagaaataacagcaggactacccgtgaaagtggtggtggacgtgttgcgccaggcaagcaaagcttgtgtcgtgaagagggagttcaaaaaggccgagcagctcattaaacatgccgtgtacctcgcgagggatcatttcggatcaaaacatccaaaatactcagatactctactcgattacggcttctatcttcttaatgttgacaacatttgccagtccgttgctatttaccaagctgctctcgatattcggcaatctgtgttcggaggcaagaatatccatgtagctaccgctcatgaggacctggcctattcttcctatgtccaccagtacagcagtggcaagttcgacaatgctctgtttcatgcggaaagagctatcggcatcataacccacatactccctgaagatcatctcttgcttgcttcctcaaaacgagtgaaggcccttattttggaagagatcgctattgattgtcacaacaaagagacagaacagcgactcctgcaagaggcccatgacctacacctgtcttccctgcagctggctaaaaaagccttcggagaattcaacgtccaaacggccaaacactacggtaacttaggacgcttatatcagtcaatgagaaagtttaaagaagcggaagaaatgcacattaaagcaatccaaatcaaagaacagctcctgggacaagaggattacgaggtggctctgagcgtcggccacctagccagcctgtacaactatgacatgaaccagtatgaaaacgccgagaaactgtacctacgatcaattgccattggcaaaaagctgtttggcgagggctactcagggcttgaatatgattatagaggcttaattaagctgtataatagtattggcaactatgagaaggtgttcgagtatcataatgtgttatctaattggaaccgactgagggatagacaatactccgttacagatgcccttgaagacgtctctacaagtccccagtctaccgaagaagttgtacagtcctttctgatttcccaaaatgtggaggggcctagttgttag

SEQ ID NO: 248619 - RNA, 354 nt, synthetic construct
  misc_feature 1..354: note = Description of Artificial Sequence: Synthetic coding sequence
  source 1..354: mol_type = other RNA
atgggaacctggggcgccccacatcggaccctgccatgcagaaatcgcggcgctatgcagccgcgtgtcttactagtggtggccctcctcgcccttcttgcttctgctagggccagtgaagcggaggatgcgtcccttttatcgttcatgcagggctacatgaaacatgctaccaagaccgccaaggatgctttgagctccgtccaggagtcacaagtcgcgcagcaggctagaggatgggtaacagatggcttttcttccctgaaagattattggtctactgttaaggacaagttctccgagttttgggacttggatccagaggttagacccacctccgcagtggccgcatag

SEQ ID NO: 248620 - RNA, 168 nt, synthetic construct; identical to SEQ ID NO: 248014
  misc_feature 1..168: note = Description of Artificial Sequence: Synthetic coding sequence
  source 1..168: mol_type = other RNA

SEQ ID NO: 248621 - RNA, 954 nt, synthetic construct
  misc_feature 1..954: note = Description of Artificial Sequence: Synthetic coding sequence
  source 1..954: mol_type = other RNA
atgaaagttctgtgggccgctctgttggtaacctttctggccggatgtcaagccaaggttgagcaagctgtggaaaccgaaccagaaccagaacttagacagcaaaccgagtggcaatcgggacagcgctgggagctggcccttggccgcttttgggactatctacgctgggtacagaccctatcagaacaggtgcaagaagaactgcttagctcccaggtgacacaagaactgagagccctgatggatgagaccatgaaagagctgaaggcatataaatctgaattggaggagcaactaacgcccgtagccgaagagacacgggctagactcagcaaggagctacaggctgcccaagcgaggttgggggcagatatggaggatgtttgtggacgactggtgcagtatagaggagaagtgcaggctatgttgggacagtctactgaagaattgcgggtaagactcgccagccacctcagaaaactgcggaagagactgttaagagatgcagatgatctccagaaacgcttggctgtctaccaggccggggcacgggaaggcgccgaacgcggcttaagtgctatcagagaacgcttagggcctttggtggagcagggaagagttagagcagcgaccgtgggatcgctcgcgggacagcctctccaggagagagcccaggcctggggtgagagattacgggccaggatggaggagatgggcagccggacaagagatcgcttggacgaagtgaaggagcaggtcgcggaagtcagagctaaattggaagagcaggctcagcagattaggctacaggccgaagcctttcaggcgagactgaaaagttggttcgagccccttgtggaggacatgcagagacaatgggctggattagtggaaaaagttcaagccgccgtaggtacctccgcagcacccgtgccaagtgacaatcattag

SEQ ID NO: 248622 - RNA, 660 nt, synthetic construct
  misc_feature 1..660: note = Description of Artificial Sequence: Synthetic coding sequence
  source 1..660: mol_type = other RNA
atgaaggtactttgggcagcattattagttacgttcctggcgggatgccaggccaaggtcgaacaagccgttgagacagaaccggagccagaactgcgtcagcagactgaatggcagagtggtcagcgttgggagctagcactaggcagattttgggactacctgcgctgggtgcagactttatcggaacaggtccaggaggagctcttatcctcacaagtcacccaggaactcagggccctgatggacgagacaatgaaggaactgaaggcctataaatccgaactcgaggagcaacttacacctgttgccgaagaaacacgagccagactcagtaaagagctgcaagctgcacaggcccgacttggagcagacatggaggacgtgtgcggtcgtctagtacaatacagaggcgaagttcaagcaatgctgggtcagagcacagaagagttacgagtgagactggcttctcacctgcggaagctgcgaaaaagacttctgcgcgacgccgacgacctgcaaaagaggctggcggtctaccaagcaggagcgcgggaaggtgccgagagagggttaagtgcaatcagggagcggctgggcccacttgtggagcagggaagggtaagagcagcaacagtgggatctctagctgggcagtag

SEQ ID NO: 248623 - RNA, 867 nt, synthetic construct
  misc_feature 1..867: note = Description of Artificial Sequence: Synthetic coding sequence
  source 1..867: mol_type = other RNA
gaagttaaggatgtgctgccacaggaacccgtccggagtgcagttggcgggacaggcatgtcctccggcgcttcaagaaagtcctgggaccctgggaatccttggcccccagattggcctatcaccgggcgcaaaatgaaggtgttgtgggctgcgctcctggtgaccttccttgccggatgtcaggctaaggtcgaacaagctgtcgagacagaaccggaacctgaattgcgtcaacagaccgaatggcaatcaggccagaggtgggaactcgctcttggaagattttgggactacctgcgatgggtacagacattgagtgagcaggtgcaagaagagctcttgtccagccaggttacccaagagcttagggctttaatggatgaaacaatgaaagaacttaaggcatacaaatccgaacttgaggaacagctgacccctgtcgcagaagaaaccagagcccggctgagtaaggaactccaggctgcacaggcaagactgggggctgatatggaagacgtgtgcggtcgactcgtgcaatatcgtggagaggttcaagcgatgctgggacagtctaccgaggagttaagggtacgcctcgcttcccacttgcgcaaactaaggaaacgtcttctcagagacgccgacgacttacaaaagcgactcgccgtgtatcaggccggagcccgagagggggctgagcgaggcctgagcgctattcgggaaagactgggacccttggtagaacaagggagggtgcgcgctgcaactgtagggagcctggctggtcaacccttacaggaaagagcacaggcatggggggagagacttagggcacggatggaggaaatggggtcacgcacttag

SEQ ID NO: 248624 - RNA, 651 nt, synthetic construct
  misc_feature 1..651: note = Description of Artificial Sequence: Synthetic coding sequence
  source 1..651: mol_type = other RNA
atgaaagtgctgtgggcagccctgttggtaaccttcttggcaggctgtcaggccaaggtcgaacaagccgtcgaaaccgaacccgagcccgaactccgacagcagactgagtggcagagtggacagaggtgggaactagccctgggacgcttttgggactatttgagatgggtacagaccctgtcagaacaagtccaggaagagctcctaagctctcaggtgacgcaagaactgagagctctgatggatgagacaatgaaagaattgaaagcatataaaagtgaactagaagaacagttaacccctgtggccgaagagacgagggccaggctgtctaaagaattacaggccgcccaggccaggctcggggccgacatggaggacgtctgtggccgtttagtccagtataggggcgaagtgcaggcgatgttaggccaatctactgaggagctgcgcgtaaggttggctagccacctcagaaaactgcggaaaagactcttgcgcgacgctgatgatctgcagaaacgactcgctgtataccaggccggtgctagagagggagcagagagagggctgtccgcgatcagggagagacttggccctcttgtagagcagggccgcgtgagagccgccaccgttggatcattgtag

SEQ ID NO: 248625 - RNA, 1245 nt, synthetic construct
  misc_feature 1..1245: note = Description of Artificial Sequence: Synthetic coding sequence
  source 1..1245: mol_type = other RNA
atgcggttcaagtctcacactgttgagcttcggaggccatgttctgatatggaaggcgccgcacttttacgagtatccgtgctatgcatctggatgagtgcgttgtttctaggggtgggcgtgagagccgaggaggcaggggcacgcgtgcagcagaacgtgccttcaggaactgacaccggagacccacagtcaaagccccttggggattgggcggcaggaacaatggacccggaatctagtattttcattgaggacgccataaaatatttcaaagaaaaggtaagcacccaaaatttgctacttctactaacagataatgaggcatggaatggattcgttgccgctgcagaactccccagaaacgaggccgacgagcttcgcaaggctctagataatctcgctagacaaatgattatgaaggacaagaattggcacgataaaggtcagcagtacagaaattggtttttaaaagaatttccacgcctgaagtctgagctagaagacaatattcgtcggctgagagcccttgccgatggggtgcaaaaggtccacaaggggacaaccattgctaatgttgtcagcgggtcactgtcaatttcttctggcatactaacgctggtcggaatgggactcgcaccattcacggaaggtggtagccttgtgctgctagagccgggaatggagttgggtattactgctgccctgactggtattacctcctccacgatggactacgggaagaaatggtggactcaagcacaggcgcacgatctggtcatcaagagtttagataagctgaaggaagtacgcgaatttctcggggagaatatctctaatttcctctcacttgccggaaacacataccagctgaccaggggcatcgggaaggatattcgtgcacttagacgagcgagagcaaatctacagtcggtcccccacgcaagtgcatccaggccccgagtcaccgagcctataagtgcagaatccggtgagcaggtagaaagagttaatgagccctccatcttggaaatgagccgtggcgtcaagctgacagatgtcgcacctgtctccttcttcctcgtcctggatgtcgtgtacctggtctacgaatcaaaacacctacatgaaggtgctaaatccgaaaccgccgaggagctgaagaaggtcgcccaggagctcgaggagaaactgaatatcttaaacaataattacaagattctgcaagccgaccaagaactatag

SEQ ID NO: 248626 - RNA, 834 nt, synthetic construct
  misc_feature 1..834: note = Description of Artificial Sequence: Synthetic coding sequence
  source 1..834: mol_type = other RNA
atgattatgaaagacaaaaattggcacgacaagggccagcagtacagaaactggtttcttaaagaatttcccagactgaaaagtgagttggaagacaatataaggcgtcttagggcactggcagacggggttcagaaggtgcataaggggactaccattgccaacgtcgtgtcgggcagcctgagtatctcttcaggaattctcactctggttggaatgggccttgcaccatttacagaaggtggatccctggttctattggagccgggaatggaactgggcattactgccgctctgacaggcataacttcaagcacaatggattacggcaaaaaatggtggacccaggcccaagcgcatgaccttgtgatcaaatctctagataaactgaaagaggtacgggagttccttggcgaaaatatctccaactttctatccctggcaggcaatacgtaccagctgacaagaggcatcggtaaagacatccgcgccctccggagagctcgggctaacctacagtccgtgccgcatgctagtgcgtctagaccacgtgttactgaacccatctcagcagaatccggcgaacaggttgaacgggtaaacgagcccagcatattagagatgtccaggggggttaaactaactgacgtggcacctgtatcttttttccttgtattggatgtggtatacctggtttacgagtccaaacaccttcatgaaggcgccaagtctgaaaccgccgaagagctaaaaaaggtcgcacaggaactggaggagaaattgaacatccttaataataactacaagatcctgcaggctgatcaggaactgtag

SEQ ID NO: 248627 - RNA, 1197 nt, synthetic construct
  misc_feature 1..1197: note = Description of Artificial Sequence: Synthetic coding sequence
  source 1..1197: mol_type = other RNA
atggaaggagcagctttattacgggtgagcgtgttatgcatctggatgtctgccctttttctgggcgttggcgtgcgcgcagaggaggccggtgcccgtgttcagcaaaacgttccctctggcactgacaccggagacccccaaagcaaacccctaggagattgggcagcgggaacgatggaccctgaatctagcatcttcattgaagatgccatcaaatacttcaaagagaaagtgagtacacaaaatctgctcttgttgcttaccgacaatgaagcgtggaatggattcgtagcagcggccgaattacccagaaatgaagcggatgaactgaggaaagcattggataaccttgcacggcagatgataatgaaggacaaaaattggcatgataaagggcaacagtaccgcaactggttcctaaaggagttccctaggctgaaaagcgagttggaagataatatccgaagactgagagcccttgctgacggagtgcagaaagtccacaaaggtacaactatagcgaacgtggtttcaggttccctttcaatcagttccggaatccttaccttggtaggcatggggttggcgcccttcacggaaggaggatcattggtgctgctcgagcctggtatggaattagggattaccgccgccctgacaggcatcactagctcgactatggattatgggaaaaagtggtggactcaagcccaggcacacgacttggtgattaaatcgttagataagttaaaggaagtgagagaattcctcggcgagaacattagtaacttcctttcactcgccggaaatacttatcagcttaccagaggcattggcaaagatatccgagctttgcgaagggccagagcaaacctgcagtctgttccgcatgcctcggcgagcagaccccgagtgaccgaacccatctcagctgagtccggtgaacaggtcgaaagagtgaatgagccaagcatcctcgaaatgtctagaggcgttaagctcaccgacgtggctccagtcagcttctttctcgtcttggatgtggtctatctggtctatgaatcgaaacacctccatgaaggcgccaaaagcgagacagccgaagagcttaagaaagtggcccaggagctggaagagaaactgaacatcttgaataataactacaaaattttacaggcggaccaagagctgtag

SEQ ID NO: 248628 - RNA, 1197 nt, synthetic construct
  misc_feature 1..1197: note = Description of Artificial Sequence: Synthetic coding sequence
  source 1..1197: mol_type = other RNA
atggagggagcagcactccttagggtttcagtgctatgtatatggatgtctgcacttttccttggcgtcggcgtgcgcgcagaagaggctggtgccagggtacagcaaaatgtcccgtcaggtacagacaccggtgatccacagagcaaacctttaggagactgggctgccggcactatggacccagagtcctcaatttttatcgaagacgcaatcaagtactttaaggaaaaggtatccacccaaaatcttctattattgctgaccgacaatgaggcctggaatggatttgttgccgccgccgaactgcctaggaacgaagcagatgagctcagaaaggccctcgataatttagcccggcagatgattatgaaagacaagaattggcacgacaaaggacaacaatacagaaactggttcctgaaggagttcccgaggcttaaatctgaattggaggacaacatacgcagactaagagcactggccgacggagtccaaaaagtgcacaagggcacgactattgcaaacgtcgtcagcggcagtctgtcaatctcgtctggaattctgaccctcgtggggatgggactggcccccttcaccgaaggtggctcattggttctactggaacccggcatggaactgggaattacggcagcacttacaggcataacttcttcgactatggactacgggaagaagtggtggacacaggcacaggcacacgacctcgtcattaagtccctggacaagctgaaagaagtacgggaattcttaggagaaaatatttcgaacttcctctctcttgccggaaatacctaccagctcactcgcggaatcggaaaggatattagggcccttcgtcgagctcgcgctaaccttcagtcagttccccacgcctctgcttcacgcccccgggtcactgagcccatttcagctgagtctggtgaacaggtcgagagggttaacgaaccgagtattctggaaatgtcgcggggcgtcaaactgacagacgtggctccagtaagcttttttctggtgctcgatgtcgtgtatctggtctacgaatctaagcacttgcatgagggagcaaagtccgagacagccgaagaactgaaaaaggtcgcccaagaactggaagaaaagctcaatattctaaataacaactacaagatactccaggctgaccaagaactctag

SEQ ID NO: 248629 - RNA, 1197 nt, synthetic construct
  misc_feature 1..1197: note = Description of Artificial Sequence: Synthetic coding sequence
  source 1..1197: mol_type = other RNA
atggaaggtgcagcattactacgcgttagtgttttatgtatctggatgtccgctctatttctgggcgtcggcgtgcgggcagaggaggccggcgccagagtccagcagaatgttcctagtggcaccgatactggggacccacaatcaaaacctctgggagactgggccgcgggtacgatggacccggaatcttcaattttcatcgaagatgcaattaaatatttcaaagaaaaggtgagtactcagaatcttctgttgctgttaaccgacaatgaggcatggaatggttttgtggccgcagcagaacttcctcgtaatgaggctgatgagctacggaaggccctggataatctggcacggcagatgattatgaaggataagaattggcatgacaaagggcagcagtataggaactggttcctgaaggaatttccaagacttaagagtgagcttgaagataatatcagacggctgcgggcactggcagatggagtacaaaaggtacataaagggacgacgattgccaatgtggttagcgggagcctctcgatcagtagcgggatcctcacgctcgtgggcatgggcttagccccttttacagaaggtggctctctggtcctgcttgaaccagggatggaactcggcatcacagccgccctgacaggaatcacgtcttccactatggattacgggaagaaatggtggacacaggcccaggcacacgacttagtgataaaaagcttagacaaacttaaggaagtccgggaattcttaggcgaaaacatctctaattttttatccctggcggggaacacatatcagctgacgcgcggaattggaaaggacatcagagcgcttagaagagcccgcgctaacctccagtccgtcccccatgctagcgccagtcgcccacgcgtcaccgaacctatttcagcggagtcaggcgagcaggtagaacgggttaacgaaccttccatactggaaatgtcaagaggcgtgaagctgacagacgttgctccagtcagtttcttcctggttttggacgtagtgtacctggtctatgagtccaaacatctccacgagggtgcaaaaagtgaaactgccgaagagttgaagaaggtcgcacaagagttggaggagaagttaaatatactgaataacaattacaaaattttgcaggctgatcaggagctgtag

SEQ ID NO: 248630 - RNA, 1197 nt, synthetic construct
  misc_feature 1..1197: note = Description of Artificial Sequence: Synthetic coding sequence
  source 1..1197: mol_type = other RNA
atggagggcgctgccttactcagggtgagcgtcttatgtatttggatgtcggcattgtttctgggagtaggtgtccgagcggaagaagcaggtgcccgagtgcaacaaaacgtgccatctgggaccgatacgggagatcctcagagcaaaccactgggtgactgggctgctggaacaatggaccctgaaagttctatttttatcgaggacgcaatcaagtattttaaggagaaagtatccactcagaaccttctattattgttgactgataacgaggcatggaacgggtttgtagccgccgctgagctgcccagaaatgaagctgacgaattgcgtaaagcccttgacaatcttgctcgccaaatgatcatgaaggataagaattggcacgacaaaggccagcaatatcgaaactggtttctgaaggagttcccaagattaaaatctgagttagaagacaatattcgtcgtcttagggccttggccgacggggttcaaaaggtccacaaagggacaacaatcgctaacgtcgtctccggatcactatctatcagcagcggtatcctgacacttgtgggcatggggcttgcaccctttacagagggaggctccttggtactattagagccggggatggaactaggtatcactgccgctctcacagggatcacaagcagcacaatggactatgggaaaaagtggtggacccaggcccaagcacacgatcttgtcattaaatccctcgataaactgaaggaggtgcgggagtttctcggcgagaacattagcaattttctctccttagcaggaaatacctaccagcttacaaggggcatcggaaaggatattcgcgcccttagaagggctagagccaatctgcagtcagtgccacacgccagtgctagccgcccaagagtaaccgaacctattagcgcagagtcaggcgaacaagtggagcgagtaaatgagccaagcatactagaaatgagccgcggcgtgaagctgactgacgtggctcctgtgagcttctttctcgtgctggatgtagtgtaccttgtatatgaatccaagcatcttcacgagggcgcaaagagtgagacagcggaagagttgaaaaaggtggcacaagaactggaagaaaagctgaatatcctgaataacaactacaagatcttgcaagccgatcaggagctgtag

SEQ ID NO: 248631 - RNA, 1143 nt, synthetic construct
  misc_feature 1..1143: note = Description of Artificial Sequence: Synthetic coding sequence
  source 1..1143: mol_type = other RNA
atggaaggtgctgctttacttagagtttctgtattgtgcatttgggtgcagcaaaacgttccctctggtacagataccggcgaccctcagtcaaaacctctgggcgattgggccgctggtacgatggaccccgaaagctcaatcttcatcgaggacgctatcaaatacttcaaagaaaaggtcagcacccagaatcttttgctgctactgaccgataacgaagcttggaatgggttcgtagctgcagcagagctccctagaaatgaagccgatgagctgcgcaaggccctggataacctagcccgccaaatgataatgaaagataaaaactggcatgacaagggccagcaatatcgtaattggtttctgaaggaatttcctagactcaaaagcgaactcgaggataatatcagacgattaagggccttagctgacggggtccagaaggtacacaaaggtacaacaattgctaacgtggttagtggctcactttcgatttcaagtggaattctcaccttagtgggcatgggattagcacctttcactgagggtggcagcctcgtgctgctggaaccaggtatggagctcggcattacagctgccctcactggaatcaccagcagcaccatggactacggcaaaaagtggtggacccaagctcaagctcacgacctcgtaatcaaatcactggataaactcaaagaagtcagagaattccttggagaaaatatttcgaatttcttaagcctggctggaaatacctaccaactcacacgtggaatcggcaaagatatacgagcgctgcgccgagcaagggcaaacttgcaaagcgtgccccatgcaagtgctagtaggccaagagtaacggagccaatttcggcggagagtggggaacaggttgaacgcgtgaatgagccctctattttagaaatgtcccgaggcgttaagctcaccgacgtggccccagtgtcgttttttttagtgctcgatgtagtctacctggtgtatgaaagcaaacatttacatgaaggcgccaaaagcgagaccgcagaagagctcaaaaaggtcgctcaggaattggaggagaagcttaatatactcaataacaactataagatcttacaggctgatcaggagctgtag

SEQ ID NO: 248632 - RNA, 483 nt, synthetic construct
  misc_feature 1..483: note = Description of Artificial Sequence: Synthetic coding sequence
  source 1..483: mol_type = other RNA
atggagggcgccgccttgttgagggtgtcagtcctgtgcatttggatgtcagccttgtttctaggggtgggtgtgagagcagaagaagcaggagctcgagtccagcaaaacgtgccatccggtaccgacactggcgatcctcaatccaaacccctgggagactgggcagccgggaccatggatcccgagtccagcatatttatagaagacgcaattaaatacttcaaagaaaaagtgagcacacagaatctgcttttgctcctgacagacaacgaagcttggaacggatttgtggctgccgcagaactgccacggaacgaggctgatgagctaagaaaggctctggataatcttgcacggcagatgataatgaaagataagaattggcatgataaggggcagcaatatagaaactggtttctgaaagaattcccgcgcctgaagtcagaattagaagataacattagaaggctcagagcatag

SEQ ID NO: 248633 - RNA, 426 nt, synthetic construct
  misc_feature 1..426: note = Description of Artificial Sequence: Synthetic coding sequence
  source 1..426: mol_type = other RNA
atggaaggagctgcgttattgcgtgtttccgtgctgtgcatatggatgagcgctctatttctcggggtcggcgtgagggcagaagaagcaggggccagagtgcagcagaatgttccctccgggaccgataccggagatccgcagagtaaacctctgggagactgggccgcaggcacaatggatcccggacccgcagggtctcgaggtgactcaggcgaaccgtgtacattgaggcctgcatgccgtggacagagacagcacggcggggcttcgcgtatcagtgccgaaggaccagccccgatgcctcgacgccgaaccccttccacggcccacctccgtgtccccaagacatcccgcaggaacttgctctgtatgcgcgccgtatccctcttacgaatgccactatccataagtcggaaaaagtag

SEQ ID NO: 248634 - RNA, 357 nt, synthetic construct
  misc_feature 1..357: note = Description of Artificial Sequence: Synthetic coding sequence
  source 1..357: mol_type = other RNA
atgagattcaagagtcatacagtagaactccgatccactctatcacaaccgcttttctcttgtagtcgtagacggccatgctcagacatggaaggcgccgctttgctccgggtctcagtgctgtgtatttggatgagtgcactgttccttggggtgggcgtgcgggccgaagaagccggagccagagtccagcagaatgtgccctctgggacagacactggagacccacaatcaaagccattgggcgactgggctgccggaaccatggaccctgagagcagcattttcattgaagacgccatcaagtattttaaagaaaaagtctcgactcaaaacctgctacttttattaacctag

SEQ ID NO: 248635 - RNA, 426 nt, synthetic construct
  misc_feature 1..426: note = Description of Artificial Sequence: Synthetic coding sequence
  source 1..426: mol_type = other RNA
atggagggcgctgcattgctccgcgtgagcgtcctgtgtatttggatgagcgcactatttcttggagtcggagtccgagcagaagaagctggcgctagagtgcaacagaacgttccatctggcactgatactggagacccccaaagcaaacccctaggtgattgggccgccggcaccatggaccccggaccagcgggctctcggggagacagtggtgaaccctgtacactgcggccagcctgccgaggtcagcgacagcacggaggcgcaagcagaattagcgctgaaggccccgctcccatgccacggaggcgcacacccagtacagcccacttacgcgtcccaaaaacaagtcggaggaacctgctatgcatgcgggccgtatcattgctcagaatgcccctgtccatatctcgcaagaaatag

SEQ ID NO: 248636 - RNA, 1014 nt, synthetic construct
  misc_feature 1..1014: note = Description of Artificial Sequence: Synthetic coding sequence
  source 1..1014: mol_type = other RNA
atgaaccctgagtcctccatcttcatcgaagattaccttaaatatttccaggaccaggtctctcgcgaaaacctgttacagctgttaactgacgacgaagcatggaacggatttgtggccgccgccgaacttccccgggacgaagccgatgaactgagaaaagcactgaacaaactggccagtcatatggtcatgaaggacaagaataggcatgataaagaccagcaacacagacaatggttcctgaaggagtttccacgcctcaaacgtgaactggaagatcatatccgcaaattgcgagccctagctgaggaggtagagcaggtgcatcgcggtaccaccatcgctaatgtcgtatctaatagcgttggtacaacatcgggcatcctgactctgctgggattgggcctggccccctttacagaaggcatttcattcgtattgttggacactgggatgggcttaggagctgccgctgccgtggctgggattacatgttcagtggtggaattggtaaataagctccgcgcacgagcccaagcacgaaatctggaccaaagcggaacaaatgttgcaaaagtgatgaaagagttcgtaggcggtaatactcctaatgtcttgacattagtggataactggtaccaagtaacgcagggcattggacgaaatattcgagccatcagacgagcaagagccaacccgcagttgggagcatacgctcccccaccccacatcatcggaaggatatctgcagaaggcggggagcaggttgaaagggtggttgaaggtccagctcaagctatgtcaagaggcacaatgatcgttggcgctgctaccggggggatcctactgctgttggacgtggtgtcactggcctatgaatctaaacacctgcttgagggagcgaaatcagaaagtgccgaggaattaaaaaaacgggctcaagaacttgaaggtaagttaaatttccttacgaaaatccacgagatgttgcaacccggccaggaccagtag

SEQ ID NO: 248637 - RNA, 1014 nt, synthetic construct
  misc_feature 1..1014: note = Description of Artificial Sequence: Synthetic coding sequence
  source 1..1014: mol_type = other RNA
atgaacccagagagctctatctttatcgaggactatctgaaatatttccaagaccaagtgagtagagaaaaccttttgcagctcctgactgatgatgaggcatggaacggttttgtcgcagccgccgagttgcccagagatgaagccgatgagctcagaaaggccttgaataaacttgcaagccacatggtaatgaaggacaagaacagacatgacaaggaccagcaacaccgccaatggttcctaaaggagttccccaggctaaaacgggaactggaggatcatatcaggaagctccgcgcgctggcagaagaagtagaacaagtccatagagggaccactattgctaacgtcgtgtcaaattccgtgggaaccaccagcggtattctgactcttctcggactgggattggcccctttcactgaaggtattagtttcgttctcttggacacgggaatgggactaggcgccgccgccgctgtcgccgggatcacatgcagcgtcgtcgaactggtgaacaagcttagagcccgagcccaagcccggaatctcgaccaatcgggtaccaacgtcgctaaagtcatgaaagagttcgtgggcggtaacacgccaaatgttttaacattagttgacaattggtaccaggttacacagggaataggcagaaatatcagagccatacggcgcgctagagcaaacccacagttaggagcatatgcaccgccaccccatattattggaagaatttctgcagaaggtggagagcaagtggagagagtggtggaggggcctgctcaggccatgagccgcggcacaatgattgtgggcgccgccacaggtgggatactcctcctgctcgatgttgtctcactcgcatacgaatccaaacatctgctcgaaggagcaaagagcgagtctgctgaggaattgaagaaaagggcacaagaactggagggtaagctcaactttctgactaaaattcacgagatgctgcaaccaggccaagaccagtag

SEQ ID NO: 248638 - RNA, 1350 nt, synthetic construct
  misc_feature 1..1350: note = Description of Artificial Sequence: Synthetic coding sequence
  source 1..1350: mol_type = other RNA
atgcactcctggacgtgggaccctcacagttcagagcaacttgacctggcccagagcctttctgaagaagatccactcagtagcctcagagggtcaattcagccccagccgcctgccgaagcacctgataaagggggaagtcaagctaacaatgaccctgggggatgggatcctggatgcagcagctctcaggtcttaggacgaacacgcggcccctgtcttggagtgcgggtacgggaagaggaagccggtaccagggtgaaggagaacctccccgtgtggacagtcacaggcgaactacaaggcaaaccgcttggtaaccctgccgccggcacgatgaatcctgagtcttccatatttattgaggactacttaaagtacttccaggaccaagtctccagagagaatcttctgcagcttttaacagatgacgaagcttggaatggatttgttgccgcagccgaattgcctagagatgaggccgatgaactgcggaaagcactgaacaaactagctagtcacatggtcatgaaagataaaaacaggcacgataaggaccagcagcaccggcagtggttcctaaaagaatttccccgcttgaagagagagttggaggatcatattagaaagctaagagccctggccgaagaggtcgaacaggtgcatcggggcacaacaatagccaatgtggtaagcaatagtgttggaaccacctctggtatcttaacgttactggggctgggccttgcccctttcaccgagggcatctcctttgtgctgctggataccggtatgggtttaggagcagctgcagccgtggcaggtataacttgttcagtcgttgagctcgtaaataaactgcgcgcacgcgctcaggcccggaatttggatcagtctgggactaacgtggccaaagttatgaaagagtttgtcgggggcaatacacctaatgtgctcactttggttgataactggtaccaggtcacacaaggcatcgggaggaacatacgggccatcaggagagcacgtgctaatcctcagctgggcgcctacgcacccccgcctcacataatcggacgcatttctgcagagggaggagaacaagtcgaaagagtcgtggagggacctgctcaggcaatgtctaggggcactatgatcgttggcgcagccactgggggaatactcctactgctggacgtggttagccttgcatatgagagcaaacatctcctcgagggcgcaaaaagtgagtccgctgaagaactgaaaaaaagagcccaagaactggagggtaagctgaattttctgactaaaattcatgaaatgctacagccaggacaagatcagtag

SEQ ID NO: 248639 - RNA, 225 nt, synthetic construct; identical to SEQ ID NO: 248033
  misc_feature 1..225: note = Description of Artificial Sequence: Synthetic coding sequence
  source 1..225: mol_type = other RNA

SEQ ID NO: 248640 - RNA, 387 nt, synthetic construct
  misc_feature 1..387: note = Description of Artificial Sequence: Synthetic coding sequence
  source 1..387: mol_type = other RNA
atgaacccagagtccagtatctttatcgaagattacctcaagtatttccaggaccaggtgtcacgagagaacctcctacaattgctgacagatgatgaggcctggaatggatttgttgccgcagccgaactgccccgtgacgaagccgacgaactccgtaaagccctcaacaagctggccagccacatggtaatgaaagacaagaaccgccacgacaaagaccagcagcacagacaatggtttttgaaggaatttccccgcctcaagcgagaactggaagatcacatccgtaagctgcgagctctggcagaagaggttgagcaggtacataggggtaccaccatcgcaaacgtagtttcaaatagtgtcggcaccacctccgggtag

SEQ ID NO: 248641 - RNA, 324 nt, synthetic construct
  misc_feature 1..324: note = Description of Artificial Sequence: Synthetic coding sequence
  source 1..324: mol_type = other RNA
atgggatcctgggttcagctcatcacctcagtcggcacgagcgggctctttctaggcgtacgcgtccgggaagaaggcgcgggaatgcgatgttcgaaaaccatacaggcgggccaatggctggacagtagtaaaggcccacttggtccttcccccccccctgttcccaccgcaggttactccagctccttttgcgtgcactacgtcaacttgctccccggcgtacttgtcctgtcagttacctctcagtacccacatctctcgatggctctttgccagttagccgcccacgactggcccaggttgtcttgtgtgtgcgtctag

SEQ ID NO: 248642 - RNA, 1044 nt, synthetic construct
  misc_feature 1..1044: note = Description of Artificial Sequence: Synthetic coding sequence
  source 1..1044: mol_type = other RNA
atgggttcatgggtacagcttatcacaagcgtcggagtacaacagaatcatcccgggtggacagttgccggccaattccaggaaaagaaaagattcacagaagaggtgattgagtatttccagaagaaagtgagtcccgttcacctgaaaatccttcttacttccgatgaagcatggaaacggtttgtccgcgtggccgaattgcctagagaagaggccgatgccctctatgaagccctgaagaacttgactccctatgtcgccattgaagataaggatatgcaacagaaagagcagcagtttagagaatggtttttgaagttcccacaaattcggtggaagatacaggagtcaatcgagcgactgagagttatcgcaaacgaaatcgagaaggttcatagagggtgcgtaatcgccaatgtcgtaagcggatcgactggtatcctgagcgtaatcggcgtgatgctggcccccttcacagccggcttgagtttgtccattacagccgcaggagtcgggttagggatcgcatccgccacggcgggcatcgctagctcaattgttgagaatacatacacacggtctgctgagctcaccgctagcagactaaccgcaaccagtaccgaccagctcgaagcccttagagacatcttaagagacatcacgccgaatgtgctttccttcgcccttgactttgacgaagctaccaagatgatcgctaacgatgtccacaccctgcggcgctccaaagcaaccgttggcagacctcttatcgcttggcgctacgtccccatcaacgtggtcgagacactaagaacccgcggcgctcccacacgaatcgtgaggaaagtagcccgcaacctgggcaaggcaacttccggagttctggttgtcttggatgttgtcaaccttgttcaagacagtctcgatctacacaagggcgctaagtccgagtctgccgaatctctcaggcagtgggcacaggagctggaagaaaatttgaacgaactcacccacattcaccaaagcctaaaggcaggttag

SEQ ID NO: 248643 - RNA, 1053 nt, synthetic construct
  misc_feature 1..1053: note = Description of Artificial Sequence: Synthetic coding sequence
  source 1..1053: mol_type = other RNA
atggagggagccgcccttctgaaaatcttcgtagtatgtatttgggttcagcaaaaccatcctggatggactgtggccgggcagttccaggaaaagaagcgcttcacggaagaggtgatagaatatttccaaaaaaaagtctcgccagtgcacttaaagatactcctgacaagtgacgaagcctggaaaagattcgtcagagtagccgagctaccaagagaggaagcagatgctctctacgaagcattgaagaatctcacaccttatgtggctattgaagacaaggatatgcaacagaaagagcaacagtttcgtgaatggtttctgaaatttccacagattaggtggaaaattcaggaaagcatagaaaggttacgagttatcgctaatgaaattgagaaagtgcatcggggatgcgtgatcgccaatgtggtgtccgggagcaccggcatcctttccgtgattggagtcatgttagcaccctttaccgccggtctgagtctgagcatcaccgctgctggagtgggcttgggtattgccagtgcaactgcaggaattgcatcatccatcgtagagaacacctatacaagaagcgccgaactgactgcctctagattaacagcaacgagcacagaccagctggaggcgttacgagatatcttaagagacatcacacccaacgttctttcttttgctctcgatttcgatgaggccaccaaaatgatcgcgaatgatgtacacacattgagaaggagcaaagctaccgttggcagaccactgatcgcttggagatacgtgccaatcaatgttgtggaaacactgcggactagaggggcccctacgcggattgtccgaaaggtggcaagaaatctgggcaaagccacaagcggcgtcctcgttgttctggatgttgttaacctggtgcaggattctttggaccttcataagggagcaaaaagtgagtcagccgagtcccttaggcaatgggcgcaagagctggaggaaaatctaaatgaactaactcatatccatcagagcctcaaagccggttag

SEQ ID NO: 248644 - RNA, 393 nt, synthetic construct
  misc_feature 1..393: note = Description of Artificial Sequence: Synthetic coding sequence
  source 1..393: mol_type = other RNA
atggaaggggccgctctcttaaaaatatttgtggtctgtatctgggtgcagcaaaatcaccctggatggaccgtggcagggcaatttcaagaaaagaaaaggtttaccgaagaagtaatcgagtactttcagaaaaaagtgtccccagtacatctgaagatcctcttaactagtgatgaggcatggaagagattcgtgagagtcgctgaactcccacgtgaggaggcagacgctctgtatgaggctttgaaaaacctgaccccctatgtcgcaattgaggacaaggacatgcaacaaaaggaacaacaatttcgcgaatggttcctgaaagtcagtagcaatcagatggaagactcaggcgtacacagaaaagcatcttgccactgcaaatag

SEQ ID NO: 248645 - RNA, 384 nt, synthetic construct
  misc_feature 1..384: note = Description of Artificial Sequence: Synthetic coding sequence
  source 1..384: mol_type = other RNA
atgggtagttgggtccagctgattacctccgtgggtgtgcagcaaaatcaccccggctggacagtggccggtcaattccaagagaagaagcgatttactgaggaggtcatcgaatacttccagaagaaggttagccccgtgcatctgaaaatcctgctcacaagtgatgaggcctggaaaagatttgtccgcgtggccgagctaccacgggaagaagccgacgcattgtatgaggctctgaagaatctaaccccttacgtcgcaatagaagataaagacatgcagcaaaaggaacagcagttcagagagtggtttctaaaggtcagctcaaatcagatggaagattcaggtgttcacaggaaagctagttgccattgtaagtag

SEQ ID NO: 248646 - RNA, 198 nt, synthetic construct; identical to SEQ ID NO: 248040
  misc_feature 1..198: note = Description of Artificial Sequence: Synthetic coding sequence
  source 1..198: mol_type = other RNA

SEQ ID NO: 248647 - RNA, 384 nt, synthetic construct
  misc_feature 1..384: note = Description of Artificial Sequence: Synthetic coding sequence
  source 1..384: mol_type = other RNA
atgggcagctgggtacagctcatcaccagcgtaggtgtgcagcaaaaccaccctggatggactgtggctggtcagtttcaggaaaagaagaggttcactgaggaggtcatcgaatactttcagaaaaaagttagtccggttcacttgaagatacttttgacgtctgatgaagcttggaagaggtttgtcagggtggccgaactgcccagggaggaagctgacgccctgtacgaagctttgaagaaccttacaccctatgtggctatagaagacaaggatatgcagcagaaagaacaacagtttagagaatggttcttgaaggtctctagtaatcaaatggaagactccggtgtgcatcgaaaggccagctgtcactgcaaatag

SEQ ID NO: 248648 - RNA, 183 nt, synthetic construct; identical to SEQ ID NO: 248042
  misc_feature 1..183: note = Description of Artificial Sequence: Synthetic coding sequence
  source 1..183: mol_type = other RNA

SEQ ID NO: 248649 - RNA, 219 nt, synthetic construct; identical to SEQ ID NO: 248043
  misc_feature 1..219: note = Description of Artificial Sequence: Synthetic coding sequence
  source 1..219: mol_type = other RNA

SEQ ID NO: 248650 - RNA, 213 nt, synthetic construct; identical to SEQ ID NO: 248044
  misc_feature 1..213: note = Description of Artificial Sequence: Synthetic coding sequence
  source 1..213: mol_type = other RNA

SEQ ID NO: 248651 - RNA, 2223 nt, synthetic construct
  misc_feature 1..2223: note = Description of Artificial Sequence: Synthetic coding sequence
  source 1..2223: mol_type = other RNA
atgaccgtgaaactggattttgaagagtgcctaaaagactccccacgcttcagggcttccatcgagctagtggaggccgaggtatcagaactcgagacacggctggaaaagctcttaaaactgggtacaggattgctggagagtggaagacattacctcgccgccagccgagccttcgtcgtgggcatttgtgaccttgcccgcctcggtcccccagaaccaatgatggccgagtgcttggaaaagttcactgtgagcctgaaccacaagttggactcacacgcagaattactcgatgccacccagcacacgttacaacaacaaatccagactcttgttaaagaaggcttgaggggatttcgagaggcacggagagatttttggagaggagctgaaagcctggaggcggccctgacacataatgccgaagttcctagaagaagagctcaggaggctgaggaagccggagctgctcttagaacggctcgggcaggataccggggtagagcactcgattacgctctgcagataaatgtcattgaagataagagaaaattcgacataatggagttcgtcttgagactggttgaagctcaggctactcactttcagcagggacacgaagaactttctaggctcagccaataccgcaaggaactgggcgcacagttacaccagctggtcctgaattctgccagggagaaaagagacatggaacagagacacgtgttactgaagcagaaagaactcggcggcgaggaacccgagccgagtctcagagaagggcctggtggtttggtcatggaaggccacctcttcaaaagggcctcaaatgctttcaagacatggagtaggcggtggttcacaattcaatccaaccagttagtttatcaaaaaaagtacaaggacccagtgacagttgttgtggacgatttgagactctgcaccgtgaaattgtgccccgactccgagagacgattttgttttgaagtggttagtaccagtaagtcttgcctgctacaggccgatagtgaacgcctccttcaactttgggtctcagccgtgcagtccagtattgcatctgctttcagccaagcgaggttagatgacagcccccgggggcctggccagggttctggacatttggccatcgggtcggctgctacacttggcagcggcggtatggcacgcggacgggaacccggaggagttggccatgtggtagcccaggttcagagtgttgacggcaatgctcagtgttgcgattgtagggaacccgcaccagagtgggccagtattaatttgggtgtaaccctgtgcattcagtgttcgggcatccaccgatccctcggtgttcactttagtaaggtcaggtcgttaaccctggacagttgggaacccgaactagtaaagctaatgtgtgagctcggtaacgtaatcataaatcaaatctacgaggccagggtggaagcaatggccgttaagaaacccggtcctagctgctctcgacaggagaaagaggcttggatccatgcaaagtatgtcgaaaaaaagttcctcaccaagctcccagaaattaggggccgtcgcggcggacgcggtagaccaaggggccagccacctgtgccaccaaaaccctcgatccgccctagaccgggatcactgagatctaaacctgaacctccgtccgaagacctgggcagtctccatccgggggcattgctattccgagccagcgggcacccaccaagcctgcccactatggccgacgctctcgctcatggagccgatgtcaactgggttaacggaggccaggataatgcaacaccactcatccaggccacagcagccaacagcctcttagcatgtgaattcctgctgcaaaacggagcaaatgtgaatcaggccgacagtgcaggcagaggccctctacatcacgccaccattctgggtcacactggactggcttgcttatttctgaagaggggcgcagacctgggcgccagggactcagagggaagggaccctttgactatcgccatggagactgcaaacgctgacattgtgacattgttacgactagcaaagatgcgcgaagctgaggctgcccagggtcaagcaggagatgaaacatacttggatatttttagagatttcagcttaatggcatccgatgacccagagaaactgtccaggagatcccatgatttgcatactctgtag

SEQ ID NO: 248652 - RNA, 1290 nt, synthetic construct
  misc_feature 1..1290: note = Description of Artificial Sequence: Synthetic coding sequence
  source 1..1290: mol_type = other RNA
atgcagctgcgaaatcctgaacttcatctcgggtgtgcccttgcacttagattccttgcattagtgagctgggacataccaggggcccgcgctctcgacaatggattagccaggacacccactatgggatggttacattgggagagatttatgtgtaacctggattgtcaggaagagccggactcttgtatcagcgagaagctcttcatggaaatggccgagctgatggtgtcagagggctggaaagatgccggatatgaatatttgtgtattgacgattgctggatggctccacagcgggactccgaaggcagactccaggccgatccacaaaggtttccccatgggattagacagctcgctaactacgttcacagtaaaggactgaagctgggcatctacgcagacgttggtaataaaacctgcgctggttttccaggctcctttggctattatgacattgatgcacaaaccttcgcggactggggagtagacctattgaagtttgacgggtgttattgcgattccctcgagaacttggctgacggttacaaacacatgtcccttgccctgaaccgcaccggccgcagtatagtttacagttgcgaatggcctctctacatgtggccctttcaaaagcccaactacacagaaatacgacagtattgtaaccactggagaaatttcgctgatatcgatgactcctggaagagtatcaagtccattttagactggacatcatttaatcaagaaaggatagttgatgttgccggtcctggcgggtggaatgatccagatatgctagtcattgggaattttggcctatcctggaaccaacaggtcacgcagatggcactgtgggcgattatggccgctcccctatttatgagtaacgaccttcgacacatatctcctcaggctaaagcattactgcaggacaaggacgtcattgccatcaatcaggatcccttaggaaagcagggataccagttgagacaaggggataattttgaagtctgggaaaggcccctgtcaggcttggcatgggcagtggctatgattaataggcaagaaatcggcggtccgcggagttatactattgctgtggcgtctctagggaagggagtggcttgcaacccggcatgcttcatcacccaactcctcccagtgaagcggaaacttggcttttatgaatggacatctagactcagaagccacattaatccaacaggcacagtactgctgcagctcgagaacactatgcaaatgtcactcaaagacctgctttag

SEQ ID NO: 248653 - RNA, 1386 nt, synthetic construct
  misc_feature 1..1386: note = Description of Artificial Sequence: Synthetic coding sequence
  source 1..1386: mol_type = other RNA
atgcagagagttaacatgatcatggcggaaagtccagggttgataacaatttgtttgctaggctacctgttgagtgccgagtgcacggtgttcctcgaccacgaaaatgcaaacaagatcctgaatagacccaaaaggtataacagtggaaagttggaggaattcgtacaaggcaacctggagagagaatgtatggaagaaaaatgtagcttcgaggaagctcgggaggtcttcgagaacaccgaacgtacaacggaattttggaagcagtacgtggatggagaccaatgcgagagcaatccctgccttaacggcggatcctgtaaagatgacattaattcgtacgaatgctggtgcccctttgggttcgaaggcaagaattgtgaattggatgtgacctgcaatataaagaatgggcgatgtgaacagttctgtaagaattccgcagataacaaggtggtgtgcagctgtaccgagggctacagactggctgagaaccagaaatcttgtgagccagcagtgccgtttccctgcggtagagtgagtgtgtcccagacaagtaaattgactagggccgagaccgtcttccccgatgttgactacgtgaacagcacagaggcggagacgatactcgataacatcacacagagcactcagtcatttaacgattttacaagggtagtaggaggtgaggacgcaaaacccggacagtttccttggcaggttgtactgaatgggaaagtagatgcgttttgcggtggttcaatcgtgaacgaaaaatggattgtgacagccgctcattgtgtggaaactggagtgaaaataaccgtagtcgccggagaacacaacattgaagagaccgaacatacagagcaaaagcgcaacgttatacggatcattccccaccacaactacaatgcagccatcaacaaatacaaccatgatattgcgctgttagaacttgacgaacccctcgtccttaatagttatgtaacacctatttgtattgctgacaaggaatacacaaacatcttcctgaaattcggctctggatacgtgtcagggtggggaagggtgttccacaagggccggtcagctctcgttctacaatatctgcgagtgccacttgttgacagagccacatgtctccgctccactaagttcactatttataataacatgttctgcgccggattccatgagggagggcgagatagctgccagggggattcaggcggcccacacgttacagaggttgaaggtacatcatttctgaccggcattatctcatggggcgaagaatgtgcaatgaaaggcaagtatgggatttataccaaggtgagcagatacgttaactggataaaggagaagactaagctgacgtag

SEQ ID NO: 248654 - RNA, 1365 nt, synthetic construct
  misc_feature 1..1365: note = Description of Artificial Sequence: Synthetic coding sequence
  source 1..1365: mol_type = other RNA
atgccaagatgtcccgctggcgccatggacgagggtccagtggatctgcgcacacggcccaaggcagccggactcccaggggccgcactgcccctgagaaagagacccctaagagcgcctagccctgagcccgctgcaccacgaggagctgccggtcttgtcgtgccacttgatccactcagagggggatgcgacttacctgctgttcccggccctccccatggcttagcccgccccgaggccttgtattaccctggcgctcttcttccactctaccccactcgagccatgggctctcccttcccattagtgaatctacctacgcctctgtatccaatgatgtgcccaatggagcatccccttagcgcggatattgcaatggcgacaagagccgacgaagacggagacactcccctccacattgccgtggtccaaggcaatctccctgctgtgcacagacttgtcaacctatttcagcagggtggacgcgagctagacatttataacaacttgagacaaacacctctacaccttgccgtgattaccaccctccctagcgtcgtgagactcctggtaaccgccggagcctctccaatggctttggatcggcacggccaaaccgccgcccacctggcatgcgaacaccgctctccaacctgtctgcgcgctctgctggattcagccgcacctggtaccttggacttagaagcaagaaactatgatggtctgaccgccctccatgtcgccgttaacaccgaatgtcaagagacggtccagttactgttggagcggggagcagatatcgatgccgttgacattaaaagcgggcggtctcctttaattcacgcagtcgaaaataatagcttgagtatggtgcaactattattacagcacggagcaaacgttaacgcacagatgtattccggttcttcagccctgcattccgcatccggccgtggccttctgcctttagtgcgtacgctcgttcgatcaggggccgactcctcactgaaaaattgccataatgacaccccactcatggtcgctcgttcccgtcgagtcatcgacattctgcgtggaaaagctacccggcccgcaagcacctcgcaaccagatccttcccccgatcgctctgccaatacttccccagaatcctcttccaggctttccagtaatggccttctaagcgccagtcctagttcctccccctcacagtccccaccgcgcgatccacccggattccctatggccccgcccaacttctttttaccgagcccatcacccccagccttcctaccattcgccggcgtgctgcgtggccccggtcgcccagttccaccctctcctgctccaggcggttcctag

SEQ ID NO: 248655 - RNA, 417 nt, synthetic construct
  misc_feature 1..417: note = Description of Artificial Sequence: Synthetic coding sequence
  source 1..417: mol_type = other RNA
atgaaggaatactcaggttttgccggggtcagtaggcccagaggaacattctttcggatcagagggcgggggcgagctcgaggtgtgttcgcgggcactaatacaggtcctaacaatagtaataccacttttcaaaaacggccaaaggaagaagagtgggatccagaatatactcccaaatctaaaaagtacttcctccacgacgatcgagacgacggtgtagattattgggctaaaagaggtagaggcagagggacattccagcgaggaaggggtagatttaatttcaagaagagcggaagtagcccgaagtggacgcacgacaaatatcaaggcgatggtatagttgaggatgaagaagagaccatggaaaacaacgaagaaaagaaagaccgcagaaaagaggaaaaggaatag

SEQ ID NO: 248656 - RNA, 1530 nt, synthetic construct
  misc_feature 1..1530: note = Description of Artificial Sequence: Synthetic coding sequence
  source 1..1530: mol_type = other RNA
atgacagttacctatacagccagagtggcgaatgcaagattcggcggtttcagtcagcttctgttactatggcgaggctctatctacaagcttctttggcgcgagttgttgtgcttcctagggttctacatggctttatctgctgcatacaggttcgttctgaccgaggggcagaagcggtattttgaaaagttggtaatctattgtgatcagtacgcatccctgattcctgtcagcttcgttctgggattttacgtcaccctggtagttaaccgctggtggtcacagtatctgtgtatgccccttccagatgccttgatgtgtgtggtggccggtactgtccacggtagagacgatcggggccgattatatcggcggacattgatgcgttacgctggactctctgccgttctcatcctgcggagtgtgtccacagccgtctttaaaagatttcctacaatcgaccacgttgtggaagctggattcatgacaagagaagagaggaagaaatttgaaaatctaaatagttcttacaataagtactgggtcccttgtgtgtggttctccaacttggccgcgcaggctcgccgcgaaggccgaattcgggacaactcagccctgaaattgctgctggaagagctcaacgtgtttagaggaaaatgtggaatgctgtttcactatgattggatctcggtgcctttagtgtatacccaggtggtcacgattgctctctatagttacttccttgcttgtttaatcggtagacagttcttagatcctgctcagggatataaagatcatgacctagatctgtgcgtgccgatcttcactctcctccagttttttttttatgctggctggctgaaagttgcggagcagctgattaacccctttggagaagacgacgatgactttgaaacaaactttttaattgaccggaattttcaggtgtcaatgctcgccgtggacgaaatgtatgatgaccttgccgttctagaaaaagacttgtactgggacgcagcagaagcacgcgccccttacaccgccgctactgtcttccaactgagacaaccatcttttcagggcagcaccttcgatatcacattggctaaagaagacatgcaatttcagaggctggacggactggacggcccgatgggcgaggctccaggtgatttcctgcagcgactgctccctgccggtgctggaatggtcgctggcggcccactgggcagaaggctgtccttcctcctgagaaagaattcatgtgtgagcgaggcttctactggagctagctgcagttgcgccgtcgtgcccgaaggggctgcccccgagtgctcatgtggtgatcccctgttagacccagggttaccagagcccgaagccccgcctcccgcaggtccagagccactcaccctcatccccggccctgttgagccttttagcatagtgactatgcccggtcctagaggccctgcccccccctggcttccgtcacccattggggaagaggaagagaatctggcatag

SEQ ID NO: 248657 - RNA, 306 nt, synthetic construct; identical to SEQ ID NO: 248051
  misc_feature 1..306: note = Description of Artificial Sequence: Synthetic coding sequence
  source 1..306: mol_type = other RNA

SEQ ID NO: 248658 - RNA, 369 nt, synthetic construct
  misc_feature 1..369: note = Description of Artificial Sequence: Synthetic coding sequence
  source 1..369: mol_type = other RNA
atgtccagatccgtggcacttgccgtgctcgcattactctccctgtcaggcctcgaggctatccagagaacgccgaaaatccaggtctacagtcgacatccggcggagaacggaaaatcaaacttcttgaactgctacgtctcaggatttcatccaagcgacatcgaggtggacttgcttaagaatggagaacgcattgaaaaagtcgaacacagcgacctaagtttctctaaagattggtcattctatctgctttattatacagaatttacgccaacagaaaaagacgagtacgcatgtcgggtcaatcacgttaccctcagccaacctaagatcgtgaagtggggaaagtcatatatattgctgtag

SEQ ID NO: 248659 - RNA, 360 nt, synthetic construct
  misc_feature 1..360: note = Description of Artificial Sequence: Synthetic coding sequence
  source 1..360: mol_type = other RNA
atgtcacgctctgttgccctggccgtattggccctcctctccctctccggcctggaagccatacaacgaactccgaagattcaagtctacagtcgtcatccagcagagaacgggaagtccaattttctgaattgctatgtctctgggttccacccctccgatatcgaggtggaccttcttaaaaatggggaacggatcgaaaaagtggaacattctgacctgtcattctctaaagactggagcttttatttactgtactacactgaattcacacccacggaaaaggacgagtatgcttgccgagtcaaccacgtaactttaagtcagccaaaaatcgtgaaatgggacagagacatgtag

SEQ ID NO: 248660 - RNA, 369 nt, synthetic construct
  misc_feature 1..369: note = Description of Artificial Sequence: Synthetic coding sequence
  source 1..369: mol_type = other RNA
atgtcgaggtcagtggccctggctgtgctagccctgctgtccctttccggactagaagctatccaaaggacgccaaagattcaggtctattcacgacatcctgccgagaacgggaaatctaactttttaaactgttatgtgagtggattccatccatccgatatcgaagtcgaccttctcaagaatggagaacgcatagagaaagtcgagcactccgatctgagtttttctaaggactggtccttctatctcctctactataccgagttcacccccactgagaaagatgagtacgcatgccgggtaaaccatgttacactatcccaaccaaaaatcgttaagtggggaaaaagttatatacttctttag

SEQ ID NO: 248661 - RNA, 360 nt, synthetic construct
  misc_feature 1..360: note = Description of Artificial Sequence: Synthetic coding sequence
  source 1..360: mol_type = other RNA
atgagtcgaagtgtcgccttggcggtgctggctttactatcactctctggcctcgaagccattcagagaaccccgaagatccaggtttattcgaggcacccagccgagaatggaaaaagcaattttctgaattgttacgtgagtggatttcatccttccgatatagaggtagatttgctgaaaaatggggaaagaattgaaaaggtcgagcactcagatctcagtttttctaaggactggtctttctacttactttactacacagagtttacccctaccgaaaaagatgaatatgcatgcagagttaaccacgttaccttaagtcaacctaagatcgttaaatgggacagagatatgtag

SEQ ID NO: 248662 - RNA, 360 nt, synthetic construct
  misc_feature 1..360: note = Description of Artificial Sequence: Synthetic coding sequence
  source 1..360: mol_type = other RNA
atgtcacgctccgttgcactcgcagtccttgcattgctgagcctgtccggcttagaggcaattcaacgaacgcccaaaatccaggtctatagccgacatcctgccgagaacggaaagagtaattttttaaattgttacgtgagtgggttccacccttccgatattgaagtggatctgctcaagaatggagaacgcatcgaaaaggtcgaacattctgacctgagtttctctaaggactggtcgttttaccttttgtattacactgagtttacccccactgagaaagacgagtacgcttgccgggtaaatcatgtaacactgagtcagccaaagatcgtcaaatgggacagagatatgtag

SEQ ID NO: 248663 - RNA, 1536 nt, synthetic construct
  misc_feature 1..1536: note = Description of Artificial Sequence: Synthetic coding sequence
  source 1..1536: mol_type = other RNA
atgtctagaggcccagaggaagtaaatcgcctgacagaatctacttatagaaatgtgatggaacagttcaatcctggcctgcgcaatctgatcaacctcggcaagaactatgaaaaggctgtcaacgccatgatactcgccggaaaagcctactatgacggggtggccaagattggtgaaatcgctaccggatcacctgtttctactgagctaggacacgtgttaatcgaaatctcttctacgcacaagaaactcaacgaatcactggacgaaaacttcaaaaaattccacaaggagatcattcacgagcttgaaaagaaaatagagctggacgtcaagtatatgaacgccacccttaaacggtatcagacagagcacaaaaataaattggagagcctggaaaagagtcaagctgaactgaaaaaaattcgcagaaagtcccaaggcagtcgcaacgcactgaagtatgaacacaaggagattgaatatgttgaaactgttacaagtaggcaaagtgaaatacaaaagtttatcgcagatggttgtaaggaagcacttctagaagaaaagcggcgcttttgttttctagtggacaaacactgcggattcgccaatcatatccactactaccacctccagagcgccgaactcctcaattctaagcttccaagatggcaggaaacatgtgttgatgcaattaaagtccctgagaagatcatgaatatgatcgaagagattaagacaccagcttctacccccgttagcggcactcctcaggcctccccaatgattgagagatcaaatgtggtcagaaaagattatgacactctttccaaatgctcaccaaaaatgccaccagctccatccggaagagcctatacatcaccgctcatagatatgtttaacaatccggcgaccgcagcaccaaacagtcagagagtgaataattctaccgggacaagtgaggatccctccctgcagcggtcagtgagcgttgccaccggcctaaatatgatgaaaaaacagaaggtaaaaactatatttcctcacactgccgggtccaataaaacactgctttctttcgcgcaaggagatgtcatcactctcttaattcccgaagagaaggacggttggttatacggagaacatgacgtctctaaggctcgaggctggttcccctcctcctacacaaaacttctggaagaaaatgaaacagaagccgtcactgtgcccacccctagtccaacaccagtcagaagtataagcaccgtcaacctaagcgaaaacagctcagttgtgatccctccccctgattatcttgaatgtctgtcaatgggagctgccgcagatcgtagggccgactcagcaagaactacctcgactttcaaggctccggcatctaagcctgagacagctgcaccaaatgacgctaacggcacagctaagccgcccttcttgtccggtgagaatccatttgccaccgtaaaattgcgacctacagttaccaacgaccgcagcgcacccatcatcagatag

SEQ ID NO: 248664 - RNA, 1809 nt, synthetic construct
  misc_feature 1..1809: note = Description of Artificial Sequence: Synthetic coding sequence
  source 1..1809: mol_type = other RNA
atgcactccaaagtaacaataatctgtatcagattccttttttggttcctgcttctgtgtatgctcatcgggaaaagtcataccgaggacgacatcatcattgcaacgaagaatggcaaggtgaggggaatgaatcttacagtttttggcggcacagtgacagcttttctgggcataccttacgcacaaccacccctgggacggctcagatttaaaaaacctcagtccttgaccaagtggtcagacatctggaacgctactaaatacgctaatagttgctgccaaaacatcgaccagtcgttcccgggctttcatggaagtgagatgtggaatcctaatactgacctttccgaggactgtctgtacctgaacgtatggatacccgcaccgaaacccaagaacgctactgtcttaatttggatttacggcgggggatttcagaccggcacaagctcactccatgtatacgatggaaaatttctggccagggtggaacgtgtgattgttgtttccatgaactacagggtaggagctctaggctttctcgcccttcccgggaatcccgaggcccccggaaatatgggtctgttcgatcagcagctggctctgcagtgggtccagaagaacattgcagcttttggtggcaacccaaagtcagtaaccctttttggtgagtcagccggggcggcgtccgtttccctccatttgctatcccctggcagtcatagcctgtttacccgcgcaatcttgcagtctgggtcatttaacgctccttgggccgtaacctcactatacgaagcccgcaacagaacacttaacctcgcaaaactgacgggatgcagtagggaaaatgaaaccgaaatcattaaatgcctccgaaataaggatccccaggagattctgctgaatgaagcttttgtcgtgccctacggaacccctcttagcgtaaacttcggaccaacagtagacggagatttcttaacagacatgcccgacatccttctggagcttggccagtttaaaaaaactcagatcctagtcggagtaaataaagacgaagggacagccttcttggtgtatggcgcaccaggcttctctaaggataataactccatcataaccagaaaagagttccaggaaggcctgaagatcttctttcccggcgtgtctgaattcggaaaagaaagcatcctatttcactacacagattgggtggatgaccaaaggccagagaattatcgagaagcactcggcgacgtggtgggcgattacaactttatctgtccagctctagaattcaccaagaaatttagcgaatgggggaacaacgcctttttttactactttgagcaccgtagctccaagcttccctggcctgagtggatgggagtcatgcatggatacgaaattgagttcgttttcggattgcccctagagagacgagacaactacaccaaggctgaggaaattctctccagaagtattgtaaagaggtgggcgaactttgccaaatatggcaacccaaacgagacccagaacaatagcacgagctggcccgtatttaagtccacagaacagaaatacctaacactgaataccgagtctacaaggataatgaccaagctcagggctcaacaatgcaggttttggacgagtttctttccaaaggtactggagatgacgggaaatattgacgaagcagagtgggaatggaaggctggtttccacagatggaataattacatgatggactggaagaatcagtttaatgactacacaagcaaaaaggaatcatgtgtcggactctag

SEQ ID NO: 248665 - RNA, 399 nt, synthetic construct
  misc_feature 1..399: note = Description of Artificial Sequence: Synthetic coding sequence
  source 1..399: mol_type = other RNA
gccgtccaattcacaggctggagctcatcctgcattttacactttcctgaagtcctgcatgattttcacagcttgcagaccctgcctagtctcctccaaagaataggcaaccctaacgagacgcagaataattctacatcctggcccgtatttaaatccactgaacagaaatacctgaccttgaatactgagagcactcgcattatgacaaaactccgcgcacagcaatgccgattctggacaagtttctttcccaaagttctggagatgacagggaacatcgatgaggccgaatgggagtggaaagctgggtttcacagatggaacaattatatgatggactggaagaatcaattcaatgactacacatccaaaaaggaaagttgcgttggcttgtag

SEQ ID NO: 248666 - RNA, 195 nt, synthetic construct; identical to SEQ ID NO: 248060
  misc_feature 1..195: note = Description of Artificial Sequence: Synthetic coding sequence
  source 1..195: mol_type = other RNA

SEQ ID NO: 248667 - RNA, 2499 nt, synthetic construct
  misc_feature 1..2499: note = Description of Artificial Sequence: Synthetic coding sequence
  source 1..2499: mol_type = other RNA
atgattcttcaggcccatctccattctttatgccttctgatgttatatttagcaactggctatggccaggaggggaagttctcaggtccccttaaaccaatgacattttctatttacgagggccaagaaccgagccagattatctttcaattcaaggctaacccaccagcagtaacattcgaactgaccggcgaaacagataacatctttgtgatagagagagaaggactactgtactacaaccgcgctctcgatcgggagactagaagtacacataatctacaggtagcagccctcgatgcgaatggaatcatcgtagaaggccccgtgcccattactatcaaggtgaaagatatcaacgataaccgtcctactttcctgcagtccaagtatgagggcagcgtgcgccaaaattcccgtcccggcaagccatttctttacgttaatgccacagacctggatgaccctgcgactcccaacggccaactctactatcaaattgtcattcaacttccaatgattaacaacgttatgtatttccaaatcaacaacaaaacaggagcaattagtctgactagggaaggctctcaggaactcaacccagccaaaaacccttcttataatctggttatcagtgtcaaggatatgggggggcaaagcgaaaactctttttctgataccactagtgttgatataattgttacagagaacatctggaaagcgcccaaacccgtggagatggtcgaaaacagcacagacccgcacccgatcaagatcacccaggttcgatggaatgaccccggagcccagtactcccttgtagataaagagaaactgcctcggtttccgttttctatcgaccaggaaggggatatttatgtgacgcaacctctcgaccgggaagagaaggacgcttatgtgttttacgcagttgcaaaagacgaatatgggaagccactaagttaccccctagagattcatgtgaaagtgaaagacatcaatgacaatccccccacatgtccgagtccagtaacggtgtttgaagtgcaggaaaatgaaagactcggaaattcaatcggaacactgaccgcccatgatagggacgaggaaaatacagctaattctttcctgaactaccggattgttgaacagacacccaagctgcctatggacggcctgttcctgatccagacttatgcgggcatgcttcaactcgcaaaacagagcctcaagaagcaggatacaccccagtacaatctgacaatagaagttagcgataaagatttcaagaccctgtgcttcgtccagatcaacgtgatagacatcaatgaccaaatccccatctttgaaaaatcagattacggtaatctcacactcgccgaagacactaatattggaagcacaatactcaccattcaggccacagatgccgacgagccttttactggaagtagcaagatcctctaccacattatcaagggcgattctgaaggacgcttgggtgtggacacagaccctcataccaacacaggctatgtgattataaaaaagcccttggactttgagacggctgcagtgagcaatatcgtattcaaagctgaaaaccctgaacctctcgtgttcggcgttaaatacaatgctagttcatttgccaaatttactctgatcgtgactgacgtgaacgaggccccgcagtttagccaacatgtattccaagctaaggtgtccgaggacgtcgcaattgggactaaagtgggaaatgtgacagccaaagatcctgaaggccttgatatcagctatagtctgagaggggatacccgcggatggcttaaaatcgatcatgtaacaggagaaatatttagcgtcgcacctcttgaccgggaagccggttcaccataccgtgtgcaggtcgtggccacagaagtcggagggtccagtcttagctctgtgtcggagtttcacctcatcctgatggacgttaatgataaccctccaaggctcgccaaagattatacaggtttgtttttctgccaccccttatctgcccccggctcgctgatctttgaagctaccgatgacgaccaacacctgttcagaggtcctcactttacatttagcctaggctctggcagcctgcaaaacgattgggaagtgtccaaaatcaacggcacacacgcaaggttatcaacccgtcacacagagtttgaggaacgtgaatacgtggtgctcatcagaatcaatgatggcggcagaccacccctggaaggcattgttagcttacccgtgactttttgttcttgtgtcgaaggttcatgctttcgtcccgccggccaccagacgggcatacctacagtgggaatggcagtgggaattctgctgaccactctgcttgtgatcgggataattctagccgtagtctttataagaattaagaaggacaaaggaaaagacaatgttgaatctgcccaagcttccgaggtaaagccacttcgctcttag

SEQ ID NO: 248668 - RNA, 795 nt, synthetic construct
  misc_feature 1..795: note = Description of Artificial Sequence: Synthetic coding sequence
  source 1..795: mol_type = other RNA
atgacaaagttctcgtccttttctttgttcttcctgatcgttggggcctatatgacgcacgtttgctttaacatggaaatcattggcgggaaagaggtgagcccccattccagaccttttatggctagcatacaatacgggggtcatcatgtatgtggtggagttcttatcgatccacagtgggtgctgaccgctgcacattgtcagtacaggtttactaagggacagagccctaccgtggtccttggtgcacactcccttagcaaaaacgaagcatcgaagcaaactctcgaaattaagaaatttatccccttctcccgggtgaccagcgatccacaatctaatgacataatgctcgtaaagttacagacagccgccaaacttaataagcacgtgaaaatgctccatatccgatctaaaacaagtctgaggtcaggaacgaagtgcaaggtcaccggttggggagcgacagaccccgattcccttcgtcctagcgataccctccgggaagtcactgtgaccgtcctatctagaaaactgtgtaattcccagtcgtactacaacggagacccatttatcaccaaagacatggtgtgtgctggagacgctaagggacagaaagatagctgtaagggagactctggggggccgctgatttgtaaaggcgttttccatgccattgtttctggcggacatgagtgcggcgtcgccacaaagcccgggatatacacattactgaccaaaaagtatcagacctggatcaaatcgaatttggtgcccccccatacaaattag

SEQ ID NO: 248669 - RNA, 9939 nt, synthetic construct
  misc_feature 1..9939: note = Description of Artificial Sequence: Synthetic coding sequence
  source 1..9939: mol_type = other RNA
atgatggcccgtagaccaccgtggcgaggtctgggaggccggagcacacccattctccttttactgctcttaagtctgttccccctgagccaagaagaattaggaggaggagggcatcagggttgggacccaggattagctgctaccaccggaccgagagcacacatcggagggggagccctggcgctgtgcccagaatcttctggagtgcgcgaagatggcggacctgggcttggggttagagagccaatcttcgtaggtttaagaggccgacggcagtcagctcgtaattcacgcgggccaccagaacagcccaatgaagaactaggaatcgaacatggtgtccaacccctcggctctcgggagcgcgaaacaggacaaggacccggaagcgtgctctactggcggccagaggtctcgtcttgtggcagaactggccctctacagcgaggaagcttaagccctggcgccctctcctctggcgtccccggctcaggtaatagttcccccctaccctcagatttcctgattcgccatcacggacccaagcctgtcagcagccagaggaatgctggaacgggatcacgcaagagagtcggaactgcccgatgctgtggcgagctctgggctaccggcagtaaaggtcaaggagagagggctacaaccagtggggctgaacggaccgcccccagacgaaactgcttaccaggcgcctctggatctggaccagagctggatagtgctccgcggacagcgaggaccgctcctgcctcaggctcggctcctagagagagcagaaccgcccctgaacccgcccccaagcgcatgcggagtcgcgggctgtttcggtgccgttttttaccacagcgaccagggccccgtcccccagggttgcctgctaggcccgaagccagaaaggtcacctcagccaacagagcccgctttcgacgagcagccaaccgacatccacagtttccccaatataactatcaaacactggtaccagagaatgaagccgccgggactgccgtccttagagtggtcgcacaggatcccgacgccggcgaggcaggaagactcgtctacagcttagctgctctgatgaattccagaagtctggaactcttctctattgacccacagtccggcctgatcaggaccgccgctgccctggatagagaaagcatggagaggcattaccttcgggtgaccgcacaagaccacgggtccccaagactgtctgccaccaccatggtcgctgttactgtcgcagatcgtaatgaccactcgcctgtctttgagcaggcacagtacagagaaacactgcgcgagaacgtcgaagaaggttaccccatccttcagcttagggctacggacggtgatgccccacctaatgcaaaccttcgctatcggtttgttgggcccccagctgctagagccgccgcagccgccgcctttgaaatcgaccctagatctgggcttatctcaacctcaggccgggtggatcgcgaacatatggagtcttacgaactggtagtggaggcctcggaccagggacaggagcccggcccaagaagcgccacggtcagagtacatattacagtattggatgaaaacgacaatgccccacaattcagcgaaaaaagatacgtagcacaagtcagagaggatgtgagaccccataccgttgtgttgcgcgtcaccgcgaccgacagggacaaggatgctaacgggttagtccactacaacattatctctgggaattctcgaggccacttcgccattgattccttgacgggagaaatccaagttgtggcccctctggatttcgaggcagaacgagaatacgcactcaggatccgcgcgcaagatgcaggtagaccccctctttctaacaacacgggtctcgccagcattcaggtcgtagatataaatgaccacatacccatctttgtttccacaccctttcaggtaagtgttctagaaaacgctccactggggcactcagtgatccacatccaagctgttgacgccgatcatggggaaaacgccaggctggagtactctttaaccggagtcgcgcctgacacaccctttgtcataaattctgccaccggctgggtgagtgtttcgggaccccttgatcgggaatcagtggagcattacttcttcggagtcgaggcccgcgaccatggatctcccccactctccgcaagtgcttctgtgaccgtgaccgtattggacgttaatgataatcggcctgaatttacaatgaaagagtaccatctcagattgaacgaggatgcggctgtgggcacaagcgttgtttccgtaacagcggtggatcgcgacgccaattctgcgatttcttatcagattacaggtggaaacacgcgcaaccgctttgctatcagtacacagggaggagtgggtctggttactctcgccctgccactagattacaaacaagagcgctacttcaaattggtacttacagcttccgatagagctctgcatgatcattgttacgtccacataaatattactgacgccaacacccatagaccggtgttccaatccgctcactattcagttagcgtaaatgaagatagaccaatggggtctacaatcgtagtgatcagcgccagcgacgatgatgtgggagaaaatgcacggataacctatctgctcgaggacaaccttccacaatttcgcatcgatgccgactccggcgctatcactctgcaggccccactggattacgaggaccaagttacctacactctcgcaatcaccgcccgtgacaacggaatcccacagaaagccgacaccacttatgtcgaggtcatggtaaacgacgtgaacgataacgcacctcagttcgtggcgagtcattatacaggactcgtgtccgaagacgctcccccttttacctccgtgctgcagatctccgcaacagatagggatgcacatgctaatgggcgagtccagtacacgtttcagaacggagaggatggagatggagactttactatcgagccaacatcaggcattgtcaggactgttagaaggcttgatagagaggccgtatcagtgtacgagctaacagcttacgcggtggatcgcggtgtcccccccctgagaacgcccgtcagcatacaggtaatggtccaggacgtcaacgataacgcacctgtgttcccagccgaagaattcgaggttagagtcaaggagaatagcatcgtcggctcagtagttgctcagatcaccgctgttgacccagacgagggcccaaatgcacatataatgtaccaaattgtggaaggcaacatcccggagctgtttcagatggacattttctcaggcgaactgacagctctcatagacttggactacgaagcgaggcaggaatatgttatagttgtgcaagcgacaagcgcacctctcgtctcccgcgccacagtacacgttagactggtggaccaaaatgacaactcccccgtgctcaataattttcagatactgttcaataattacgtcagtaaccgctccgatacgtttcccagtggcatcatcggcaggataccagcatatgatccagatgtctctgatcatctattttactccttcgagcgcggcaacgaactgcaactcttggtggtgaatcagacaagcggagaactccgacttagtcggaagctagacaacaacagacctttggtcgcatcaatgcttgtaaccgtcacggacggcctgcactccgtcaccgcacaatgcgtactgcgcgtggtcataataactgaagaacttctcgcaaacagcctcacagttcgccttgaaaatatgtggcaggagcggtttctgagcccgctgctgggtcggtttctcgagggtgttgctgcagttctggccacccccgccgaggatgtatttatatttaacattcaaaatgacacagatgtcggaggaacagtcttgaacgtgagtttttctgctctcgctccacggggagcaggagccggagccgccgggccatggttcagtagcgaagagcttcaggagcaactgtacgtgagacgcgccgcactggctgcacggagtctgctggacgtactgccttttgacgacaatgtatgcctcagggagccttgtgaaaactacatgaaatgcgtgtccgtgcttcgattcgacagtagcgcccctttcctcgccagcgcttcgaccctctttcgtcccatacagcccatagccggcttgcgatgtaggtgccctcctggattcaccggagacttttgtgagactgagttggatctttgttactctaatccgtgccggaatggcggggcctgcgcgagacgtgagggtgggtacacttgcgtatgtcggccaaggtttaccggagaagattgcgaactcgatactgaagcaggccgatgtgttcccggcgtttgcagaaatggaggtacttgtaccgacgctccaaatggcggtttccggtgccagtgtcctgcagggggtgcttttgaaggccctagatgtgaggttgctgctcgctcttttcctcctagttcgtttgtgatgtttagaggtctcaggcaacggtttcatttaaccctttctctctccttcgctaccgtgcagcagtccggtctactgttctacaatgggagactgaatgagaaacatgactttctggctctggaactcgttgctggtcaagtacgcctcacttacagtacaggagagtcgaacactgtggtgagtccaacggttcctgggggattgagtgacggccagtggcataccgtacatttgcgctactataacaaaccacgcaccgatgcactgggcggagctcagggacctagcaaggataaagtcgcggtgctgagcgtagacgattgtgatgtggccgtggcactgcagtttggggctgagattgggaattattcctgtgcagctgccggcgttcaaactagcagcaaaaaatcactcgacctgaccggccctctcctgctcggtggagttccaaacttgcccgagaattttcccgtatcccacaaggattttattggctgcatgagagacttgcatatcgacggcagacgcgtggacatggcggcattcgtcgctaacaatgggacaatggccggatgtcaggcaaaactccacttttgcgactcaggaccgtgcaagaacagcggattctgctccgaacgttggggctccttctcctgtgactgtccggtgggattcggcgggaaagattgtcagcttacaatggcacacccacatcatttcaggggaaacggtacactgagttggaacttcgggagcgatatggctgtctccgtcccatggtacttagggcttgcttttcgaacccgagcgactcaaggagtgttaatgcaagttcaggccggtcctcactccacactcctgtgccaactcgacagaggattgttaagcgtgactgtcacccgaggatctggacgagctagccacctgctcctggaccaagtaaccgtgagtgacgggcggtggcacgatctacggctggagcttcaagaagaacccggggggaggcgaggtcaccacgtactcatggtcagtctcgacttttctttattccaggacactatggccgtgggttcggaactccaaggacttaaagtcaaacaactgcacgtgggaggcttacctccaggctctgccgaagaggccccgcaaggtctggtcggctgcatccagggagtgtggcttggatccactccctcaggctctcccgccctgctacctccttcccatcgcgtgaatgcagaacccgggtgtgtcgtcactaatgcatgcgcctctggaccttgcccaccccacgctgactgtcgagatctctggcaaacattctcctgtacttgccagccagggtattacggccctggatgtgtagacgcctgccttctaaatccatgccagaatcagggttcatgcagacatctgccaggggctcctcatggttacacgtgcgattgtgtagggggttacttcgggcaccattgcgaacataggatggatcagcaatgtccccgtggctggtggggcagcccaacatgcggaccatgcaattgtgatgttcataagggctttgacccaaactgcaacaagaccaacggtcagtgtcattgcaaagaattccactatcgacctcggggctctgattcctgcctgccctgcgattgttatccagtaggctcaacatcccgcagctgcgctcctcactctggacagtgtccttgcagaccaggcgctcttgggcggcaatgtaatagctgtgactccccattcgcagaagtgacagcatccggatgtcgagttctttatgacgcttgtcccaaatcccttagatccggtgtatggtggcctcagacaaagttcggcgttctggctactgttccatgccctaggggagcgcttggggcggcagtgcgcctgtgtgatgaggcccagggatggcttgagccagatctctttaattgcacatctccagcattccgagaactaagtctgctcctggacggactggagcttaacaagacagccctcgacactatggaagccaagaaattagcacagagactccgtgaggtcaccggacacaccgatcattacttttcccaggacgtgagggtaacagcccggcttttagcccacctgcttgccttcgagtctcatcaacagggcttcggactgacggcaacacaagacgcacacttcaacgaaaacctactgtgggctggatccgcactactggcccctgagactggcgatctgtgggctgccttgggacaaagggcccccgggggcagtcccggcagcgcaggcctggttcgtcatctcgaggaatatgccgccactcttgctcgtaacatggaactcacctacctaaaccctatgggcttggtgaccccaaacatcatgctgtcaatcgaccgaatggaacacccctcttctcctcgtggagcccgaagatatccccgctaccattccaacctgttccgtggacaagatgcctgggaccctcacacccacgtgctgttacccagccagtcccctcgaccatctccatccgaagtgttacctacctcctcgtctatcgaaaatagcaccacctcctccgttgttccaccacctgcccctccagagccagaacccggtatatcaattattatactactcgtgtaccgcactttaggtggattgcttccagcacagtttcaggccgagcgccgaggggcacgacttccacagaaccccgtcatgaattcgccagtggttagtgtcgctgtgttccacggacgtaatttcttgagaggcatccttgaatcccccatctctctggaatttcggctgttgcagaccgcaaacagatccaaagcaatatgcgtgcaatgggaccctccagggctggccgagcagcacggcgtctggaccgccagagactgtgagctggtgcatcggaatggaagtcacgcacgatgcagatgtagtaggaccgggacattcggcgttttgatggatgcttcgcccagggagcgcctggaaggagacttggaattgcttgccgtctttactcacgttgtggtcgccgtgtccgtagctgcgctggtcctgaccgccgccattctacttagcctaagatcattgaaaagtaacgtgaggggcattcacgccaacgtcgcagctgctctcggtgtcgccgaactgctctttctcctgggtattcatagaacacacaatcagttggtatgcactgccgtggcgattctgctccactactttttcttgagcacttttgcctggctgtttgtgcaaggacttcacctctaccgaatgcaagttgaacctaggaatgtcgatcgcggtgccatgcgtttttatcacgctctggggtggggcgtgcccgcagtgttattaggcctggccgttggattagacccagagggctatggcaatcctgatttctgctggatttctgtgcatgaaccacttatctggagtttcgcaggcccagtcgtgcttgtcatcgttatgaacggaacaatgtttctgctggccgcacgcacatcatgctcaaccggccagcgtgaggctaagaaaacttccgctttgacactgcgatcctcttttcttcttctgctacttgtctctgcgtcatggctttttgggctgcttgccgtcaatcattcgattctggccttccactacctccacgccggtctgtgcggtctgcaaggcctagcagtgctgctcctcttctgtgtcctcaatgccgatgccagagccgcctggatgcccgcctgtctcggtcggaaagccgccccagaggaggctcgccccgctcctggattggggcctggagcttataacaacactgctttatttgaagagtcaggactgattcgaatcaccttaggcgcgtccactgtgtcatctgtctcgagcgcacgctccggtaggacgcaggatcaagacagtcagcggggtaggagttacttacgtgataatgttcttgtccgccacggatctgcggccgatcacaccgaccactcattgcaggctcacgctggaccaaccgacctggatgtggctatgttccatcgagatgcaggagccgatagtgattctgatagtgacctcagcctggaggaggagaggagtttgagtatcccatcttcggaatctgaagataatggtaggacgagaggcaggttccagcgccctctgtgccgtgccgctcagagtgagaggcttttaacgcatcctaaagacgtggatggcaacgatctcttaagctactggccagccctcggagaatgtgaagccgccccttgtgcacttcaaacctggggatctgagcgccgtttgggtctggacacttctaaagacgcagccaacaataaccagcctgatcccgcgctgacctccggcgacgaaacgagccttggccgggcacaaagacaaagaaaaggaattctcaaaaatcgccttcagtatccactagtaccacagaccagaggggcgccagagctgtcgtggtgccgggctgctactctggggcaccgggcagttccagctgcttcttacggacgcatctatgcagggggaggaaccgggtctctgtcccagcccgcgagtaggtacagttccagggagcagttagacctcctgctgaggcgccaattgtctcgggaacgcttagaggaggcccccgcccctgtgcttcgaccattgtccagaccaggatcccaagaatgtatggacgcagcacccggacgcctggagcctaaagaccggggaagcacactgccacggagacagccaccccgcgattatcctggcgcaatggctggacggtttggatctagagacgccctggaccttggcgcacctagagaatggttatccacgctgccacctccacgccgcactagagacctcgacccccaacccccgcccctgccattgagtccacagagacagctttctagggaccccctgctgccaagcagaccacttgattcactctctcggtcttccaactcacgtgagcagctggatcaggtcccgtcacggcatccatccagagaagctctgggccccctcccacagttgctgagggcccgcgaagatagtgtgtcaggtccatcccacggcccttctaccgaacagttggatatcctgagctccattctcgcgtctttcaattcctctgctctgagttctgtccagtcttcctcaacacccctcggcccgcatactaccgcaactccgtcagctaccgcatccgtcctcgggccctctacacctcgcagtgctacatcacattcaatatctgagctgtcacctgattcagaagtaccacgatccgagggccatagttag

SEQ ID NO: 248670 - RNA, 384 nt, synthetic construct
  misc_feature 1..384: note = Description of Artificial Sequence: Synthetic coding sequence
  source 1..384: mol_type = other RNA
atgggcttcaggaagttctcgccctttttggccttgtctatcctcgtactatatcaggccggtagtctccaggctgccccatttagatcagcccttgagagcagcccagatcccgctacactctctaaggaggatgcccgtttgttactggcagctcttgtccaggattatgtccaaatgaaagcttcggaactgaaacaagagcaagagacacaggggagctcttctgccgcccagaagcgagcatgcaataccgccacgtgcgtcactcataggttggccggcctcctctcccgttctggtgggatggtaaagagtaatttcgtgccaactaacgtgggttcgaaggcgttcgggcggcggagaagggatttgcaggcatag

SEQ ID NO: 248671 - RNA, 417 nt, synthetic construct
  misc_feature 1..417: note = Description of Artificial Sequence: Synthetic coding sequence
  source 1..417: mol_type = other RNA
atgaagaaggaggccaacctgcagagaggaggcatgggctttcggaagttctctccattcctggcgttaagcatactagttttgtatcaggctggctcactccaggccgcaccattccggtccgccctcgagagttcacctgatccagccactttatccaaagaagacgcacgtctactgctcgccgctctggtgcaggattatgtgcagatgaaagcaagcgaacttaaacaggagcaggaaacacaaggttcaagttcagcagcccagaaacgtgcatgtaacacagccacatgcgtgacccacagacttgctggattgctgtctcgaagcggagggatggtcaaatccaatttcgtgcctacaaatgttgggagtaaggcttttggacgacggcggagagaccttcaagcatag

SEQ ID NO: 248672 - RNA, 384 nt, synthetic construct
  misc_feature 1..384: note = Description of Artificial Sequence: Synthetic coding sequence
  source 1..384: mol_type = other RNA
atgggatttagaaaattctcgcccttcctagctctgtccatcctggtcttatatcaggccggctcactgcaggcagcgccgttccgttcagcactggaatcttctcccgaccccgccaccctaagcaaagaagatgcaagacttctgctggccgcccttgtacaggattacgtgcagatgaaagcgtccgagctgaaacaagaacaagagacccaaggctcaagctccgcggcacaaaagagggcgtgcaataccgctacctgtgtcacacatagacttgcaggtctactctctcggagcggaggcatggtcaaatctaacttcgttcctaccaacgttggcagcaaggcctttggacgccgcagacgggatctacaagcttag

SEQ ID NO: 248673 - RNA, 948 nt, synthetic construct
  misc_feature 1..948: note = Description of Artificial Sequence: Synthetic coding sequence
  source 1..948: mol_type = other RNA
atgagaatgtgcgatcgtggtatccagatgctaatcacaactgtaggcgcctttgccgcgttctccctgatgactatcgccgtgggcaccgactattggctctactcaaggggcgtttgtcgtaccaagtcaacatccgataatgaaacttctaggaaaaatgaggaagtaatgacacactccggtctttggcggacatgctgtttagagggagcctttagaggcgtgtgtaagaaaattgaccactttcctgaagacgctgattacgaacaggacaccgctgaatatctattacgcgccgtcagagcttcaagtgtatttcctatcctgtccgtgaccctgctgttttttggagggctgtgtgtcgccgcttccgaatttcatagatcccgacacaatgttattctgtcagccggaatcttctttgtgtctgcgggtttgtctaacatcattgggatcatcgtttatatcagtgccaacgccggagaccctgggcaaagagattccaagaagtcgtactcttatggatggtctttctacttcggagctttttcattcatcattgcggaaatcgtaggtgtggtagccgtgcatatttatatcgagaagcatcagcagctccgcgctaaatcccattcagaattcttgaaaaaaagcacattcgcacgcttaccaccctaccgttacaggttcaggagacgctccagtagtagatctaccgaaccccgatcccgcgacctctctcccatcagtaaagggttccatacgatcccatctaccgacatttccatgttcaccctgtcccgtgatccaagtaaaatcaccatgggcacgctcctcaactccgatcgcgatcatgcgttcttgcagttccacaattcaactccaaaagaattcaaagagagcctccataacaatcctgccaatcgaagaacaaccccagtctag

SEQ ID NO: 248674 - RNA, 891 nt, synthetic construct
  misc_feature 1..891: note = Description of Artificial Sequence: Synthetic coding sequence
  source 1..891: mol_type = other RNA
atgtctgcgtgtggtcgaaaagctcttactttgctgtcctccgttttcgccgtctgtggcctgggccttctggggatcgccgtttccaccgactattggctttaccttgaggagggggtgatagtcccacaaaatcagagcacagagattaaaatgtcgctgcatagcgggctgtggcgcgtctgtttcctagccggtgaagagcgagggagatgtttcacgatcgaatacgttatgcccatgaacacacaactgacctctgaatcaactgttaatgtgttgaaaatgattaggagtgccacgccctttccgcttgtgagtctttttttcatgtttatcggcttcattctcaacaacattggtcacatccgaccccaccgaactattctggctttcgtgtctggcatcttctttatcctttcgggactcagtcttgtggttggacttgtactatacattagcagcattaatgacgaaatgctcaacagaaccaaggatgcggagacctatttcaactacaagtacggctggagcttcgccttcgcagcaatctcattccttttgacagaagtcaaacccgtgaccctctctatggacaggcttggtcttggcactgccccactgtctagaggtgaatggggctgggggagacgggatattccgcaacccttttggactcccgatcacccactgtacttcccttcatcctcccagaatgtatctcttagttacctgagcggatcgccaccagcacgtatgtcaccaggaccgtgtagctgccctcatgttcattttccaccacactcaagctgtgtgttgtgtagacctcagccacgtgaaatgcggcaagcacctgctgcaagcccatcctctgctgtgttctccttgtag

SEQ ID NO: 248675 - RNA, 948 nt, synthetic construct
  misc_feature 1..948: note = Description of Artificial Sequence: Synthetic coding sequence
  source 1..948: mol_type = other RNA
atggatctgaggcagtttctgatgtgtctctccctgtgcactgcgtttgcacttagtaaaccgaccgaaaagaaagatcgggtccaccacgagccacaactctccgataaagtgcataacgatgcccaaagttttgactacgaccacgatgcattccttggagccgaagaggcaaagacattcgatcagctgacccccgaggaatctaaagagcgcttaggcaagattgtgagtaaaatagacggagataaagacggtttcgtaactgtggacgagctgaaagactggataaaatttgcccagaagcgctggatatacgaagacgtggaacgccagtggaaaggccacgacctaaatgaagacgggctagtgtcctgggaagaatacaaaaacgcgacatacggctacgtcctcgacgacccagatccagatgacggttttaactacaagcagatgatggttagagacgagagaagattcaagatggcagataaagacggagacctgatcgcgaccaaggaggaatttacagctttcctgcatcctgaggagtatgattacatgaaggacattgtagtacaggagacaatggaggacattgataagaacgcagacggtttcatcgaccttgaagaatatatcggcgacatgtactctcacgacggaaatacggatgaacctgaatgggtgaaaacagaaagagaacaatttgttgagtttagagataagaacagggatggcaaaatggataaggaggaaaccaaggactggatattgccaagtgactacgaccacgccgaggctgaagcaagacatcttgtttacgagtcggaccagaacaaagacggcaagctcactaaggaggaaatcgttgataagtatgacctgtttgtcgggtctcaggcaacagatttcggggaagcactggtccggcacgatgaattctag

SEQ ID NO: 248676 - RNA, 465 nt, synthetic construct
  misc_feature 1..465: note = Description of Artificial Sequence: Synthetic coding sequence
  source 1..465: mol_type = other RNA
atggatctcagacagtttctaatgtgcctgagcctgtgtacagctttcgccctctctaaaccaactgaaaagaaagaccgggtccaccacgagccccagctgagcgataaagtgcataatgacgcgcagagtttcgactacgaccatgatgcctttctgggtgctgaagaagctaaaacctttgaccagctaacccccgaggaaagcaaagagcgcttaggcaagattgtctcaaaaatagacggggataaggatggattcgtaaccgtggatgaactgaaggattggatactgccctctgattatgaccacgccgaggcagaagcaagacacctcgtatacgagagcgaccagaacaaggacggaaagctgaccaaggaagaaatcgttgacaaatatgatctgtttgtgggttcacaggcgaccgattttggcgaagcactggtgagacacgatgagttctag

SEQ ID NO: 248677 - RNA, 948 nt, synthetic construct
  misc_feature 1..948: note = Description of Artificial Sequence: Synthetic coding sequence
  source 1..948: mol_type = other RNA
atggatctccgccagttcctcatgtgtctgtcactgtgcactgcttttgccctttccaagcctactgagaaaaaagaccgcgtacaccatgaaccacaattgtccgataaagtgcacaacgatgcccagtcattcgattacgatcacgacgctttcttaggcgccgaggaagccaagactttcgaccagctgaccccggaagagagtaaagaaagattgggaatgattgtcgataaaatcgacgcagacaaagatggcttcgtgaccgaaggcgaactgaagtcttggattaaacatgcacagaagaagtatatttatgacaacgtagagaaccagtggcaggaatttgatatgaatcaggacggacttatcagctgggatgagtataggaacgtgacgtacggcacctacttagatgatccagatccagacgacggttttaactataaacagatgatggtgagagacgagaggaggtttaagatggcagataaggacggcgatttgatcgcaaccaaagaagagttcacagcttttttgcatcccgaagagtatgattacatgaaagatatagtggtgcaggagactatggaagacatcgacaagaatgccgacgggtttattgacctcgaagagtatatcggcgatatgtattcacatgacggaaatacggatgaaccggaatgggtgaagacagagagagaacagtttgtggaatttcgagataagaatcgggatggtaagatggacaaagaagaaacaaaagattggatactgcctagcgactacgaccacgccgaggccgaagctcggcacctggtatatgaaagcgaccaaaacaaagatggcaagctaacaaaggaggagattgtggacaagtacgacctgtttgtcgggtcacaggccacagactttggagaagctttagtgcgacatgacgaattttag

SEQ ID NO: 248678 - RNA, 972 nt, synthetic construct
  misc_feature 1..972: note = Description of Artificial Sequence: Synthetic coding sequence
  source 1..972: mol_type = other RNA
atgaaggagacagatctaattataatggacctgaggcaatttctgatgtgcttatctctatgcactgctttcgctttgtcaaaaccaactgaaaagaaagaccgagtccatcacgagccccagctctcagacaaagtgcataacgatgcccagtccttcgactatgaccatgacgcctttctgggcgccgaggaggccaaaacattcgaccaacttacccccgaggaaagtaaagaacgcttaggaaaaatcgtatccaaaatcgatggagataaagatggcttcgtcacagttgatgaactgaaagactggatcaaattcgcacagaagcgctggatttacgaggacgtcgaaaggcaatggaaaggacacgatttaaatgaggatggattggttagttgggaagaatataaaaacgcaacctatggatacgtgctggacgaccccgatccagacgacggctttaactataaacagatgatggtgagagatgaaaggcggtttaagatggccgataaggatggagatctcatcgctactaaagaggaatttacagctttcctgcatcctgaggaatacgactacatgaaggatattgtggttcaagagactatggaagacatcgacaagaacgccgacggatttatcgacctggaggagtatatcggagatatgtattcacatgatggcaacacagacgaacccgagtgggtgaaaactgagcgagaacagtttgtagaattcagagacaagaaccgtgatggaaaaatggacaaagaagaaactaaagactggatactgccctctgattatgaccacgctgaggctgaggctaggcacttagtgtacgagtccgaccaaaataaagacggcaagttaaccaaagaagaaatcgtggacaagtacgacctctttgttggctcacaagctactgatttcggcgaagccttagttcgacatgatgagttttag

SEQ ID NO: 248679 - RNA, 444 nt, synthetic construct
  misc_feature 1..444: note = Description of Artificial Sequence: Synthetic coding sequence
  source 1..444: mol_type = other RNA
tagatcgccaccaaggaagaatttaccgcatttctgcatccagaggaatacgattacatgaaagacatcgtcgttcaggagactatggaagatattgataaaaatgctgatggcttcatcgatctagaagagtatattggcgacatgtacagtcacgacggcaacacagatgagccggaatgggttaagaccgagcgggaacaatttgtcgagttccgggacaaaaaccgagatggcaaaatggataaggaggagacaaaagactggatactcccaagcgactacgaccatgctgaggctgaggccaggcacttagtttacgaatcagatcagaataaggacggaaagctaactaaagaagagattgtagataagtacgatctatttgtgggatcacaagccaccgattttggggaagctttagtacgccatgatgaattctag

SEQ ID NO: 248680 - RNA, 675 nt, synthetic construct
  misc_feature 1..675: note = Description of Artificial Sequence: Synthetic coding sequence
  source 1..675: mol_type = other RNA
atggatctgagacagttcctcatgtgcctgtctttatgcaccgctttcgcattatccaaacctacagagaaaaaggacagagttcatcacgagccccagttatcagataaagtacataacgacgcacaatcattcgattacgatcacgacgctttccttggggcagaggaggcaaagacattcgatcaacttacccctgaagagtctaaagagcgactcggcaagatcgtctctaagattgacggcgacaaggacggctttgtcactgtcgacgaactgaaagattggatcaagttcgcgcaaaagcgctggatatacgaggacgtagagagacaatggaaaggtcacgacctaaatgaagatggactggtaagctgggaggaatataagaacgctacctacggatacgtattagatgacccagaccccgatgatgggttcaattataagcaaatgatggttcgcgatgagcggcgattcaaaatggctgacaaagacggcgatctcatagcaaccaaggaggaatttactgcctttcttcacccagaagaatatgactatatgaaagacattgtggtgcaggaaacaatggaagacatagacaagaacgcagatggatttatagacttggaggagtatatcggttggcaggcatatcaggggggggatagatag

SEQ ID NO: 248681 - RNA, 444 nt, synthetic construct
  misc_feature 1..444: note = Description of Artificial Sequence: Synthetic coding sequence
  source 1..444: mol_type = other RNA
atgaaagaaaccgacctgataataatggacttgagacaatttcttatgtgcctctcgctgtgcacagcgtttgctctgagcaaacctactgaaaaaaaagatagggtgcaccacgaaccccaactctcagataaagtacacaatgatgcccagtctttcgattacgaccatgacgctttccttggagcagaagaagccaagacattcgaccaactgacccccgaagaaagcaaagagcggcttggcaagatagtgtcgaagatcgacggagacaaggatggctttgtaacagtcgacgaactcaaggactggattaaattcgcgcaaaaacggtggatctatgaagatgtggaacgtcaatggaaagggcacgatctaaatgaggatggcctggtgagctgggaggaatataagaatgccacatacggatatgtactggaatag

SEQ ID NO: 248682 - RNA, 513 nt, synthetic construct
  misc_feature 1..513: note = Description of Artificial Sequence: Synthetic coding sequence
  source 1..513: mol_type = other RNA
atggatctgcgacagtttctgatgtgtttgtctctgtgcacagccttcgctttatcaaaacccaccgaaaaaaaggacagagtacaccatgagccacaattgtccgataaagttcataatgatgcccaatcatttgactacgaccatgacgcattcctgggtgccgaagaggccaagacttttgatcagttgacccctgaagagtccaaggagcgcctcggaatgattgtcgacaaaattgatgcagataaagacggcttcgtaaccgagggggaacttaaatcttggataaaacatgctcagaagaaatacatttatgacaacgtggaaaaccaatggcaggagttcgacatgaatcaagacggacttatcagctgggacgagtatagaaatgtgacatacgggacctacctagacgaccctgaccccgacgacggcttcaattataaacagatgatggtgagggatgagagaagattcaaaatggccgatcgcgctcgagccgtttgctag

SEQ ID NO: 248683 - RNA, 606 nt, synthetic construct
  misc_feature 1..606: note = Description of Artificial Sequence: Synthetic coding sequence
  source 1..606: mol_type = other RNA
atggacctgcggcaattcttgatgtgtctgtccctctgtaccgcattcgccctgtctaagccgaccgaaaagaaggatcgagtacatcacgagcctcaactatcagataaggtgcacaatgacgctcagagctttgactatgatcatgatgcatttctgggagccgaagaagccaaaacatttgaccagctgacaccagaagagagtaaggaacgactggggatgattgtcgacaaaattgatgctgacaaggatggttttgtcacggaaggcgagctgaagtcatggatcaagcatgctcagaaaaaatatatatacgacaatgtcgagaaccaatggcaggagttcgacatgaatcaggacggccttatttcatgggatgaatatcgcaacgtgacgtacggcacctaccttgacgacccagatcctgatgacggctttaattataaacagatgatggtgagggacgaacggagatttaaaatggccgacaaagacggagatctcatagccactaaagaggaaattgtcgacaagtacgatcttttcgtgggtagccaggcaacagatttcggcgaggcactagtgcgtcatgacgaattctag

SEQ ID NO: 248684 - RNA, 798 nt, synthetic construct
  misc_feature 1..798: note = Description of Artificial Sequence: Synthetic coding sequence
  source 1..798: mol_type = other RNA
atggatctacgtcagtttctcatgtgcttgagcctgtgcacagccttcgctctgtctaagcccaccgagaaaaaggacagggtgcaccatgaaccccaattatcagacaaagtacacaacgatgctcaaagttttgactatgatcacgatgcattcctgggcgccgaagaggccaagacatttgaccagctgactcccgaggagagcaaggagcgtctgggaaaaatagttagtaagatcgatggagataaggatggcttcgtaactgtggatgagctgaaggactggattaaattcgcccagaaaagatggatttatgaagacgtggagagacagtggaaggggcatgaccttaatgaggacggcttggtgtcatgggaagaatataagaatgccacctacggttacgtgctggacgatccagacccagacgatggatttaactacaaacaaatgatggtgcgagacgaacggagatttaagatggctgacaaggatggagatctcattgccacaaaagaagagttcacagcttttttgcatccggaagaatacgattacatgaaagacatagttgtgcaagagaccatggaagacattgataaaaatgcagacggctttattgatttagaggagtacatcggagatatgtattcacatgatggaaatactgacgagagcgatcagaataaagacgggaaattgactaaggaggagattgttgacaaatatgacctattcgtgggcagccaagcgaccgacttcggagaggccttagtgcgccacgacgagttctag

SEQ ID NO: 248685 - RNA, 495 nt, synthetic construct
  misc_feature 1..495: note = Description of Artificial Sequence: Synthetic coding sequence
  source 1..495: mol_type = other RNA
atgatggtccgcgacgaacggcgctttaagatggcagataaagacggggatcttatagcaaccaaggaagaatttacagccttcctgcaccccgaggaatatgactatatgaaggacattgtagtacaagagaccatggaggatattgacaagaacgctgatggatttattgacctcgaagagtacatcggagacatgtacagccacgacgggaatactgacgaaccggaatgggtcaagacagaaagagaacagtttgtagaatttagggacaaaaatcgagacgggaagatggacaaggaagagacgaaagactggatcctcccgtcagactacgatcatgctgaggcagaagcccgccaccttgtgtatgaaagtgaccaaaataaagatggaaagctcaccaaagaggagatcgttgacaagtatgaccttttcgtcggctctcaggccacagattttggagaggctctcgtgcgccacgatgaattctag

SEQ ID NO: 248686 - RNA, 972 nt, synthetic construct
  misc_feature 1..972: note = Description of Artificial Sequence: Synthetic coding sequence
  source 1..972: mol_type = other RNA
atgaaggagaccgacttgatcatcatggatttacgacaatttttaatgtgcctgtccctgtgcaccgctttcgctctaagtaagccgacagaaaaaaaagatcgggttcatcacgaaccacagttgtctgacaaagtgcacaacgacgctcagtcttttgactatgatcatgacgcttttctgggagccgaggaagctaaaacgttcgaccagttgacacctgaggagtccaaagaacgtcttggaatgattgtggataaaatagacgccgataaagacggctttgtaacggaaggagaattaaaaagctggatcaaacatgcccaaaaaaagtacatctatgacaatgtcgaaaaccagtggcaagaattcgacatgaaccaggacggcctgattagctgggacgagtatcggaacgttacatatggtacgtacctggacgatcccgacccggacgacggttttaattataaacagatgatggtgagagacgagaggaggttcaagatggctgataaggatggtgatctcatagcaacaaaggaagaattcaccgcatttttgcatcctgaagagtacgactacatgaaagatattgttgtgcaggaaaccatggaagatatagataagaacgccgatggctttattgatttggaggaatacataggcgatatgtattctcacgatgggaacactgacgaacccgaatgggtaaaaacagagagagaacagtttgtcgagttccgcgacaagaatcgcgacgggaaaatggataaggaagaaaccaaagattggatcctgccctcagactatgaccacgcagaagccgaagctaggcatcttgtgtatgagagtgatcagaataaggatggaaaactgaccaaagaagaaatagtggacaagtatgacctctttgttggctcccaggctactgacttcggcgaggcactagttagacatgacgaattctag

SEQ ID NO: 248687 - RNA, 1386 nt, synthetic construct
  misc_feature 1..1386: note = Description of Artificial Sequence: Synthetic coding sequence
  source 1..1386: mol_type = other RNA
atgaacacagacttggctgctggaaagatggctagtgcggcctgtagtatggaccctatcgactcgttcgaactcctagacctgctcttcgaccgacaggatggcattctgcgacatgtcgaacttggtgagggttggggccacgtaaaagatcaacaggtcttgccaaacccagacagcgatgacttcctgtccagcattcttggatctggagattcattgccttcgtccccactgtggagtccagaaggatccgattccggtattagcgaggatcttccatcagaccctcaggatacccctcctagatctggcccggcgacttctccagctggatgtcaccccgctcaacctgggaagggaccatgtttgtcctatcaccctggtaacagttgcagcaccacaacccctggcccggtgatccaagtgcccgaagcatctgtcacaattgatttggaaatgtggagccctgggggcagaatttgcgccgaaaagcctgccgaccccgtcgacctttcacctcgctgtaacctgaccgtaaaagatttgctcctgtcgggctcctctggagatctgcaacagcaccacctcggagccagctatctccttcggccaggagccggtcactgccaagagctggtacttaccgaggatgagaaaaaacttctcgctaaggaaggaattactttgccaacccagttgcccctcaccaaatatgaagaacgcgtgttgaaaaagatcaggagaaagatacgcaacaaacagtccgcccaggaatctcggaagaaaaagaaagaatacatcgacgggcttgagacccgaatgtccgcctgtaccgcccagaatcaggagcttcagcgaaaagtcctccatttagaaaaacagaacctgtctctcttagagcaacttaaaaaactgcaggcgatagtcgtccagtctacctcgaaatcagcacagacagggacttgtgtagccgttctgctcctatcctttgccctcataattcttccatcaatttcaccatttggtcccaataaaaccgagagcccaggggattttgctcccgtcagagtgttctcaaggaccctgcataacgatgccgcatctagagtggccgcagacgccgtgcccggtagtgaagcacctggcccacgaccagaggccgacactactagggaagagtcgccaggcagcccaggcgctgattgggggttccaggatactgccaacctcaccaattccacagaagaattagataacgccacgttggtgcttagaaacgcaactgaaggactgggccaagtcgctttactggattgggtcgccccaggtccatctaccggtagtgggagggccggactggaagctgcaggagatgaattgtag

SEQ ID NO: 248688 - RNA, 4827 nt, synthetic construct
  misc_feature 1..4827: note = Description of Artificial Sequence: Synthetic coding sequence
  source 1..4827: mol_type = other RNA
atgtattccgcccatcgcccactgatgcctgcttcatctgcagcttctaggggactcggaatgttcgtttggacaaacgtggagccccgatccgtggccgtattcccttggcacagtctcgttccctttctggccccaagccaacccgatccatccgtgcagcctagtgaagctcagcaaccagcatcacacccagtcgcgtcgaaccagtccaaggaacccgcagagagtgccgcagttgctcacgagagaccccccggggggacaggctctgctgatccggaacgcccccccggagccacctgccctgagtctcccggacccggccctcctcacccactcggagttgtagaaagcggcaaaggtccacctccaactactgaagaagaagcaagtggaccgccaggagaaccccgattagattctgagactgagtccgaccatgacgatgcttttttaagcataatgtcccctgagattcagctgcccttaccccctggcaaaagaagaacacaatccctgtccgcattgccgaaggagcgggattcctcttccgagaaggatggacggtcacccaacaaacgtgaaaaagaccacattcgaagacccatgaacgctttcatgatatttagtaagaggcacagagccctcgttcatcagcgtcacccgaaccaggacaatagaacggtttctaaaatcctaggagaatggtggtacgccctcggtccgaaggagaaacaaaagtatcacgaccttgcttttcaagtgaaagaggcccattttaaagcacatccggattggaaatggtgtaataaagaccgtaagaagtcgtctagcgaggctaaaccaacatctctcggcctggccggcggccacaaggaaactcgcgaacgctccatgtcagaaacaggcaccgctgcagcccctggtgtgagctcagaactgttgagtgtcgctgcgcaaacactgctatcatccgacacaaaggcccctggtagttcttcatgtggagccgagcgactccacaccgtgggaggccccggctccgcccgtcccagagcctttagtcattctggtgtgcactccctggatggtggcgaggtagattctcaggcactccaggaattaacgcaaatggtgtcaggccccgcctcatattcaggaccgaaacctagcacacagtacggcgcacctggaccattcgcggcccccggagagggtggtgctctggccgctactggcaggccgcctctgctgcctacaagagcctcaagatcacagcgtgccgcgagtgaagacatgactagcgatgaagaaaggatggtcatttgtgaggaggagggagatgacgacgtcatagctgacgacgggttcggaactaccgatattgacctgaaatgtaaagagagagttactgattctgaaagcggagacagctctggcgaggatcctgaaggcaataaaggcttcgggagaaaggtatttagccctgtaatccggtcctcattcacccattgtcgacccccccttgatcccgagccccccggacccccagatcctcccgtggcattcggcaaaggatatggtagtgccccttcttcttctgcaagttcccccgcttcttctagcgccagcgccgctacgtctttctcactgggctctggcacatttaaagctcaagagagtggccagggctccacggccggccccttgagaccccccccacccggcgcaggcggcccagcaacaccctccaaagccactagattcctccccatggatcccgccactttcaggcgtaagagaccggaatccgtggggggactggaacctcctggacctagtgtgattgctgcaccccctagtggcggagggaatatattacaaactttagtgttgccccccaataaagaggagcaggaaggggggggagcaagggtacctagcgcaccagccccctctttagcctacggagctccagcggcccccttaagtaggcctgctgccaccatggtcaccaacgtcgtgagacccgtctcctccacacccgtccccatcgctagcaaaccatttccaacgtcgggtagagcggaagccagccctaacgataccgcaggagcacggactgaaatgggaaccggctcacgtgtgcctggaggttcccccctgggtgtgagcctggtctatagcgataagaaaagtgctgccgcgacatctcctgctcctcatttagtcgctggccccctcctcggcaccgtaggcaaagctccagccacagtgaccaacttactggtgggcacacctggttacggagcccctgcccctccagccgttcagttcatcgcacaaggcgctccaggtggcggcacaacagccggatcaggagcaggggcaggctccggccctaatggaccggtgcctcttgggatcctacaacctggcgccctaggaaaggcaggcggaattacccaggtacagtacatcttgcccactttgccccagcagctgcaagtcgcccccgcgccggccccagcccccggtacaaaagcggccgccccttcagggccagcgcccacaacaagtatccggtttaccttacccccaggaacaagtaccaatggaaaagtgttagccgctaccgcacctacccctggaatcccaatcctgcagagcgtcccgtccgcccccccaccaaaggcacaatcagtgagtcctgttcaggccccaccacctggaggaagcgcccagttgctgccaggaaaagtgctggtccccctggccgccccgagtatgtcagtacgcggcggaggtgccggtcaacccctcccacttgtttccccccccttttcagttcctgtacaaaacggtgcccaacccccaagcaaaatcattcagcttacaccagttcccgtcagcacaccctctggactcgtgcccccactcagtcccgcgacgctccctggaccaaccagccagccacagaaggttctgctgccatcctccactcggatcacatacgtacaaagcgctggaggtcatgcacttcccctgggaacgtcaccggcatcttcacaagccggaactgttacaagttacggccctacttcaagtgtggcgcttggctttacaagtctcggtcctagcggtcccgcttttgtccagcctttgctgtctgccggtcaggcccccctgcttgctcccggacaggtgggggtatcacccgtccctagtccccagctgcccccggcctgcgcagcccctggaggccctgttattacggcattttattccggatcacctgctccaacaagcagcgctcccctcgctcagccgtcccaggccccaccaagtctcgtatacaccgtagccactagtacaaccccccccgccgcaaccatactccccaaaggccctcccgccccagccacagcgactccagcccccacgagcccctttccttccgccactgccggctcaatgacttacagcctcgtagctcccaaagcccaacggccaagccccaaggctccccagaaagtcaaagcagcgatagcctctatccctgtgggatcctttgaagccggcgcctccggcagacccggccccgccccccgacagcctctcgagccaggacctgtacgcgaaccaactgcccccgagtcagagctcgagggtcaacccacaccacccgccccccctcctttacctgagacttggacacctacggccagatcctcaccacccctcccaccacccgccgaagaaaggaccagcgcgaaaggacccgagaccatggcatcaaagtttccctcttcatctagcgattggcgagtgccggggcaaggactggaaaataggggcgaaccccctacacccccttctcccgctcctgctcccgccgtcgcgcctggcggctcctcagagtcttctagcgggagggccgcgggggatactccagaacggaaggaagccgcaggtacaggtaaaaaggtcaaggtgcgccctcccccactgaagaagacttttgactccgtcgacaatcgtgtgcttagtgaagttgactttgaggaacggttcgcagaactgccagaattcagacctgaagaagtgttgcctagtcctaccttacagtctcttgctacatctcctagagcaattttaggctcctacaggaaaaagcggaaaaattctactgacttggacagtgctccagaggaccctacctcccctaagagaaagatgagaaggcgaagtagctgttcatccgaaccaaataccccgaagagtgccaagtgtgagggagacatatttacctttgacagaactgggactgaggccgaagatgtgttgggggaactggaatatgacaaagtaccttattcctcactgagacggacattggatcagaggcgagccctggtgatgcagcttttccaggatcacgggttttttccatctgcccaggcaactgcagctttccaggctagatatgctgacatcttcccctcaaaagtgtgcctgcaacttaaaatccgggaagttcgccagaaaataatgcaggcagctactcctactgaacagccaccaggcgccgaagctcccttaccagtccctccaccgaccgggaccgccgcagcccccgcacccacaccaagcccagccggcggccctgatcctactagcccctcatctgactccggcaccgcacaggccgcccctccacttccccccccacctgagtccggcccgggccagccgggttgggaaggagctccgcaaccttctccgcctccaccaggcccctctacagctgctacaggtcgatag

SEQ ID NO: 248689 - RNA, 540 nt, synthetic construct
  misc_feature 1..540: note = Description of Artificial Sequence: Synthetic coding sequence
  source 1..540: mol_type = other RNA
atgcgggctctggtacttctgctgtccctcttcttgttaggcgggcaagcacaacacgtgtccgattggacctatagtgagggtgccttagatgaagctcactggccccagcactatcctgcttgtggaggtcagcgacagagcccaatcaatctgcagagaactaaagtacgttacaatccatcattaaagggactcaatatgactgggtacgaaacccaagctggtgaatttccaatggtcaataatggacacacagattggcaggccgaactcttcctcccttctctctcctccccctgcggggaaggcgcaaagcacaaaggtcagcgacagtggctctgttctccttctctcgattcctggtgggaggccattatagacggtggatccctgtgggcaacattagctgaatgcgggctaagggcggaagggcccgaagaaggcaggcatatggaggaaaaaagcccagcctctcagggggcgtgttccggcagtcgacttcccatatcaagaggaccgtgtaccttttttttatag

SEQ ID NO: 248690 - RNA, 942 nt, synthetic construct
  misc_feature 1..942: note = Description of Artificial Sequence: Synthetic coding sequence
  source 1..942: mol_type = other RNA
atgcgagcactcgttctcttgctttccctgtttctacttggaggacaggcgcagcatgtcagcgattggacatacagtgaaggtgcccttgacgaggcccactggccacaacactatccggcctgcgggggccagcggcagtctcccataaacctccagcgtactaaagttcgttacaaccccagtttgaaagggctcaacatgactggatatgaaacccaagccggcgagtttcccatggtaaacaatggccataccgtgcaaatttctcttccctctactatgagaatgaccgtggctgatggaacggtttatattgctcagcagatgcatttccattggggtggggcttcgagtgagataagtggttcggagcatacggtcgatggaatccggcacgttatcgaaatccatatagtccactataacagcaaatataaaagctacgacattgcccaggatgcacctgatggccttgccgtgctcgcagcttttgtggaagttaagaactaccctgaaaatacctactatagcaattttatttctcaccttgctaacattaaatatcccggacaacgtacaactctgacaggcctcgacgtacaagatatgttgcctcgcaatctgcagcactactacacctatcacggaagtctcaccactccgccatgcactgaaaacgttcattggtttgtacttgctgatttcgttaagctgagccgcactcaagtttggaaactagaaaacagcctcctcgaccataggaataaaacaatacacaatgactaccgacgaacacagcccctaaaccacagagtcgttgagtcgaatttccccaatcaggggaaaggtcacggagggcaccgaggtcgatcacagaacccacgggtccagccgaccagcacccgacacccacttgctctcggtagtctcgaagcttag

SEQ ID NO: 248691 - RNA, 927 nt, synthetic construct
  misc_feature 1..927: note = Description of Artificial Sequence: Synthetic coding sequence
  source 1..927: mol_type = other RNA
atgcgcgccttggttctactcctatccctgtttcttcttggcggccaagcccagcacgtgtctgactggacttacagcgaaggtgccctggatgaggcacattggccacagcattacccagcgtgtggcggccagcgtcagagccctatcaacctccagagaacaaaagtgaggtataatccatcactgaagggacttaacatgaccgggtacgaaacacaggccggcgaattccccatggtgaataacggacataccgtccaaatctcattgcctagcacaatgagaatgactgttgcagacgggacagtatatatcgcgcaacagatgcacttccactggggcggggcttcatccgaaattagcggctcagagcatacagttgatggaataaggcacgtcatagagatacacatcgtacactacaattctaagtacaagtcctacgacatcgcccaagacgctcctgatggcttggctgtcctggctgccttcgtggaggtcaagaattacccggaaaacacctattattccaacttcatatctcatctagctaatattaaatacccgggccaacgcactaccctgactggcttagatgtgcaggacatgctcccccggaatctccagcattactacacataccacggatctcttactacacctccttgcaccgaaaatgtccactggttcgtgttagcagactttgtgaaacttagtagaactcaggtctggaagctagaaaattccctgctggaccatagaaacaagaccatccataacgactacagacgcacgcaacctctcaaccaccgggtggtggaatccaacttcccaaatcaggaatacactctaggaagtgaattccaattctacctccacaaaatcgaggaaatacttgactacctccgccgcgccctgaactag

SEQ ID NO: 248692 - RNA, 987 nt, synthetic construct
  misc_feature 1..987: note = Description of Artificial Sequence: Synthetic coding sequence
  source 1..987: mol_type = other RNA
atgggcgcagctgcacggctttctgcaccaagagccctcgtgctgtgggctgccttaggcgccgccgcccacattggcccagcccccgacccagaggactggtggagttacaaggacaatctgcaggggaatttcgtgcccggccctccattctggggcttagtcaatgctgcttggtctctttgcgcggtcggaaaacgccagagtcccgttgatgtcgagttgaagagagtgctgtatgatccttttctgccaccgctccggctctccacgggcggcgagaaacttagaggaactttgtacaacactgggcgacatgtcagctttctgcctgccccccggcccgtagtcaacgttagtggcggccccttactgtatagtcatcgactgagcgaactgaggttactgtttggcgcaagggacggtgcagggtctgagcatcaaatcaaccaccagggtttttcggcagaagtacagctaattcactttaatcaggagctctacggaaatttctccgctgctagccgcgggcctaacggactcgcaatccttagtcttttcgtcaacgtggccagtactagtaatccatttctgagcaggctcctgaatagagatacaatcacaagaatcagttataaaaacgacgcttatttcctccaggatctcagtctcgaacttctgttccccgaatcctttggatttatcacttaccagggatcactgtcaactccaccgtgttccgaaaccgtgacatggattttgatcgatcgtgccttgaacattacgtccctgcagatgcactctcttagacttctctcacagaacccaccctcccagatctttcagtcccttagtgggaacagtcgaccattgcaacccttggcacatcgggccctccgcggcaatcgcgatcccagacatcctgaaagaaggtgcagaggacccaactataggctccacgtcgatggagtgccccatggtagatag

SEQ ID NO: 248693 - RNA, 1260 nt, synthetic construct
  misc_feature 1..1260: note = Description of Artificial Sequence: Synthetic coding sequence
  source 1..1260: mol_type = other RNA
atgagggggctgcttgtactgagtgtcttgctgggcgccgtgtttgggaaggaagactttgtcgggcaccaggtactgcgaatttccgtcgccgacgaagcacaggtgcaaaaagtcaaagaattagaagacttggaacatctgcaattagacttttggagaggccccgcccacccaggctctcccatagacgtccgggttccctttccatccattcaggctgttaaaatcttcctagagtcccacggcatttcatatgaaaccatgatcgaagatgtccagagtctgttggacgaggagcaggagcagatgtttgcctttaggagccgggcccgctctacagatacattcaattacgcaacttaccacacgttggaggagatctacgactttctggacctgctagttgccgaaaacccacacctggtcagcaaaattcagatcggcaacacctacgaaggccggccaatttacgtgctgaaattttccacaggcggttctaaacgaccagctatttggatcgataccggaattcattctcgcgagtgggtgactcaggcctcaggagtttggttcgctaagaaaatcacacaggactatggccaggacgcggctttcacagctatcctcgacactctggatatattcttagaaatcgtgactaatcctgacggcttcgctttcacacacagcactaatcgaatgtggagaaaaacacgatcacacactgcaggctctctctgcattggcgtggaccctaaccgtaactgggacgctgggtttgggctctccggcgcatcgtcgaatccctgcagtgaaacttatcatgggaaattcgcaaattctgaagtggaagtgaagagtatcgttgacttcgtgaaagaccatgggaatatcaaagcctttatctccatccacagttatagccaactgctgatgtatccttacggctacaaaaccgaacctgtccccgaccaagatgaattggaccaactctctaaggccgcagtcaccgcacttgcatccctatacggcactaagttcaactacggctccattattaaggccatttatcaggcatcaggatcaactatcgattggacatactcccaaggtataaagtactccttcacctttgagttaagagacacaggaaggtacggctttctgctccccgcttcccaaataattcctacagcgaaagaaacctggctagccctgctgacaattatggaacacaccctaaaccatccctattag

SEQ ID NO: 248694 - RNA, 1098 nt, synthetic construct
  misc_feature 1..1098: note = Description of Artificial Sequence: Synthetic coding sequence
  source 1..1098: mol_type = other RNA
atggaccgagcagcccttctgggactggcaaggctttgcgccctttgggccgcacttctcgtgctgttcccatatggcgctcaggggaattggatgtggctcggaattgccagcttcggtgtgccagagaaacttggatgtgcgaacttgccgctgaattcaaggcaaaaggaactttgtaagcggaaaccttatctattgcctagcattcgtgagggggcccgactagggatccaggagtgcggatctcagtttagacatgagagatggaattgcatgatcactgccgcagcaactactgcacccatgggagcatcacctttattcggctacgagctgagctctggaacaaaggagaccgcctttatatacgctgtgatggcagctggactggtgcactctgttactcgaagctgctctgccggcaacatgacagaatgctcttgcgacacgacactacaaaacggaggttcagcctctgaaggatggcattggggtgggtgctcggacgatgtgcagtacgggatgtggttcagccgtaaattcttagattttcctatcgggaacaccaccggaaaggagaacaaggtcctccttgccatgaatctccataacaacgaagccggccgacaagccgttgccaaacttatgagcgtagactgtaggtgtcacggtgttagtgggtcctgtgccgtgaagacttgttggaagactatgagcagtttcgagaagatcggtcacctgctgaaagacaagtatgaaaatagcatccagatctcggacaaaactaagagaaagatgcggcgaagagaaaaggaccagcggaaaatccccatccacaaagacgatctgctgtatgttaacaaatctccgaattactgcgtcgaggataagaaattggggatccctggaacgcaaggtcgcgaatgcaataggacaagcgaaggggcggacggttgcaatctcctgtgctgtgggaggggctacaacactcacgttgttcggcatgtcgagaggtgtgaatgtaaatttatctggtgctgttacgtacgatgccgccggtgtgagagcatgaccgacgtgcacacctgtaagtag

SEQ ID NO: 248695 - RNA, 1581 nt, synthetic construct
  misc_feature 1..1581: note = Description of Artificial Sequence: Synthetic coding sequence
  source 1..1581: mol_type = other RNA
atgggacacctttccgcgcctctccatcgagttcgggtgccttggcagggactactgcttacagcttcactcctaacattctggaacccacccacaaccgctcaactcactacagaatcaatgccatttaacgtcgcggaaggcaaggaagttctgctgctggtacataatctgccccaacagttattcggctacagctggtacaagggcgaaagagttgatgggaaccggcaaattgtaggctacgcaatcggaacacagcaagccacccctggtcctgcaaattccggtcgggaaacgatctaccctaatgccagtctcctcatccagaacgtcacacagaacgacacaggattctataccttgcaggttatcaaatcagacttagtcaatgaagaggcaacaggtcagtttcacgtctatccagagctccccaagcccagcatttcgtcaaataactccaaccctgtggaagacaaagacgcggttgcattcacctgtgaacccgaaacccaggataccacttatctttggtggataaacaatcagagcctacctgtgagcccaagactacaattaagcaatggtaatcggacacttacactgcttagcgtcacccgaaacgacacagggccttacgaatgtgagattcaaaacccagtgagcgccaatagaagtgaccctgtaacccttaacgtcacgtacggtccggatacgcctactataagccccagcgatacctactaccgccccggagccaacctttctctgtcttgctacgctgcttccaatccaccggcccagtactcctggctcatcaacggaacttttcagcaaagcacacaagaactgtttatccctaatatcactgtcaacaattctggatcctacacatgtcacgctaacaatagtgtaacgggctgcaataggaccaccgtaaagaccataattgtgaccgaactgtcgccagtagtggcaaaaccccagataaaggctagtaaaaccaccgtgaccggagacaaagattccgttaacctcacctgctccacaaatgacacagggatttcaatcagatggttcttcaagaaccagagcctcccctcgtccgaacggatgaagctgtcccaaggaaacacaaccctgtctatcaatccagtgaaacgcgaggatgccggcacatactggtgcgaggtgtttaatcctatttctaagaaccagagcgacccaataatgctgaacgtaaattacaacgcactcccacaagagaatgggctgtcacccggggccatcgcaggcatcgtcattggtgttgtcgctctcgttgccctaatagcagtcgcactggcctgcttcttgcatttcggcaagaccggacgcgcctctgatcagcgcgacctcaccgaacacaaaccatccgtctctaaccacacccaggaccattctaacgatccaccaaacaaaatgaatgaagtgacatacagcaccctaaattttgaagcacagcaaccgacacagcctacatctgcctccccctccctgaccgccaccgaaatcatctacagcgaagtaaagaaacagtag

SEQ ID NO: 248696 - RNA, 2115 nt, synthetic construct
  misc_feature 1..2115: note = Description of Artificial Sequence: Synthetic coding sequence
  source 1..2115: mol_type = other RNA
atggtccctgatacagcctgtgtcctactgttaactctggccgccttaggtgcatctggccaaggtcagtctccactgggcagcgatctgggtccccaaatgctcagagaactgcaagagactaatgccgccctacaggacgtacgagagcttctacgccagcaagtgcgcgaaattactttcctgaaaaacacagtgatggaatgcgacgcttgtggaatgcaacaatcagtgcggacagggctcccatccgttagaccactcctgcattgcgcacctggtttctgctttccaggggtagcatgcattcagactgaaagcggagctcggtgcgggccttgtcctgcaggattcaccggcaacgggtcacattgcaccgatgttaatgaatgcgagaccggtcagcataactgtgtccctaattcggtctgtattaacacacgaggaagcttccagtgcggtccttgccagcccggttttgtgggagatcaggcaagtggttgccaacgacgcgctcagagattttgtcctgacggctccccatccgagtgccacgaacatgccgattgcgttctcgaacgagatggatcccgaagctgcgtatgtgcggtgggttgggccgggaatggtatcttgtgtggaagagacactgacctcgacgggttccctgatgaaaagttgcgatgtcccgagcggcagtgtcgtaaagataattgtgtgaccgttccgaacagtgggcaggaggacgtggatcgcgatggtataggagatgcctgtgaccctgacgccgacggcgatggcgtgcccaacgagaaggacaattgccccctagtgcggaacccagaccaaagaaacacagacgaagacaaatggggggacgcttgcgataattgtagatcacagaagaatgatgaccagaaagacaccgaccaggacggacggggagatgcttgtgacgacgatatagacggagacagaatccgcaaccaggccgataactgccctcgagtgccaaactctgatcagaaagactctgatggcgatggtattggagacgcttgtgataactgcccccagaaaagcaatcctgaccaggcggacgtggatcatgattttgtgggcgacgcatgtgacagcgaccaagatcaggatggcgacgggcaccaggactccagagacaattgcccaacagttcctaactcagcacaggaagacagtgaccatgatggacagggagatgcttgcgacgatgatgatgacaacgatggagtgcctgactcccgagacaactgtagactcgtgcctaaccctggccaagaggacgctgaccgagacggggtcggcgacgtgtgccaagacgactttgacgcggataaggtggtcgacaagatagacgtgtgtccagagaacgccgaagtgactttgaccgacttccgagccttccagaccgttgtactggatcccgaaggtgatgcacagatcgatcccaactgggtagtcctgaaccagggcagggaaatcgtgcagacaatgaattctgacccaggactggccgtagggtatactgcgtttaacggggtggacttcgaaggcaccttccatgttaataccgtgaccgacgacgactacgccgggtttatctttggttaccaagactcatcgtccttttacgtggttatgtggaaacagatggagcagacatattggcaggcgaatcctttccgcgccgttgctgaaccaggcatccagctcaaggcagtaaagagctcaactggacccggagagcaacttaggaacgcattgtggcatacaggagataccgaaagccaagtgcgcctgctatggaaagatcctaggaacgtgggctggaaggacaagaagagctatcgttggtttctgcagcaccggccccaggttggctacattagggttagattttacgaaggcccagaactggttgccgattcaaacgttgtgctggacacaactatgagagggggaagactgggtgtgttttgcttcagccaggagaatatcatttgggcgaatttacgttaccgctgcaacgacactatccccgaggactacgaaacccaccagctgagacaggcctag

SEQ ID NO: 248697 - RNA, 2235 nt, synthetic construct
  misc_feature 1..2235: note = Description of Artificial Sequence: Synthetic coding sequence
  source 1..2235: mol_type = other RNA
atggtccccgacacagcctgcgtcctcctgcttacccttgccgctctcggcgcctccggacagggacaaagtccgctgggatccgacctgggcccacagatgctgagagagcttcaggaaaccaacgccgctctccaagacgtgcgggaattgctgaggcaacaggtacgggaaattacctttctcaaaaacaccgttatggaatgtgatgcctgtgggatgcaacagtctgttagaaccggcctgccaagtgttcggcccctgctgcattgcgctcctggcttctgttttcccggcccttgccccgcaggatttactggcaacggctctcattgtacggatgtcaacgaatgcaatgcccacccatgcttcccaagagtccgttgcataaacactagccctgggttccggtgcgaagcatgtcccccaggctactccggacccacacaccagggggttggtcttgctttcgccaaggccaataaacaggtctgcacagatatcaacgagtgcgaaacaggtcagcacaactgtgtcccaaattccgtctgcataaacacgcgcggctcctttcagtgcggcccttgtcagccaggattcgtgggcgatcaggcatctggatgccagagaagagcccagcgattctgtcctgacgggtctcccagcgaatgtcatgaacacgcggattgcgtcctggaaagagacggatcaagaagttgcgtctgtgcagtgggatgggcggggaacggcattttatgcggccgagatacagacctcgacgggtttccagacgagaaacttaggtgtccagaaaggcagtgtaggaaagacaactgtgtgaccgtgcctaactcaggacaggaggacgtggatagagatggcatcggtgacgcatgcgatccggacgctgacggagacggtgttccaaacgagaaagacaactgcccgttagtacgcaaccccgatcaacgaaacactgacgaagacaaatggggggatgcttgcgataattgtagaagccaaaagaacgacgatcagaaagatactgaccaggatggtaggggtgatgcctgtgacgacgatatagatggggatagaatcagaaaccaagccgataactgcccgcgggtgccgaattcagaccagaaggatagcgatggggacggaattggagatgcttgtgacaactgccctcagaagagtaaccctgaccaggcggatgttgaccatgactttgtgggcgacgcctgtgatagcgaccaggaccaggacggcgatggacaccaggattccagagacaactgtcccacggtaccaaattccgcacaggaggattcggatcatgatggacaaggagatgcatgcgacgacgacgatgacaacgatggggttcctgactcacgcgataactgccgactagtgcccaaccctggacaggaggacgcggaccgagacggcgtcggcgatgtctgtcaagatgactttgacgccgacaaagtggtggataaaatcgatgtgtgcccagaaaacgccgaggtgacgctgaccgattttcgcgcatttcagacagtcgtcttagacccggagggtgacgcccaaattgacccaaattgggttgttctgaaccagggaagagagatcgtccagaccatgaattcagacccaggactcgcagtcggatacacagcctttaatggagtagactttgagggcacctttcacgtaaacaccgtgacagacgacgattacgcgggctttatcttcggctatcaggattcctccagcttctatgtggtaatgtggaagcagatggagcagacatattggcaggcgaacccttttagggcagtggcagagccaggaattcagcttaaagcagtcaagtctagcaccggtccaggcgagcaactaagaaacgccctatggcacacaggagatactgaatcgcaagttagattgctatggaaagatccacgaaacgtcggctggaaagataaaaagtcttaccgttggttcctccaacacagaccccaggtgggttacatacgagtgaggttttacgagggccctgaacttgttgcagactctaacgtggtactggacaccaccatgcgcgggggaagattaggcgtgttctgtttttctcaagaaaatattatatgggccaacctcagatacaggtgcaatgatactatcccagaagattacgagactcatcagttacggcaagcctag

SEQ ID NO: 248698 - RNA, 387 nt, synthetic construct
  misc_feature 1..387: note = Description of Artificial Sequence: Synthetic coding sequence
  source 1..387: mol_type = other RNA
atgggcatacagggtggttccgtactctttggcctcctcctcgtgctggcggttttttgccactccggccattctctgcagtgctataattgtcccaacccaaccgctgactgtaaaacggctgtaaactgttcctctgattttgatgcatgcttgattaccaaggcaggactgcaagtctacaataaatgctggaagttcgaacattgtaactttaacgatgtcacaacccggctgcgggaaaatgagctaacctattattgttgtaaaaaagacttatgtaactttaacgagcagctggaaaatggaggcacatcactctctgagaaaactgtcctgctgctggtcacaccttttcttgcagccgcatggtctcttcatccatag

SEQ ID NO: 248699 - RNA, 387 nt, synthetic construct
  misc_feature 1..387: note = Description of Artificial Sequence: Synthetic coding sequence
  source 1..387: mol_type = other RNA
atgggtattcagggcggatccgtgttattcggcttgcttttagttttagccgtattttgccactccggccattcgcttcagtgttacaattgtcccaaccccaccgcagactgcaagaccgccgtcaactgctccagcgacttcgacgcttgtctgatcaccaaggccggactgcaagtatataataaatgctggaaattcgaacactgcaattttaacgacgtgactactaggctgcgggagaatgagctgacctactattgctgcaagaaagatctgtgtaacttcaacgagcagctggagaacggaggcactagcttgtccgagaaaaccgttctgttactcgttactccatttcttgctgccgcatggtccctacatccctag

SEQ ID NO: 248700 - RNA, 387 nt, synthetic construct
  misc_feature 1..387: note = Description of Artificial Sequence: Synthetic coding sequence
  source 1..387: mol_type = other RNA
atgggcatacagggaggaagtgtacttttcggcctgttgttagtcctggctgtgttttgccattctggccacagtctacagtgctacaattgtccaaaccccactgctgactgcaaaacagccgtgaactgctctagtgacttcgatgcatgtttaattaccaaggcaggacttcaagtgtacaataaatgctggaaatttgaacactgcaatttcaatgacgtcaccacacgccttcgcgagaacgaactcacgtattattgctgtaagaaagatctttgtaattttaatgaacaactggaaaatggcggtacctccctttccgaaaaaaccgttttgcttcttgttacacccttccttgctgcggcatggagcctgcatccctag

SEQ ID NO: 248701 - RNA, 387 nt, synthetic construct
  misc_feature 1..387: note = Description of Artificial Sequence: Synthetic coding sequence
  source 1..387: mol_type = other RNA
atgggaattcaaggcggatccgtcttgtttggcctgctgcttgtgctggcagtgttttgccattctgggcactccctgcagtgctataattgcccaaaccctactgcagattgtaagactgctgtaaactgttcttccgattttgatgcttgccttatcaccaaagctggcctacaggtgtacaataaatgctggaagtttgaacattgcaattttaatgacgttacaacccgcctcagggagaatgagctgacctactactgctgcaaaaaggacttgtgtaacttcaatgaacaactggaaaatggcggcacttcactctccgaaaaaacagtccttctgcttgtaaccccctttctggcggctgcttggtcactccatccttag

SEQ ID NO: 248702 - RNA, 387 nt, synthetic construct
  misc_feature 1..387: note = Description of Artificial Sequence: Synthetic coding sequence
  source 1..387: mol_type = other RNA
atgggtattcaaggaggtagtgtgctcttcgggctgttgctagtattggccgttttctgtcactctggacactcattacagtgctataactgtccaaacccgactgctgactgtaaaaccgctgtgaattgcagttcggatttcgatgcttgtcttattacaaaagcaggactccaagtctacaataagtgctggaaatttgaacattgtaacttcaacgatgttacaactcgactgagagaaaatgaactgacctattactgctgcaagaaagatctatgtaatttcaatgaacagctcgaaaacggcggtacatcactcagcgaaaaaactgttctgcttcttgtaacaccattcctggcagctgcatggagtcttcacccatag

SEQ ID NO: 248703 - RNA, 387 nt, synthetic construct
  misc_feature 1..387: note = Description of Artificial Sequence: Synthetic coding sequence
  source 1..387: mol_type = other RNA
atgggcatacaaggtggatctgtcctctttggcctgcttctcgtccttgccgttttttgccactcaggtcacagcctccagtgctataattgccccaaccccacggctgattgtaaaaccgctgttaactgttcaagcgattttgacgcctgtcttattacgaaagctggtctgcaagtgtacaataagtgctggaaatttgagcattgtaattttaacgatgtgactaccaggcttagagaaaatgaattaacctattactgttgtaaaaaggacctttgcaattttaatgaacagcttgagaacggcggaacctctctaagtgaaaaaactgtgctcctccttgtcacccctttcctggcagctgcttggagtttacatccctag

SEQ ID NO: 248704 - RNA, 387 nt, synthetic construct
  misc_feature 1..387: note = Description of Artificial Sequence: Synthetic coding sequence
  source 1..387: mol_type = other RNA
atggggatccaaggaggctctgtgttgtttggactgctgctcgtgttggccgttttttgccattctggacattctctgcaatgctataactgtcccaatcccaccgccgattgcaagaccgccgtgaattgtagctcagactttgacgcttgtctcatcacgaaagccgggctgcaggtatacaataagtgctggaaatttgaacactgcaatttcaatgacgtgactactagacttcgggaaaatgagttgacctactactgctgtaagaaggatttgtgtaacttcaacgagcaactcgaaaatggaggtacgtccctttcagaaaaaaccgtcctattactggttaccccgttccttgctgctgcttggtccttgcatccctag

SEQ ID NO: 248705 - RNA, 387 nt, synthetic construct
  misc_feature 1..387: note = Description of Artificial Sequence: Synthetic coding sequence
  source 1..387: mol_type = other RNA
atgggcattcagggcggtagtgttttattcggactgttgttagtgctggccgttttttgccactccggacattccctgcagtgctataactgcccaaatccaactgccgattgcaagacagctgttaattgttcatccgatttcgatgcatgccttattaccaaagctggtctgcaggtttacaataaatgctggaagttcgagcattgtaacttcaacgacgtcacgacccgattgcgcgagaacgagcttacctattactgttgtaaaaaggatttgtgcaatttcaatgaacaactcgaaaatggaggaacaagcctcagtgaaaaaacagtactcctgctcgttaccccctttcttgccgctgcctggtcattgcatccgtag

SEQ ID NO: 248706 - RNA, 387 nt, synthetic construct
  misc_feature 1..387: note = Description of Artificial Sequence: Synthetic coding sequence
  source 1..387: mol_type = other RNA
atgggcatccagggcggcagtgtactcttcgggctgctgcttgtgttggccgttttctgccattctggacattctctgcaatgctataattgtcccaatccaaccgccgactgtaagaccgccgtaaactgctcttcggacttcgacgcatgtctcatcacaaaggcaggactgcaggtgtataataaatgctggaaattcgaacactgtaacttcaacgacgtgacaacacgactgcgcgaaaatgaactcacatactactgctgtaagaaggatctatgtaacttcaacgagcaattggaaaacggcggaacatccctttcggaaaagactgtccttttacttgttacaccctttctcgctgctgcatggagccttcacccctag

SEQ ID NO: 248707 - RNA, 891 nt, synthetic construct
  misc_feature 1..891: note = Description of Artificial Sequence: Synthetic coding sequence
  source 1..891: mol_type = other RNA
atgcacagacgcaggtcgcggagttgccgagaagatcagaaacctgtaatggacgaccaacgagacctcatttccaataatgaacagctaccaatgctaggaagaagaccaggtgctccagaatcaaaatgcagccggggcgccctgtatactggattcagcatcctcgtgacattgctgcttgcaggtcaggctactaccgcttatttcttgtatcagcagcagggccgattggacaagctcacagtcacgtcccaaaatctgcaattggagaatctcagaatgaagctgcccaaacctcccaaaccagtgtctaagatgagaatggccacaccactgctgatgcaggccctgcccatgggtgccctcccccaaggtccaatgcagaacgccactaagtacgggaatatgacggaagatcacgtgatgcacctactccaaaatgcggaccctctcaaagtctaccccccactcaaaggcagcttccctgaaaatctgcggcacctcaagaacactatggaaaccatagactggaaggtttttgaaagttggatgcaccactggttattgttcgaaatgtcgcgccactcgctcgaacagaagccaaccgacgccccaccaaaggttctgacaaagtgccaagaagaagtctcgcatatccctgccgttcaccctggctcttttcgcccaaaatgtgacgaaaatggaaactacttgccgcttcagtgttatggcagtatcggctactgttggtgtgtatttcctaacggaaccgaggttcccaatactcgaagccgggggcaccataattgctcagagtccctggaattggaggatccatctagcggtctcggcgtaactaagcaggacttgggcccagtccccatgtag

SEQ ID NO: 248708 - RNA, 690 nt, synthetic construct
  misc_feature 1..690: note = Description of Artificial Sequence: Synthetic coding sequence
  source 1..690: mol_type = other RNA
atggccaggctggctctgtccccagttccatctcactggatggtcgctcttctgctgttgctttcagccgaaccagtgcccgccgcacgctctgaggatagatacaggaaccccaagggcagcgcttgcagccgcatttggcaatcacctagattcattgcgcggaagaggggtttcactgtcaaaatgcattgttacatgaacagcgcgtccggaaacgtttcgtggttatggaaacaggaaatggatgagaatccccaacaactaaaactcgaaaaaggtcgaatggaagagagtcaaaatgaaagcctcgcaacattgacgatacaaggtatacggttcgaagataacggaatctacttttgccagcagaaatgcaataacacatctgaagtttatcaaggatgtggcacagaattacgggtgatgggtttctcaacacttgcacaactgaagcagaggaatacactgaaagacggaatcatcatgattcagaccctgctgatcatactctttatcatcgtgcccattttccttctgctggataaggacgattctaaggctggaatggaggaggaccacacgtacgagggacttgatattgatcaaacagcaacctatgaagacatagtaacgcttagaacaggagaggtaaaatggagtgtgggggaacatccaggacaggaatag

SEQ ID NO: 248709 - RNA, 687 nt, synthetic construct
  misc_feature 1..687: note = Description of Artificial Sequence: Synthetic coding sequence
  source 1..687: mol_type = other RNA
atgcccgtaaaaggtgggaccaaatgcattaagtatcttttatttggattcaattttattttctggctcgccggtatcgccgtcctcgccattggcctgtggttacgatttgactcccagactaagagcatctttgaacaggaaacaaacaataacaatagcagtttctacaccggtgtgtacatcttaataggagcgggcgccttgatgatgctcgtgggttttcttggctgttgtggggccgtgcaggaaagccaatgcatgctcggcttattttttggctttttacttgtgatattcgcaattgaaatcgctgcagctatctgggggtactctcacaaggacgaggtgattaaggaggtgcaggaattttacaaagacacatacaacaagttgaagactaaggacgaacctcaacgcgaaactctcaaagctatccactacgccctcaattgttgtggcctcgcaggtggagtagaacaatttatctccgatatttgtcccaagaaagacgtactcgagacgttcactgttaaaagctgcccggacgcaattaaagaagtgtttgacaataaatttcacatcattggggcagttggtattggtattgctgttgtaatgatatttggcatgatcttttctatgatcttatgttgcgccatccgaaggaacagggaaatggtttag

SEQ ID NO: 248710 - RNA, 2475 nt, synthetic construct
  misc_feature 1..2475: note = Description of Artificial Sequence: Synthetic coding sequence
  source 1..2475: mol_type = other RNA
atgactgtcctacaagaacccgtccaagccgctatatggcaagcactgaatcattatgcttacagagacgccgtgttcctcgcggaaaggttatatgcagaggtacatagcgaagaggccttattcctactcgctacctgttattacaggtctggcaaggcctataaggcatatagactcctgaaaggtcattcctgtacaaccccacagtgcaaatacctcctcgccaaatgctgtgtcgatctgtctaagcttgctgaaggagaacagattctctctggcggcgtctttaacaaacaaaagagccacgacgacattgtaaccgagttcggagactctgcctgtttcactctgtcactgttaggacacgtctactgtaagacggaccgcctcgctaagggcagcgaatgttaccaaaaaagcttgtctcttaaccctttcctgtggtctcccttcgagtccctctgcgagatcggtgagaaacctgatccggatcaaactttcaaattcacttccctccaaaattttagtaattgtctccccaatagttgcactacacaggtcccaaatcattccctcagtcatcgccagcccgaaactgtgctcacagaaactccacaggacaccattgagctcaataggctgaacttagagagctccaactccaagtattccctcaacactgattcctccgtgtcctatatcgattccgctgttatcagccctgacaccgtcccgttgggcactggtacatcaattctttctaaacaggtacagaataagcccaagacaggccgctccctgctcggaggccctgctgcactgtcccctctgactccctcattcggaatcctcccactggaaaccccaagccccggcgacggaagctacttgcagaactatactaatacccctcctgtaattgatgtccctagcaccggcgccccctctaagaagagcgttgccaggattggccaaactgggaccaaatcagtcttttcgcagtctgggaattccagagaggtgacaccaattcttgcccagacacagtcatcaggaccccaaacatcgacgacaccccaggtactttcacccacaattacatctccgcccaacgccctgccacgccgaagcagcagacttttcacaagtgattcttctaccaccaaagaaaacagtaaaaaactgaaaatgaaatttcctcccaagatacccaatagaaagacgaagtcaaagacaaacaaaggaggtattactcaacccaacatcaacgattccctggaaatcaccaagcttgacagcagtataatatccgaaggtaaaatatcaactattacgcctcagattcaggcttttaaccttcagaaagcagccgctgagggactgatgtcccttctgcgagagatgggaaaaggttaccttgccctctgtagctacaattgtaaagaagccataaacatcttgtcccacctaccatcacatcattataatacaggatgggtattatgccaaatcggacgggcctattttgaactcagtgagtacatgcaggccgagcgtatcttttcagaggtaagacgaattgagaactaccgcgtcgaaggcatggaaatctattctacaacactgtggcatctacaaaaagacgtggcgctgagcgtcctgtcaaaagacctaactgatatggacaaaaatagcccagaagcatggtgcgctgccggaaactgtttctccctgcagcgggagcacgatatagccattaagtttttccaacgagcgattcaagtggaccccaactacgcctacgcttacaccctcctgggtcacgagttcgtcctgacagaagagcttgacaaagcgctcgcctgcttcagaaacgccattagagtcaatccgcgccattataacgcttggtatggcctggggatgatctattataaacaagagaaattctcccttgctgagatgcacttccaaaaggctttggatatcaaccctcaatcgagcgtcttactgtgccatatcggcgtcgtgcaacacgccctaaaaaaatccgaaaaagcacttgacaccctaaataaagccattgtaattgaccccaaaaatccactctgtaaatttcaccgcgcttccgttttgtttgctaacgagaaatacaaaagtgcattgcaggaattagaagagctgaagcagatcgtgcctaaagagtcactagtatacttcctgataggaaaagtgtacaagaaactcggacagacccatcttgcgctcatgaacttctcctgggctatggacctggaccctaaaggtgctaacaaccagattaaggaagctatagacaagagatacttgccggacgatgaggagcctataacacaagaggagcagattatggggacagacgaaagccaagagagtagtatgaccgacgcagacgacactcaactccacgccgcagaatcagatgaattttag

SEQ ID NO: 248711 - RNA, 342 nt, synthetic construct
  misc_feature 1..342: note = Description of Artificial Sequence: Synthetic coding sequence
  source 1..342: mol_type = other RNA
atgaaagtttccgtcgctgccctttcttgtctcatgctggtcgccgttctgggctcccaggcacagtttatcaacgacgctgagaccgagctgatgatgagcaaactgcctctggaaaaccccgtggtgctaaactccttccattttgctgccgactgctgcacctcctatatttcccaatcaattccttgttctctgatgaaaagttacttcgaaacgagttccgagtgctccaagccaggagttatcttcctcacaaaaaaaggtagacaggtctgtgcaaaacccagcggccccggggtccaggattgcatgaagaaacttaaaccctactcaatttag

SEQ ID NO: 248712 - RNA, 186 nt, synthetic construct; identical to SEQ ID NO: 248106
  misc_feature 1..186: note = Description of Artificial Sequence: Synthetic coding sequence
  source 1..186: mol_type = other RNA

SEQ ID NO: 248713 - RNA, 342 nt, synthetic construct
  misc_feature 1..342: note = Description of Artificial Sequence: Synthetic coding sequence
  source 1..342: mol_type = other RNA
atgaaggtatctgtggctgctctctcctgccttatgctcgtcgcggtgctaggctcccaggctcagttcatcaatgatgccgaaaccgaactaatgatgtccaaattaccactcgaaaacccagtcgtgttaaattcttttcatttcgctgccgactgttgcacatcttatatctcacagtctatcccctgctcactcatgaagtcctacttcgagacctcgtctgagtgtagtaagccaggggttattttcctgacgaagaagggacgtcaagtgtgtgctaaaccatcagggcccggcgtccaagattgcatgaaaaagttaaagccctatagcatatag

SEQ ID NO: 248714 - RNA, 342 nt, synthetic construct
  misc_feature 1..342: note = Description of Artificial Sequence: Synthetic coding sequence
  source 1..342: mol_type = other RNA
atgaaggtatcagtggccgctctaagttgccttatgctagtcgcggtcctcggcagccaggcccagttcatcaacgacgcagaaacagagcttatgatgagtaagctgccactggagaaccccgttgtcctaaattcgttccacttcgccgcagattgctgtacttcctacatctcgcagtctatcccctgttcacttatgaaaagctacttcgaaacctcttctgaatgctctaagccaggagtcatctttctcacaaagaaggggagacaagtatgcgccaagccttccggtccgggcgtccaagattgcatgaagaaactgaagccgtactccatttag

SEQ ID NO: 248715 - RNA, 270 nt, synthetic construct; identical to SEQ ID NO: 248109
  misc_feature 1..270: note = Description of Artificial Sequence: Synthetic coding sequence
  source 1..270: mol_type = other RNA

SEQ ID NO: 248716 - RNA, 285 nt, synthetic construct; identical to SEQ ID NO: 248110
  misc_feature 1..285: note = Description of Artificial Sequence: Synthetic coding sequence
  source 1..285: mol_type = other RNA

SEQ ID NO: 248717 - RNA, 384 nt, synthetic construct
  misc_feature 1..384: note = Description of Artificial Sequence: Synthetic coding sequence
  source 1..384: mol_type = other RNA
atgcagcagcgcggactcgccatcgtcgctctcgcagtatgtgctgccttacacgctagcgaagcaatcctcccaattgcgtcgtcttgctgtacagaagtttctcaccacatttcgagaagactccttgagagagtgaatatgtgcaggatacagagggccgacggagattgcgatcttgccgcggtgatcctccatgtcaagcgaaggagaatatgcgtttccccccataaccacacagtgaaacagtggatgaaggtccaggcggcaaagaagaacgggaaaggtaatgtgtgccatagaaagaagcaccacggaaagaggaatagtaatcgagctcaccagggaaaacatgagacgtacggacacaaaacaccatactag

SEQ ID NO: 248718 - RNA, 384 nt, synthetic construct
  misc_feature 1..384: note = Description of Artificial Sequence: Synthetic coding sequence
  source 1..384: mol_type = other RNA
atgcagcagcggggactagctatagtcgcacttgccgtgtgtgcagccctccatgcttccgaagctatacttcccatagccagtagctgttgcactgaggtctcccaccatatctcaagaaggctgttagagagggtcaatatgtgtcgaattcagagagcagacggggattgtgatctcgccgccgtaattttacacgtaaaacgtcgaagaatctgcgtatcacctcataatcatacagttaagcagtggatgaaagtacaagccgcaaagaagaacggtaaaggcaacgtctgtcatagaaaaaagcaccatggcaaaagaaactcaaacagagcccatcaaggaaagcacgagacatacggccacaagaccccttactag

SEQ ID NO: 248719 - RNA, 243 nt, synthetic construct; identical to SEQ ID NO: 248113
  misc_feature 1..243: note = Description of Artificial Sequence: Synthetic coding sequence
  source 1..243: mol_type = other RNA

SEQ ID NO: 248720 - RNA, 354 nt, synthetic construct
  misc_feature 1..354: note = Description of Artificial Sequence: Synthetic coding sequence
  source 1..354: mol_type = other RNA
atgcaacagagagggctagcaattgtggctctcgccgtttgcgccgcactacacgcgtccgaagccatcctgccaatcgcctcctcctgttgtacagaagtatctcatcatatctcccgaaggctgcttgagagagtgaatatgtgcagaatccaacgcgccgatggtgactgtgatctcgcggccgtgatgctggaatgtagcgatatgatctccgcccattataatcttcacctcccaggttccaatgactctccgacctccgccttccaggtggccggaattaccgctttcatgagctctgccgaagaatccgtttcagctcgaaccaccatactcctctcttctgggtag

SEQ ID NO: 248721 - RNA, 1194 nt, synthetic construct
  misc_feature 1..1194: note = Description of Artificial Sequence: Synthetic coding sequence
  source 1..1194: mol_type = other RNA
atggcccccatatcattatcctggctgcttagactggctacattttgccatcttaccgttcttttagccggccaacatcatggggtgacaaaatgcaatattacctgttccaagatgacatcgaagatacccgtcgcactactcatccattaccagcagaatcaggccagctgcggtaagcgagcgattatcctggagacccgacagcataggctcttctgtgcagaccccaaggagcagtgggtgaaagatgccatgcaacacctagacagacaggctgccgccttgactcggaatggagggacattcgaaaaacagataggtgaagtgaagccaaggaccacccccgccgctggcggaatggacgagagtgtggtactggaaccggaagcgaccggggaatcttccagtctggaaccaacccctagctcccaagaggcccagagagctctcggaactagtcctgagttgcctactggagtgacaggatcaagtggcacccggctgcctccaacccccaaagcccaggatggcgggcctgtgggtacagaactcttcagagtgccccccgtctccaccgccgccacatggcaatcatccgctccccatcagccaggacctagtctttgggccgaagctaaaacttccgaagcaccaagcacccaagacccgtcgactcaggcttctaccgcctccagcccagcgcccgaggaaaatgctccatccgaaggtcagagagtctggggacagggacagtctcctagacccgaaaatagcttggagagagaagagatgggtcctgtgcctgctcatactgatgctttccaggactggggccccggtagcatggcacacgtttctgtggtgcctgtctcgagcgaagggactccatctagagaacctgtcgctagcggttcttggacaccaaaagctgaagaacccatccacgccactatggatccccagcggctcggagttctgattactcccgtgcctgacgcccaagccgcgactcgcaggcaggctgtcgggcttctagcatttctgggtctgctgttctgtctcggtgtagcaatgttcacctaccagtcgctccaagggtgccctagaaaaatggcaggcgaaatggctgaaggtcttcgatacatcccacgctcctgtggttcaaatagttacgtcctggttcccgtgtag

SEQ ID NO: 248722 - RNA, 285 nt, synthetic construct; identical to SEQ ID NO: 248116
  misc_feature 1..285: note = Description of Artificial Sequence: Synthetic coding sequence
  source 1..285: mol_type = other RNA

SEQ ID NO: 248723 - RNA, 285 nt, synthetic construct; identical to SEQ ID NO: 248117
  misc_feature 1..285: note = Description of Artificial Sequence: Synthetic coding sequence
  source 1..285: mol_type = other RNA

SEQ ID NO: 248724 - RNA, 1431 nt, synthetic construct
  misc_feature 1..1431: note = Description of Artificial Sequence: Synthetic coding sequence
  source 1..1431: mol_type = other RNA
atgactaagctcattctcttgacaggactggtcctgatactgaatctccagctcggcagtgcataccaactaacctgttactttactaactgggctcaatacaggcctggcctgggccgtttcatgcctgataatattgacccttgcctttgtacacacttgatttatgctttcgcgggcagacaaaataatgaaatcaccacgatcgaatggaatgacgtgaccctgtaccaagccttcaacggtctgaagaacaaaaactctcagctcaagacgcttctcgcaattggcgggtggaactttgggaccgcgcctttcacagctatggtttccacacccgagaatcgccaaactttcattacatccgtaataaaatttttgcgccagtatgaatttgacggcctggatttcgactgggagtaccctggtagtagaggctctccaccccaggacaaacatttgtttactgtactagtccaagaaatgcgggaagcctttgaacaggaagccaaacaaataaataaaccccgtctcatggtcaccgccgcggttgctgccgggattagcaacattcagagcggatatgaaatccctcaactgtcccaatacctagactatatacacgtgatgacctacgaccttcatggtagttgggaaggttacacaggcgagaactcaccactgtacaagtacccgactgacactggatccaacgcctacttgaacgttgactacgtgatgaactactggaaagataacggcgcacctgcagaaaagcttatcgtaggatttcccacctatggtcacaattttattctcagtaatccaagcaatacaggaatcggggcacccacaagcggagccggccccgccgggccttacgcgaaggaaagcggtatatgggcttactacgagatctgcacctttctaaaaaacggcgcaacacagggatgggatgctccacaagaagtgccatatgcctaccagggcaatgtgtgggtcggctacgataatattaaaagttttgatatcaaggctcaatggctaaagcacaataagtttggcggagccatggtgtgggcaattgacctcgatgatttcaccggaaccttctgcaaccagggcaaatttcctttaatttctacgttgaaaaaagcactgggcttacagagtgctagctgtaccgctcccgcacagccaatcgagccgatcaccgcagcaccttcgggatctgggaatgggagcggatcctccagttccggtggttcttctgggggatccggtttctgcgccgtacgagctaatggtctctaccctgtcgcgaacaatagaaacgcgttttggcactgtgttaacggagtcacctaccaacaaaattgtcaagcaggtctggtgtttgacacatcttgcgattgttgcaactgggcctag

SEQ ID NO: 248725 - RNA, 948 nt, synthetic construct
  misc_feature 1..948: note = Description of Artificial Sequence: Synthetic coding sequence
  source 1..948: mol_type = other RNA
atgcgcgaggcctttgagcaagaagccaagcagattaataagccgcgcctcatggtgaccgctgccgtagccgccggaatatctaacattcaatctggatacgaaatcccgcaattatctcaataccttgattacatccacgtgatgacatacgaccttcatggcagctgggaaggctacacgggagaaaactccccattgtacaaatatcccacagatacaggctcaaatgcttacctgaacgttgattatgtgatgaactactggaaagataatggcgcccccgcagagaaactgatcgtgggatttccaacctacggtcataattttatcctgagcaatccatcaaacactggcatcggagccccaactagcggggccggtccggcaggcccttacgccaaggaatcaggaatctgggcctattacgaaatctgcacttttttgaaaaatggcgccacacaggggtgggatgcaccgcaggaagtgccttatgcatatcaaggaaacgtttgggtgggttacgacaacattaagtctttcgatattaaagcacaatggttaaaacacaacaaattcgggggagctatggtctgggctatcgatctggacgacttcactggcaccttttgtaaccaaggaaaatttccacttatcagtacgctcaagaaggccttaggattgcagtctgcatcatgtaccgcccccgctcaaccaatcgaacccatcaccgcagcacccagcggcagtggaaacgggtccggatccagcagctctggggggagctccggagggagcggcttttgtgctgtccgtgcgaatggcttatatcccgtcgctaataatcgaaatgctttctggcattgtgttaatggtgttacctatcagcagaattgccaagctggtttggtcttcgatacctcatgtgattgctgtaactgggcatag

SEQ ID NO: 248726 - RNA, 1431 nt, synthetic construct
  misc_feature 1..1431: note = Description of Artificial Sequence: Synthetic coding sequence
  source 1..1431: mol_type = other RNA
atgaccaaactaattctgctgaccggactcgtgctgattctcaacctccaacttggtagcgcataccagttgacctgttacttcacaaactgggctcaataccggcccggactggggagatttatgcccgataatattgacccatgtctatgtacccaccttatctatgcattcgccggacgacagaataacgaaatcacaacaattgagtggaacgacgtgaccctttatcaagcctttaatggactgaagaataagaattcccagcttaaaaccctcctggccattggtggatggaacttcggtacagctccctttaccgccatggtcagcacgcctgaaaatcgtcaaacctttatcacttcagtgatcaagttcttaaggcagtacgagttcgacggtctcgatttcgactgggagtatccggggtcacgtggctcacccccacaagacaaacacctctttaccgtgttggtgcaggagatgcgcgaggcattcgagcaggaggcgaagcagataaacaagcccagactaatggttacagcagctgttgcagccgggattagtaatatacaatcaggatacgaaattccacagttgtctcagtacctggactatatacacgttatgacatatgatctccacgggagctgggagggctatacaggcgagaacagccccttgtacaaataccccacagacactggaagcaatgcctatctaaacgttgattatgtgatgaactattggaaagacaacggcgcacctgcagagaagttaatcgtcgggtttcctacatatggtcataattttatcctgtcaaatccctccaacactggcatcggtgccccaacatctggcgcaggtcctgctggtccttacgccaaagagtcaggcatttgggcgtactatgaaatctgcacatttttgaaaaacggcgccacacagggctgggatgccccacaagaagttccttacgcctaccaagggaacgtttgggttggatatgataatatcaagtccttcgatatcaaagcacaatggctgaaacacaataaattcggcggcgccatggtgtgggctatagatttggatgacttcaccggaaccttctgcaaccaaggcaaattcccactaatctccacccttaaaaaagccttgggcctccagtccgccagctgtactgctccagcccagcccatcgagccaatcacagcagccccaagcggctctggaaacggctccggttcttctagctctggaggatcttctgggggatctgggttttgtgcagtgcgagcaaatggattgtatccagtagcaaacaacaggaatgcattttggcactgtgttaatggagtgacttatcagcaaaattgtcaggccggattagtcttcgacacttcatgcgactgctgtaactgggcctag

SEQ ID NO: 248727 - RNA, 1263 nt, synthetic construct
  misc_feature 1..1263: note = Description of Artificial Sequence: Synthetic coding sequence
  source 1..1263: mol_type = other RNA
gaaacttcttcaagcgtgcacgaacaggttgcagattcaggggcccaggcggtagctttccagagtggtggcgaatcctcaatcgtttggaactctcagctgaaaactctgcttgctattggcggatggaatttcggcacagctccattcaccgctatggtgtccacccccgaaaaccgacagacctttattaccagtgtgattaaattcctgcgacaatatgagttcgacggtttagattttgattgggagtatcccggaagtcgcggctcacctcctcaggacaagcacctcttcacagttttggtccaagaaatgagagaagccttcgagcaagaggccaagcaaattaacaaaccccgtctaatggtaacagccgccgtggccgcaggcattagcaatattcagtccggttatgaaatcccccagttgtcccagtatctagactacatacacgtaatgacctatgatctgcacgggtcgtgggaagggtacaccggggaaaatagtcctctctataagtaccctacagacacggggagcaacgcttatctcaatgtagactatgttatgaattactggaaagacaatggcgcacccgccgaaaaactgattgtgggttttcccacgtatggacataatttcatactttcaaacccgtctaacacaggcatcggcgcaccaacttccggcgcaggtccggccggcccttatgctaaggaatcaggaatctgggcatattacgagatctgcacgtttttaaaaaatggagctacccaaggctgggatgcacctcaggaagttccctacgcataccagggaaatgtatgggttggctacgacaacattaaaagtttcgatatcaaggcgcagtggcttaagcataacaaattcggtggggcaatggtgtgggccatcgatctggatgacttcaccggaacattctgtaaccaaggtaagttcccacttatatctacactgaaaaaagctctcggcttgcagtccgcgtcctgtacagccccagcccaaccaattgagcctatcacagccgccccctctggaagcgggaacggatctggctcttcctcatcaggaggcagcagcggcggttccggcttctgcgcagtcagggccaatggactttacccagttgcaaacaaccgaaatgccttctggcactgtgtcaacggggtcacctaccaacaaaactgccaggccggcctcgtatttgatacatcttgtgactgttgtaactgggcctag

SEQ ID NO: 248728 - RNA, 1107 nt, synthetic construct
  misc_feature 1..1107: note = Description of Artificial Sequence: Synthetic coding sequence
  source 1..1107: mol_type = other RNA
atggtttctacaccagagaacagacagacttttatcacctctgtaattaaattcctcagacagtatgaatttgacggtctggacttcgattgggagtatccaggctcccggggtagcccaccacaggataagcatttattcacagttctggtacaggagatgcgcgaagcgttcgagcaggaagcgaaacaaattaacaagcccaggttgatggtaacagccgcagtcgctgccggaatctccaacatccagtcaggttatgagatcccgcagctcagccaatacctggattatattcacgtcatgacctacgatcttcacggtagttgggaggggtatactggagaaaatagtccgctctataagtaccctactgataccggaagcaatgcctatttaaatgtcgactacgtcatgaattattggaaagataatggcgcccccgctgagaaactgattgttggtttcccaacctatggccataactttattttgtccaatccgtctaacactggcatcggtgccccaacgtcaggagctggacccgccgggccttacgcaaaggaatcaggtatctgggcatactacgaaatttgtaccttccttaaaaatggcgccacccagggttgggatgcacctcaggaggtcccttatgcttatcagggcaacgtctgggtgggttacgataatatcaagagctttgacattaaggcacagtggctcaagcataacaagtttggcggggcgatggtttgggcaatcgacttggatgattttactggtactttctgtaatcagggaaagttccccctcatttccacactcaagaaggctttaggcctgcagtcagcctcatgcaccgctcctgctcaacctatagaaccaattacagcggccccctccggatcaggtaatggaagcgggtcatcgtccagtggcgggtcatcaggcggtagtgggttttgtgccgtccgagctaacggcctttacccagtggctaacaaccgaaacgctttttggcactgtgtgaatggtgtcacttaccagcagaactgccaagcaggacttgtttttgatacatcatgtgactgctgtaattgggcctag

SEQ ID NO: 248729 - RNA, 948 nt, synthetic construct
  misc_feature 1..948: note = Description of Artificial Sequence: Synthetic coding sequence
  source 1..948: mol_type = other RNA
atgcgcgaagccttcgagcaggaagcaaagcagatcaataaaccccgtctgatggtaacagccgcggtcgctgcagggatttcgaatatacagtctggctatgagatcccacaacttagccagtacctagactatatccacgtaatgacatatgacctccacgggagttgggaaggatataccggcgaaaactccccactgtacaaataccccaccgatacaggatcaaacgcgtacctgaatgtcgactatgtgatgaactattggaaagacaatggagcacctgccgagaaactgattgtggggttcccaacatacgggcacaacttcattcttagcaatccgagcaatacaggtatcggcgccccaactagcggagcagggccagcaggcccctatgcgaaggagtcaggaatttgggcttactacgagatttgcactttccttaaaaatggagctacacagggctgggacgcaccacaagaagtgccctacgcctatcaaggtaacgtatgggtggggtacgataacatcaaatccttcgatataaaagcacagtggttgaagcacaacaagtttggcggcgcaatggtttgggcaattgaccttgacgattttacaggcacattctgtaaccagggcaaatttccactgatatctaccctaaaaaaagcactgggattgcagagtgctagttgtacagcgccagctcagccaatcgaacccatcaccgcagctcctagcggatctggaaacggctccggctcgagttcatctggaggatcaagcgggggatctggattctgtgccgtacgcgccaatggactatacccagttgcaaacaatagaaatgctttctggcattgcgtaaatggagtcacataccagcagaattgccaggccggattagttttcgatacatcctgtgactgttgcaactgggcttag

SEQ ID NO: 248730 - RNA, 948 nt, synthetic construct
  misc_feature 1..948: note = Description of Artificial Sequence: Synthetic coding sequence
  source 1..948: mol_type = other RNA
atgagagaagcattcgagcaggaggcaaaacagataaataagccccgtctgatggttacggcggccgtcgctgctggcatatccaacatccagagcggctacgagattccgcagttaagccaatacctcgattatatacatgtgatgacttacgatttacacggcagctgggagggctacactggcgagaactccccattatacaagtacccaactgacactggctccaacgcctatctgaatgtcgactacgtaatgaattattggaaagacaacggtgcccccgcagaaaagttgatcgtcggttttccgacatatggacacaattttatcctgagcaacccttcaaatactggaataggagctcctacgtcgggagcaggaccagccggaccatatgcaaaggaatctgggatatgggcttattatgaaatctgcaccttccttaagaatggagctactcaaggctgggacgcaccccaagaagtgccctatgcataccaagggaatgtatgggtaggctacgataacatcaaatcattcgacatcaaagcgcaatggctgaagcataacaagtttggcggggctatggtttgggcaattgatctcgatgactttactggtaccttttgcaatcagggtaagtttccactaatttccacactgaagaaagcactgggcttacagtcagcctcttgtaccgccccagcccaaccgatcgaacctatcacagctgccccttcaggctctggcaacggctcagggtcgtcgtcttcaggtggttcctctggcggatctgggttctgcgctgtaagagctaatggcctgtaccctgtcgcgaacaaccgcaatgcattttggcactgcgtaaatggcgtcacctaccagcagaattgtcaagcgggactcgtctttgacacctcttgtgactgctgcaactgggcttag

SEQ ID NO: 248731 - RNA, 864 nt, synthetic construct
  misc_feature 1..864: note = Description of Artificial Sequence: Synthetic coding sequence
  source 1..864: mol_type = other RNA
atgagagaagctttcgagcaggaagcaaaacagataaataaaccccgactgatggtcaccgcagccgtggccgctggcattagtaatattcagtctggctatgagatcccccaactgtctcagtaccttgactacattcacgtgatgacttacgaccttcacggatcatgggaaggctacaccggagagaacagtcctctgtacaagtacccaaccgacacaggatccaacgcatacttgaacgtagactacgtgatgaactactggaaggacaatggagcccccgccgaaaaattaatagtgggtttccctacatacgggcacaattttattctcagcaacccatccaacaccggcatcggtgcgcctaccagcggcgccggccccgctggcccctatgccaaagaaagcggaatttgggcatactacgaaatctgtaccttcctgaagaatggagccacccagggttgggatgcacctcaagaggtcccttatgcataccagggcaacgtatgggtcggttacgataacatcaagtcgtttgatatcaaagctcaatggttaaaacacaacaaattcggaggagctatggtctgggctatcgacttggacgattttacagggactttttgcaatcagggaaagtttccgctaatatctaccctaaagaaggcattagggcttcaatcagccagttgtacagcacctgctcagccaatcgaacccatcaccgcagcgcccagtgggagtggcaatggatccggatcaagtagcagcggtggatcgtctgggggctccggattctgcgcagtacgggctaacgggctgtatccggtcgccaacaacagaaacgcgttttggtag

SEQ ID NO: 248732 - RNA, 2319 nt, synthetic construct
  misc_feature 1..2319: note = Description of Artificial Sequence: Synthetic coding sequence
  source 1..2319: mol_type = other RNA
atgagactgtcctccctcctggctctcttaagacctgcactgccgttgatcttgggattgagtcttggatgctccctttccctactgcgcgttagctggattcagggcgaaggcgaagacccttgcgtagaagcggttggggagagaggaggtccccagaacccagactcacgagctagactcgaccagtctgacgaggactttaagccccgtatcgtgccatattatcgagatcctaacaaaccctacaagaaggtgctcaggacccggtacattcagacagaacttggctctagagagcgcctccttgtggccgtgctgacctcccgcgcaaccctgtctactcttgctgtggccgtcaatcggacagttgctcatcacttcccccgtctcctctatttcaccgggcagcgtggcgcaagagccccagctggcatgcaggtggtgtcccacggagatgaacgccccgcctggctgatgtccgagaccttacgccatttacatacacacttcggcgcagactacgactggttcttcataatgcaggatgacacgtatgtgcaagcaccgcgactcgctgcactcgcaggtcatctgagtatcaatcaggatctttacttaggtagggcggaagagtttattggcgccggagagcaggcaaggtactgtcatggcgggttcggatacctactctcaagaagtctactgctgcgtcttagaccacacctggatggctgcagaggagacatactctcagctcgccccgacgagtggcttggcagatgcctgatagatagtctgggagtcggctgcgtgtcacaacaccaaggtcagcagtaccgttccttcgagctagcgaagaaccgcgatcctgagaaagaagggtcctcggctttcctgtcagccttcgctgttcatccagtgtccgaaggtacactgatgtaccgcttacacaaacggttttcggccctcgaactagaacgcgcatactccgagattgaacaacttcaggcacagattaggaatctgacagtgttgacacccgaaggggaagccggcctaagttggcctgtcggccttccagcgcccttcacgccacactcccggtttgaagttttaggatgggactactttactgagcagcacacattctcttgcgccgatggtgcacctaagtgtccactccagggagctagcagagccgacgttggcgacgctctagagacagcactcgagcagttgaaccggcgctatcaaccaaggctgaggttccagaaacagagacttcttaatggctaccggagattcgatcccgcaaggggtatggagtataccctcgacttgctgcttgaatgcgttacacaacgcggccatagacgtgcgttggcccgtagagtcagcctgcttagaccgctgagtcgcgtcgaaatcctccctatgccctatgtcaccgaggccacacgagtccaactcgtcctacccctgctggtcgccgaagcagctgcagcacctgcatttctggaagcatttgctgcaaacgtgctcgaacctcgggaacatgccctgctgaccctgttgctggtatacggcccgcgcgagggaggccgaggcgcacctgacccttttttgggcgttaaagccgctgctgctgaactggaaaggcgataccctggaacacgactggcatggctggcagtgcgcgccgaagctccgtcccaggttaggttgatggacgttgtgagtaaaaaacaccctgtggacacacttttttttctaaccacggtctggacccggccgggaccagaggtactgaatcgttgtaggatgaacgccatctctggttggcaagcctttttccccgtgcattttcaggaattcaaccccgccttgagtccgcagcgtagcccccctggaccacccggcgccggacccgacccccctagtcccccaggtgctgacccatcccgtggagccccaatcggagggcgcttcgacaggcaggctagtgcagagggatgcttctacaatgcagactatctcgccgcccgcgcacggctcgccggggagctcgccggtcaggaagaggaggaagcactagagggtctggaagtgatggacgtcttcttgagattcagcggtcttcatctctttcgggcagttgagcccggcttggttcagaaattttctctacgcgactgtagcccacgtttgagcgaagaactttatcataggtgtcgtcttagtaatctagaaggactcggtggacgagcccaactggctatggctctcttcgagcaggaacaagccaattccacctag

SEQ ID NO: 248733 - RNA, 654 nt, synthetic construct
  misc_feature 1..654: note = Description of Artificial Sequence: Synthetic coding sequence
  source 1..654: mol_type = other RNA
atggctcccgggtctcgaacatcccttctactggccttcgctctgctttgtctgccatggctgcaggaggcaggagcagtccagacagtaccattgagcaggctgtttgaccatgccatgctacaggcacaccgagctcaccagttggccattgacacatatcaagaattcgaagaaacctatatccccaaggaccagaagtatagcttcctgcacgattctcaaacctccttttgctttagtgattccatcccaaccccgtctaatatggaagagacacaacaaaaatcaaatctggaactgctccgtatatctctgctactgatcgagagttggctggaacctgttcgtttcttacgttctatgttcgccaataatctggtttatgacacctcagacagtgacgactatcacctattaaaggatctggaggaggggatccagactctcatgggacgcttagaagatggctcacggagaacaggtcaaatactgaaacaaacatatagtaaattcgacacaaattcacacaatcacgacgcactattaaagaattatggtctgctctactgttttcgcaaggatatggacaaagtcgagactttcttaaggatggttcaatgtaggtctgtggaaggatcatgtgggttttag

SEQ ID NO: 248734 - RNA, 771 nt, synthetic construct
  misc_feature 1..771: note = Description of Artificial Sequence: Synthetic coding sequence
  source 1..771: mol_type = other RNA
atggctcctggcagtaggacctctcttcttctcgcatttgctctcttgtgtcttccttggcttcaagaagccggtgccgtgcagaccgtgcctctgagccgcctgttcgaccatgccatgctccaggcccaccgtgcccatcagctggctattgatacgtatcaggaatttgaagaaacctacatccctaaggaccagaagtactccttcctccatgactcccagacgtccttttgcttcagcgacagcatccctaccccttctaatatggaagagacccagcagaaaagtaacttagaactgttgcgtatttctctcctgcttatcgaaagctggctggaaccagtgcgattcctgcgctcaatgtttgcaaataacctggtgtacgatacttctgactccgacgattaccatttacttaaggatctggaggaaggcattcaaactctcatgggtgtgcgcgtggcaccaggagttacaaaccctggcacgcctttagcttcaagagcaggcggagagaagtactgctgtcctctctttagttccaaagccctcacacaagaaaactccccatattcctcatttagactggtcaacccgcccgggctgtccctgcatcctgaaggagaaggaggaaagtggatcaacgaacgcggtagggaacaatgtccttcagcgtggccacttcttttattcttgcattttgctgaagcgggccgcaggcagccgccagactgggccgatccccaggccgatttgcagcaggtctag

SEQ ID NO: 248735 - RNA, 369 nt, synthetic construct
  misc_feature 1..369: note = Description of Artificial Sequence: Synthetic coding sequence
  source 1..369: mol_type = other RNA
atggcacccggcagtagaactagcctcctgctcgcctttgccttgctgtgtctcccctggttgcaggaagctggcgccgtacagacagttccgttgtcacgtctattcgatcacgcaatgctccaagcacatcgggctcaccaactggcgattgacacctatcaggaattccgccttgaagacggcagcaggcgcactggacagatacttaaacagacttattcaaaattcgacaccaattctcataatcacgacgctctgctgaagaattatggactcctgtattgctttagaaaggatatggataaagtggagacgttcctgagaatggtgcaatgcagatctgtggaggggagctgtggattttag

SEQ ID NO: 248736 - RNA, 552 nt, synthetic construct
  misc_feature 1..552: note = Description of Artificial Sequence: Synthetic coding sequence
  source 1..552: mol_type = other RNA
atggctcccggttctcgaaccagtttattgctggcttttgctctgctgtgcctgccctggctgcaagaagccgagacctacatccctaaagatcagaagtattcttttctccacgactctcaaacatccttctgcttttccgactccattcctacgccttcaaacatggaggagacccagcaaaaaagcaacctggaacttctgcggatctctctcttgctcattgaatcctggttggaacccgtccgatttttacgcagcatgttcgctaacaacctggtttatgacacaagcgactccgatgattaccatctgctgaaggacctcgaagagggaattcaaactctcatgggacggcttgaagatggctcacgcagaaccggacagatactcaagcaaacttactctaaatttgacaccaactcccacaatcacgacgccctgcttaagaactatggattactatattgctttcggaaggatatggataaagttgagacgtttctccgtatggtgcaatgtcgctcagtggaggggtcttgtggcttctag

SEQ ID NO: 248737 - RNA, 504 nt, synthetic construct
  misc_feature 1..504: note = Description of Artificial Sequence: Synthetic coding sequence
  source 1..504: mol_type = other RNA
atggcagctggaagtagaacatccttactcttggcttttgccctattatgtctcccttggctacaagaagcaggagccgtgcaaaccgtccctctgagtcgcctttttgatcatgccatgcttcaagcgcatcgcgctcaccagctcgccattgacacatatcaggaattcgaggaaacttatatccccaaagatcagaaatactcctttcttcacgactcccaaacgtccttttgctttagtgactccatccccaccccctccaatatggaagagacccagcagaagtcgaatctggaactgttgcgaatctccctcctgttaattgaaagctggctggagccggtgcgctttttacggtcaatgtttgccaacaatctagtgtatgatacatccgatagcgacgattatcatctgctcaaagacttggaagaggggatccaaacacttatgggagttagggtggcaccaggcgtggctaaccccggcacacctttggcgtag

SEQ ID NO: 248738 - RNA, 369 nt, synthetic construct
  misc_feature 1..369: note = Description of Artificial Sequence: Synthetic coding sequence
  source 1..369: mol_type = other RNA
atggctgcaggctcacgaacatcactcctgttagcctttgcgcttctatgcttaccatggttgcaagaagccggagctgtgcaaacagtccccctgtccagattgttcgaccacgctatgctgcaggcacacagggcacatcagctggctatcgacacctatcaagaattccggttagaggacgggtctagaagaacagggcaaatcctgaagcagacttactctaaatttgacacgaactcccataaccacgacgcactcctgaagaattatggtctcttgtattgctttagaaaagacatggacaaggtagaaacttttttacgtatggtacagtgtagatctgtcgaaggcagctgtgggttttag

SEQ ID NO: 248739 - RNA, 654 nt, synthetic construct
  misc_feature 1..654: note = Description of Artificial Sequence: Synthetic coding sequence
  source 1..654: mol_type = other RNA
atggcagcaggatcgcgcacaagtctattattggcctttgctttattgtgcctcccatggcttcaggaggccggcgctgtacagaccgtccccttgtccagactattcgatcatgccatgctgcaggcccacagagcacaccagttagccattgatacataccaagagttcgaggagacctacatacctaaagaccagaaatatagctttctgcatgactcacagactagtttctgcttcagtgatagtatccctacccctagtaatatggaagagacccagcagaaatcgaatctggagttgctgcggatatctctattgcttatcgagtcatggcttgagcccgtgcggttcctgagaagtatgtttgccaacaacttagtatacgacacatcggacagtgatgactaccacctgcttaaagatctggaggagggcattcagacgcttatgggacggctggaggacggtagccgcagaaccggacaaatactcaaacaaacatactctaaattcgacaccaattctcacaatcacgacgctctgctcaaaaactacggcctgctctactgttttcgtaaggatatggacaaagttgagacatttctgcgaatggtacagtgtagatcagtcgagggttcctgtgggttttag

SEQ ID NO: 248740 - RNA, 483 nt, synthetic construct
  misc_feature 1..483: note = Description of Artificial Sequence: Synthetic coding sequence
  source 1..483: mol_type = other RNA
atggcggctggaagtcgcacttctctcctcttagcattcgcgctgctgtgtctcccttggctgcaagaagcagactctattccaacccccagcaacatggaggagacccaacagaagtcgaacttagaactgctgcggatctctctgttgctcatcgagtcatggctggagcccgttcgttttttacgatccatgtttgcgaacaatctggtctacgacactagcgactctgatgattaccacttattgaaggacctagaagaaggtatccagaccctgatgggcagacttgaagacggctctcgtcgaacaggacagatacttaagcaaacttacagcaaatttgacacaaattcccacaatcacgatgcgctgctgaagaactacggcctactgtactgtttccgaaaagacatggacaaagtcgaaacctttctacgcatggtgcagtgtagatcagtcgaaggatcttgcgggttttag

SEQ ID NO: 248741 - RNA, 498 nt, synthetic construct
  misc_feature 1..498: note = Description of Artificial Sequence: Synthetic coding sequence
  source 1..498: mol_type = other RNA
tgaggctcccgtacttctcttttgctcgcttttgctctcctttgtctgccgtggctgcaggaggccggagctgtccagactgttcctttgtctcgcctttttgatcatgccatgctgcaggcccatcgggcacaccagttagcaattgacacataccaagagtttgaggaaacctacatcccaaaagaccaaaaatacagtttcctgcatgactcccagacatccttttgcttttccgactctatccccaccccatcaaacatggaagaaacccaacagaagtctaacctcgaactgctacgcatctcactgctcctcatagaatcatggcttgaacccgttcgcttcctacgcagcatgttcgcaaataacctggtttacgatacatccgactctgacgattatcacctgctgaaagacctcgaagaaggcatccaaacgctgatgggagtgcgcgtcgctcccggggttgctaaccctggaacaccactagcatag

SEQ ID NO: 248742 - RNA, 786 nt, synthetic construct
  misc_feature 1..786: note = Description of Artificial Sequence: Synthetic coding sequence
  source 1..786: mol_type = other RNA
atggtagttgtggccgccgcccccaaccccgccgatggaacgccaaaggttctgttgctgtcaggccaaccagcatcagccgccggcgctcccgccggacaggccctccccctcatggttcccgcccaaaggggtgcctctcctgaagcggcctcaggcggactgccccaggcaagaaagcggcaaaggctgacccatctctccccagaggagaaagctcttagacgcaaattgaaaaaccgtgttgcagctcaaacagctagggatcggaaaaaggcaagaatgtctgaattagaacagcaagttgtggatctggaagaagagaatcagaagctgctcctggagaaccaattgttacgcgaaaaaactcatggactggttgtcgagaatcaagagttaagacagcgacttggaatggacgccttggtggccgaggaagaggccgaggccaagggaaacgaagtcagacccgttgccggatccgctgaatccgccgccctgaggctcagagcgcctctacagcaagtgcaggcccagctcagtccactgcaaaacatcagcccttggatcctagcggtcttaaccctgcaaatccagagtctgattagctgttgggctttctggaccacctggactcaaagctgcagcagcaatgctctacctcagtctctcccggcatggcgttcaagtcaacgcagtacccaaaaagaccccgttccttaccaacctcctttcctttgccagtgggggcgtcatcaaccatcatggaaaccgctgatgaattag

SEQ ID NO: 248743 - RNA, 2853 nt, synthetic construct
  misc_feature 1..2853: note = Description of Artificial Sequence: Synthetic coding sequence
  source 1..2853: mol_type = other RNA
atgacctggcgaatgggccctagatttacaatgctgcttgcgatgtggcttgtgtgtggatcagaaccccacccccacgccaccattagaggtagtcacggaggacgcaaagtcccccttgtctcccccgactcgtctagacctgccagattccttcgccacactgggcgctcaagagggattgagcggagcacattagaggagcctaaccttcaacctctgcaaagacggagaagcgtacctgtgttgcgtctcgccaggcctacagagcccccagcccggtccgacatcaacggtgctgccgtacgcccagagcagagacctgctgccaggggcagtccaagagagatgattagagatgaggggtcatccgcgagaagtagaatgttgagatttccttccggatctagctcaccaaacattctggcctcattcgccggaaaaaatcgggtatgggttattagcgctcctcacgcttccgaagggtactaccggctaatgatgtcccttttaaaagatgacgtatactgtgaacttgccgagcgccacatccaacagattgtcctcttccatcaggctggcgaggagggagggaaagtaagacgcattactagtgaagggcagatcctggaacagccactggacccctccctaattcctaagctgatgtctttcctcaagctggaaaaaggcaaatttggaatggtcctgcttaaaaagacactccaggtggaagaacgttatccctatcccgtaagattggaggccatgtatgaagtgatagatcagggtcctatcaggagaatcgagaagatcagacagaaaggattcgtgcaaaagtgtaaagcctcgggagtcgagggccaggtggtagctgaaggcaacgatggtggaggaggagccggccggccctccctcggatccgagaaaaagaaagaggacccaagacgagcacaagtacctcccacccgagagagccgtgtcaaggtgttacgaaagctcgccgctaccgcgcccgcccttccacagcccccttctacaccgcgagccacaacattaccccccgcccctgccactacagtgacccgatccacttcccgagctgtcaccgtggcagctagaccaatgacaacaactgccttccccacaacgcaacgaccgtggacacccagtccatcacaccgacctcctaccacgacagaagtaattacagcgcgacgaccttcagtgtccgagaacctataccccccttcaaggaaggatcagcatagagaaaggccccaaactaccagacgccctagcaaggccacatcgctggaatcatttactaatgccccaccaacaactatcagcgagccatccaccagagctgccggaccaggaaggtttcgggacaacagaatggatcggcgcgagcatggccacagagacccaaatgtcgtccccggcccccctaaacccgcaaaagagaaaccacctaagaaaaaggctcaagataaaattttatctaatgagtatgaagaaaagtatgacctgagccgtcctactgcctctcagctggaagatgaactgcaggtgggcaacgtcccgctcaagaaggcaaaagagtccaaaaagcacgaaaagctggagaaacccgagaaagagaagaagaagaaaatgaagaacgagaacgcagataaattactaaagagcgagaaacagatgaagaaaagcgaaaagaaaagtaagcaggagaaggaaaaatcaaagaagaagaaagggggaaaaactgaacaggatggctaccaaaaaccaactaacaaacactttacccagagccctaagaaatcagtggcggatctgttgggctccttcgaaggcaaacgacgcctgttactaatcaccgctcccaaagcagaaaataatatgtatgtgcagcagcgggatgagtatctagagtctttctgtaagatggcaaccagaaaaatttcagtaatcaccatctttggccccgtcaataattctaccatgaagatagaccactttcagcttgacaacgaaaaaccgatgagggtcgtggacgacgaagatctggttgatcaacgcctaatatccgagcttaggaaagaatacggtatgacatataatgatttctttatggtcctgaccgatgtagatctgagagtgaaacaatattacgaggtaccgatcactatgaagtctgtgtttgatctgattgacacctttcagtccagaattaaagacatggagaaacaaaaaaaggaaggaattgtatgcaaagaggataagaaacaaagcttagaaaactttctgtcgagatttcggtggcggcggcggttactggttatttctgcccccaacgatgaagactgggcatatagtcaacagttgagtgcattgtcaggtcaagcctgcaatttcggactgaggcacatcactatcctcaagctgctgggggtaggagaggaagtgggaggcgttttagaactttttccaattaacgggtcctcagtcgtcgaacgcgaagatgttccagcacatctggtgaaggatataagaaactactttcaggtctccccggagtactttagcatgttacttgttggaaaagacggaaatgtcaagagctggtacccaagtccaatgtggtccatggtgattgtctacgacctgattgacagtatgcagcttagaagacaagaaatggccatacaacaaagcctcggaatgagatgccccgaagatgagtacgcagggtatgggtaccatagttatcatcagggataccaggacggctaccaggacgactatcggcaccatgaatcatatcatcacggatacccctactag

SEQ ID NO: 248744 - RNA, 624 nt, synthetic construct
  misc_feature 1..624: note = Description of Artificial Sequence: Synthetic coding sequence
  source 1..624: mol_type = other RNA
atggtcgcgacctgcctccaagtcgtggggtttgtgacctctttcgtcgggtggatcggagtgattgtgaccacctctacgaacgactgggtggtgacatgcggctacaccatcccaacgtgtaggaagcttgatgaattggggtctaagggattatgggccgactgcgtgatggcaactgggttgtaccactgtaagccactggtcgatatcctcatcctacctggctacgttcaagcttgcagagccttaatgatcgctgcatctgtgctagggttgcctgctattctccttcttttgacagttctgccttgcatcagaatgggccaggagccaggagtcgctaaataccgccgcgcacagctcgcgggagtgcttttgattctgctcgccctttgcgcccttgtagctacaatctggttccccgtttgtgcccaccgtgaaacaacgatcgtcagttttggctatagcctatacgccggctggataggtgcagtcctctgcctcgtcggtggctgcgtgatcctgtgttgtgcaggtgatgcgcaggcgtttggtgagaatcgcttctactataccgccggatcatcctcacccacacatgccaaatctgctcacgtatag

SEQ ID NO: 248745 - RNA, 1350 nt, synthetic construct
  misc_feature 1..1350: note = Description of Artificial Sequence: Synthetic coding sequence
  source 1..1350: mol_type = other RNA
atgatgaaaactcttctgctatttgtgggcttgctgctgacctgggaaagcggccaggtgttaggtgaccaaactgtttccgataacgaattacaggagatgtctaatcagggcagcaaatatgttaacaaagagatacagaatgcagtcaacggggtgaagcagatcaagactctgatagagaaaacaaatgaagagcggaagactttgttatccaatttagaagaagcaaaaaagaagaaggaagacgcactgaatgaaactagagagagcgagactaagctgaaagaactcccgggtgtctgtaatgaaactatgatggctctctgggaggaatgcaagccatgcctgaagcaaacgtgtatgaagttctacgcccgagtgtgccgatcaggaagtggccttgtggggcgacaattggaagagtttctgaatcagtccagcccattttacttttggatgaacggtgatagaatagacagccttctcgagaatgacagacagcagacccacatgctggacgtgatgcaggatcacttcagccgagcatcttcaatcatcgacgagttgttccaggaccgattttttacccgggaacctcaagatacctaccattatcttccattttctctgcctcatcgcaggccacacttttttttccccaagtcaagaatcgtgaggagtcttatgccatttagcccgtatgaacctcttaacttccacgccatgtttcagccctttttagagatgattcacgaagctcagcaagccatggacatccacttccattcacctgcattccagcatccccctacagagtttatccgagagggagacgatgatcgcaccgtctgtcgagagattcgacacaactccacaggttgtctcagaatgaaagaccagtgtgacaaatgccgcgaaatcctgtccgttgattgttcaacgaataacccttcccaagcgaaattaaggcgcgaactagatgaatctctgcaagttgctgaaagactaacccgcaagtataatgagctgcttaagagctatcagtggaagatgttgaatacctctagcctgctggaacaactgaatgaacagtttaattgggtatcccgcctggcaaacttgactcagggagaagaccaatactatttgagagtaactacagtcgcaagccacaccagcgatagtgacgtgccatcaggcgtgaccgaggtggtagttaagctgtttgatagtgaccccataacagttactgttcccgttgaggttagtcgaaaaaatcccaagtttatggagaccgtggccgaaaaagcactacaggagtacaggaagaaacacagagaggagtag

SEQ ID NO: 248746 - RNA, 825 nt, synthetic construct
  misc_feature 1..825: note = Description of Artificial Sequence: Synthetic coding sequence
  source 1..825: mol_type = other RNA
atgcaggaccatttcagccgtgcctctagcattattgatgaattgttccaggatcgcttctttacaagagagccccaggacacttatcactatctccccttcagcctgccgcaccgtcgccctcatttcttctttccgaaatcccgtatagtgaggtccctcatgcctttttctccgtacgaacccctaaactttcacgcaatgttccaacctttcctggagatgatccacgaagcacaacaagccatggacattcacttccactcaccagcatttcaacatccacccacagagtttattcgggagggtgatgatgatcgtaccgtctgtagagagattaggcataacagtacaggctgcctgcgaatgaaggaccaatgtgacaagtgtagggaaatcttaagtgtagattgtagtacgaataacccaagccaagctaaactgcgacgggagctagatgaatcactgcaggtggcagaacgattgactcggaaatataacgaactcttgaaatcataccagtggaagatgctcaacacaagcagcctgctggagcagcttaacgaacaatttaactgggtgagccgactcgccaacctgacacaaggagaggaccaatactatctgcgcgttacaaccgtcgcttctcatacgtccgacagtgatgtcccatcgggcgtgacagaggtggtagtgaaactgttcgactccgatcccataaccgtgacagtcccagttgaagtgagcaggaagaatccgaagtttatggaaaccgtagcagaaaaagcattgcaggagtatagaaagaaacaccgggaagagtag

SEQ ID NO: 248747 - RNA, 1350 nt, synthetic construct
  misc_feature 1..1350: note = Description of Artificial Sequence: Synthetic coding sequence
  source 1..1350: mol_type = other RNA
atgatgaaaacactacttctgttcgtgggcttattgttaacctgggagagcggtcaggtcttgggcgatcagactgtgagcgacaatgagttacaagaaatgagcaaccaaggctcaaagtatgtcaataaggagatacagaacgccgttaatggtgtaaagcagattaaaacccttatcgaaaaaactaatgaagaaagaaagacattgctatcaaatctggaggaagcaaagaagaaaaaggaagacgccttaaacgaaacacgtgaaagtgaaactaaactaaaagaattaccaggagtgtgtaatgagaccatgatggcactgtgggaggaatgcaaaccttgcttgaaacagacatgcatgaagttttatgctcgggtctgcaggagcggctcagggctcgtgggacggcagcttgaagaatttctgaaccaatcctcacccttctatttttggatgaacggtgatagaatagacagcttactagaaaacgaccgtcagcaaactcatatgctcgatgtgatgcaggatcacttcagcagggcctcatcaatcatcgacgaactcttccaggatcgattcttcacacgagaaccacaagacacctatcactatctacccttcagtttgccacatcgcaggccacactttttcttcccaaaatcccgcatcgtacgaagcttgatgccctttagcccatatgaacccctcaattttcacgcgatgttccagccgttcttggaaatgattcacgaggcacagcaggctatggacatccacttccactctcccgccttccaacatccacccacagaatttatcagagaaggagacgacgacaggaccgtgtgcagagaaatccgccataatagtactggctgtttaagaatgaaggaccagtgcgataaatgccgcgaaattctatcagtggactgttccacaaataacccatcccaagctaaattacggcgagagctagatgagagtcttcaagttgcagagcggctaacccgtaaatataacgaattgctgaagtcttatcagtggaagatgctgaacacgtcctcacttctcgagcaactgaatgaacagttcaattgggtgtccaggctggccaatttgacccaaggagaggaccagtattacctaagagttacaacggtcgcctctcatacttccgatagcgatgtgccatcaggagtgacagaggtggtggtgaaactgttcgatagtgatccaataactgttacagtacccgtggaagtctcgagaaaaaaccccaaattcatggaaaccgtggctgagaaagctctccaggaatacagaaagaagcaccgtgaagagtag

SEQ ID NO: 248748 - RNA, 615 nt, synthetic construct
  misc_feature 1..615: note = Description of Artificial Sequence: Synthetic coding sequence
  source 1..615: mol_type = other RNA
atgatgaaaactctactcctgtttgtgggactgctgctaacttgggaatctggacaggtgctcggtgaccagaccgtgagcgacaatgagcttcaggaaatgagcaatcaggggagcaagtacgttaacaaggaaattcaaaacgcagtgaacggagtgaaacaaattaagacattgatcgagaagacaaacgaagagaggaagacgcttctgagtaatctggaggaggccaaaaagaagaaggaagacgcactgaatgagactcgggaatccgagacaaagttaaaggagctgcctggcgtgtgtaacgagaccatgatggcattatgggaggaatgcaagccatgtttaaaacaaacatgcatgaagttctatgccagagtgtgtaggagcgggagtggcctcgttgggagacagctcgaggaattcctgaaccagtccagccctttctatttttggatgaacggcgatagaatcgacagcctcctcgaaaatgatagacagcagactcatatgttggacgttatgcaagaccacttttcacgcgcttcatcaattatcgacgaactatttcaagacaggtttttcacccgcgagccacaggatacttattag

SEQ ID NO: 248749 - RNA, 1350 nt, synthetic construct
  misc_feature 1..1350: note = Description of Artificial Sequence: Synthetic coding sequence
  source 1..1350: mol_type = other RNA
atgatgaaaacactgctgctgttcgtcggactcttacttacgtgggaaagtggacaggtcctgggtgatcaaacggttagcgataacgaactccaggagatgagcaatcagggaagtaagtacgtcaacaaagaaatacagaacgcagtcaacggagtaaaacaaatcaagacgctaatcgaaaaaacaaatgaagaaaggaagacactgctgtcaaatttagaggaagcaaaaaaaaagaaagaggatgcacttaatgaaacgagggaatccgagacaaagctgaaggagttgcctggggtgtgtaatgagaccatgatggcgttgtgggaagaatgcaagccctgcctcaaacaaacatgcatgaagttctacgctcgggtttgtcggagcggtagcggattggtgggcaggcagttggaggaatttcttaatcagagctctccattttatttttggatgaacggtgataggatcgattccctgttggaaaacgacagacagcagacacacatgctagatgttatgcaagaccacttttcacgggcaagctccatcatagacgagttgttccaggatcgattttttaccagagagcctcaggatacttatcattatctccccttctcattaccccatcgacgacctcacttcttctttccgaagtcacgcattgtccgttcattgatgccattctctccttacgagccactgaatttccatgccatgttccagcccttcctcgagatgatacatgaagcacaacaggcaatggatatccactttcactcccctgcttttcagcaccccccaacagagtttatacgggaaggagatgacgacagaaccgtgtgtagggagatacggcacaactctactggatgcctgcgcatgaaagaccagtgcgacaagtgtagggaaatcctcagcgttgattgctctaccaacaacccaagtcaggccaagttgcgccgtgaactagacgagtcactgcaggttgccgaacgcttgacaaggaaatacaatgaacttctgaaaagctatcagtggaagatgttaaacacgtcatccctgttggaacagcttaacgagcagttcaattgggtgtcccggctagcaaatctcacccagggagaggaccagtactacctcagagtgacaaccgtagcaagtcatacctcagactcggatgtaccttccggagttaccgaagtggtcgttaagcttttcgactctgatcctatcaccgttacagtgcccgttgaagtgagccgaaaaaaccctaaatttatggaaaccgtcgccgagaaagcactccaagaatacagaaagaaacaccgggaggagtag

SEQ ID NO: 248750 - RNA, 816 nt, synthetic construct
  misc_feature 1..816: note = Description of Artificial Sequence: Synthetic coding sequence
  source 1..816: mol_type = other RNA
atgatgaagacattgctactctttgtcgggctgctgctcacatgggagtctggccaggtgctcggagatcagaccgttagtgataatgagcttcaggagatgtctaatcaaggaagtaagtacgtcaacaaagagattcaaaatgctgtaaacggagtaaaacagattaagacactgattgaaaagacgaacgaagagcgaaaaactctcttatcaaatctagaggaagcgaagaaaaagaaggaggatgcactgaatgagacaagggagtctgagacaaagctgaaagagctgccaggtgtgtgcaacgagaccatgatggcactgtgggaagagtgcaagccatgtctgaagcaaacttgtatgaagttctatgcacgggtgtgccgaagtggttctggactggtaggcagacagcttgaagaattcttgaatcaatctagtccattctatttttggatgaatggtgaccgcattgactccttgctggagaacgaccgccaacaaacccacatgctcgacgtgatgcaggaccatttctcaagagccagctctattatcgatgaactgtttcaggactcactgatgcctttttctccctacgagccgctcaattttcacgcaatgtttcaacctttcctcgagatgatccacgaagcccagcaagccatggatatacacttccactcccctgctttccagcacccgcccacagagtttatcagagagggcgatgatgataggacagtctgcagagaaattcggcacaattccacaggctgtcttcggatgaaagatcagtgcgataaatgttag

SEQ ID NO: 248751 - RNA, 1383 nt, synthetic construct
  misc_feature 1..1383: note = Description of Artificial Sequence: Synthetic coding sequence
  source 1..1383: mol_type = other RNA
atggaagcatgcaaagacagccgaatcggtggaatgatgaagaccttgcttttgttcgtgggactgcttctcacttgggaatcgggtcaggtactcggcgatcagactgtgtccgacaacgaactccaagagatgtccaaccagggcagtaagtatgtcaataaggagatacagaatgctgtgaatggcgtgaaacagattaagaccctgatcgaaaagacaaatgaagagcgtaaaacactcctatccaatctagaggaagctaagaagaagaaggaagatgccctaaatgaaacgcgggagtcagaaactaagctaaaagaactgcccggggtgtgcaacgagacaatgatggctttatgggaagaatgtaaaccatgcctgaagcagacatgtatgaaattctacgcacgcgtgtgccgcagcggctcgggtcttgtgggccgacaattggaagagttcctgaatcagtccagccccttttatttctggatgaacggcgaccgcattgactcactcttagagaacgaccgacaacagacccacatgctcgacgtgatgcaagatcacttctcccgcgcctcttccattatcgatgaacttttccaagaccggtttttcactcgggagccacaggacacctaccactacttgcccttttccttgcctcataggagaccacacttttttttccccaagtctcggatcgtgcgatccctcatgcccttttctccttacgagcctctcaattttcacgcaatgtttcagcctttcttagagatgattcacgaagcccagcaggctatggacatccacttccactccccagccttccagcaccccccaaccgaattcatccgcgaaggtgatgacgataggaccgtctgccgtgaaatcaggcacaattcaaccggctgcctgcgtatgaaggatcagtgcgataaatgtagagaaatcctgtctgttgactgtagtactaacaatcctagtcaggcgaaactgaggagagagctcgatgagtcccttcaagttgctgaacggctcacaagaaagtataacgaacttttgaagtcctaccaatggaaaatgctcaatactagctccttattagaacaactcaacgagcagttcaactgggttagtaggctcgctaatctcacgcagggcgaagaccagtactacctcagggttaccaccgtcgcttcccatacgagcgactcagacgtgccatctggtgtgaccgaagtagtggtgaaattatttgacagtgatcccataactgtcaccgtgccagtagaggtgagcaggaaaaaccccaagtttatggagaccgtggcagagaaggccctgcaggagtacagaaaaaaacacagagaggagtag

SEQ ID NO: 248752 - RNA, 1506 nt, synthetic construct
  misc_feature 1..1506: note = Description of Artificial Sequence: Synthetic coding sequence
  source 1..1506: mol_type = other RNA
atgcaggtgtgctctcagccgcagcggggatgcgtcagagaacaatcagccatcaataccgcccccccaagtgctcataacgcagcttctcctggaggcgcgagagggcaccgagtccctctgaccgaggcatgcaaagattcccgcattggaggtatgatgaaaacgctgctcctcttcgtgggactgctgttgacatgggagagtggtcaggttctaggtgaccaaactgtgtctgataacgagctgcaggagatgtctaaccagggcagcaagtatgttaataaagaaatccagaatgccgtgaatggagtgaaacagatcaaaactcttattgaaaaaaccaatgaggaaagaaaaacgctactgagcaatctggaagaggcaaaaaaaaagaaagaagatgccctcaatgaaactcgtgagtccgagaccaaactgaaagaactccctggagtctgcaatgaaaccatgatggcactgtgggaggagtgtaagccctgtctcaaacagacctgcatgaaattttacgctagagtatgccgaagtggttccggcctcgtggggagacagctggaagagtttctgaaccagtcatctccattttacttctggatgaacggtgaccgaatcgacagtctactggaaaatgacagacaacagacccacatgctcgacgtcatgcaagaccacttctcccgggcatcttcgatcatagacgagctgtttcaggaccgatttttcacgcgggaaccccaagatacctaccattatcttcctttttctcttcctcatcgacgtccacactttttctttccaaaatcgaggatcgttcgtagcctcatgcctttttctccctatgaacctttaaacttccatgccatgttccaacccttcttggaaatgatccacgaggctcaacaggcaatggacatccacttccactcccccgcattccagcatccccccacagagtttattagagagggcgacgacgaccggacagtttgcagggaaataagacataactctacaggctgtctgagaatgaaggaccaatgcgacaaatgcagagagatcttgtcagtagactgcagcactaataatcccagccaagccaaacttcggagagagctggatgagtccctacaggtagcagagagactcacgcgcaaatataacgagctgctcaaaagttaccagtggaaaatgttgaacacaagttctcttctggagcaactgaatgagcaatttaactgggtgagcaggctggccaacctaacgcagggcgaggaccaatactaccttcgcgtgaccactgtggcaagccatacctccgactcagacgtaccatccggagtaactgaggttgtggtgaagttgtttgactccgacccaatcaccgtaacagtgccagtcgaggtatccaggaaaaatcctaaattcatggagaccgtggccgagaaagctctccaggaatatcgaaaaaagcatagagaggagtag

SEQ ID NO: 248753 - RNA, 894 nt, synthetic construct
  misc_feature 1..894: note = Description of Artificial Sequence: Synthetic coding sequence
  source 1..894: mol_type = other RNA
atggaagcatgcaaggattccagaatcggtggcatgatgaagacgctgctgctcttcgtgggtttattgctaacttgggaaagtggacaagtgctcggtgaccaaaccgtctctgataacgagctacaagaaatgtctaatcagggatctaaatacgtgaataaggaaatccagaacgccgtgaatggggtaaagcaaataaagaccctgatcgaaaaaacgaacgaagaaagaaagaccttactgtcgaacctcgaagaggccaagaaaaaaaaagaagatgcactgaacgaaactagggagagcgagactaagttgaaggaactgcccggggtctgtaacgagacaatgatggccctctgggaagagtgtaaaccgtgcctgaagcaaacttgcatgaaattttatgctcgagtctgtagaagtggcagtggccttgttggcaggcagcttgaagaatttctaaaccagagcagccccttctacttttggatgaacggagatcgcattgacagcctgcttgaaaatgatcgccaacaaactcacatgcttgacgtgatgcaagaccatttttctagagcaagtagcatcatagatgaactgtttcaggatcgattcttcacaagagagccccaggacacctatcactacttacctttctcactaccccaccgccgcccccacttcttcttccctaagagtagaattgtcagatcgctgatgcctttttctccctatgagccactgaactttcacgccatgtttcagccattcctcgagatgattcacgaagctcagcaagcgatggatattcattttcactcacccgcttttcagcacccacctaccgagtttattagagaaggggatgacgaccggacagtctgtagatag

SEQ ID NO: 248754 - RNA, 2259 nt, synthetic construct
  misc_feature 1..2259: note = Description of Artificial Sequence: Synthetic coding sequence
  source 1..2259: mol_type = other RNA
atgggcccccttatggttttgttctgcctgctgtttttataccccggtctcgctgattctgcccccagctgcccacagaacgtcaatatttccggaggaacctttactctgtcacacgggtgggcaccagggagcctgcttacctactcctgcccacagggtctgtatcccagtcctgcttcacgactctgcaaatccagcggacaatggcagactccaggagctacaaggtctctttcgaaagcggtgtgtaagccagtcagatgtccagcgcccgttagtttcgagaatggaatctacaccccccgtctgggctcataccccgttggcggtaatgtttcatttgagtgcgaggatggttttattctaaggggctctccagtcagacagtgcagacctaacggcatgtgggatggtgaaacggcagtctgtgataatggagccggccattgccccaaccctgggatctctctaggagctgttcgcactggtttcagatttggccatggcgataaagtgcgataccgctgctcaagcaatttggtcctcaccggtagcagcgaaagggaatgccaagggaatggtgtatggtctggcaccgaaccaatctgtcgacagccttactcctatgattttccagaggatgtagctcccgcccttggcacctccttctcacacatgctgggagccactaatcccacacagaaaacgaaagagtccctcgggaggaaaatccaaatccagagatccggccacctgaacctgtaccttctcctcgactgtagccagagcgtgtcagaaaatgactttttgatctttaaggaatctgcctcccttatggtagaccgaatatttagcttcgagattaacgtgtccgtggcgatcatcacttttgcctctgaaccgaaggtcctaatgagtgttttgaatgataatagccgtgacatgaccgaagtgatctcaagcctggaaaacgccaactataaggaccacgaaaacggaactggcaccaacacatacgcagctctgaattccgtctacttaatgatgaacaaccaaatgagactcctgggaatggaaacgatggcctggcaggagatcagacatgctatcatcctccttactgacggaaagtcaaatatgggaggctcaccgaaaaccgcagttgatcacattagagagattctgaatattaatcagaaaagaaacgactatctagatatctatgcaattggagtgggcaaactggatgttgactggagagagctcaacgagttgggatcaaaaaaggacggcgagagacatgcttttatcttgcaagacactaaggcgctgcaccaggtgttcgaacatatgttagacgtgtcaaagctcacagacaccatctgcggagttggcaatatgtcagcaaatgcttcagatcaagaaaggaccccatggcacgtcactatcaaaccaaagagtcaagagacttgcaggggtgccctgatctctgaccaatgggttcttaccgccgcccattgcttccgagacggaaacgaccactctttatggagggtaaatgtcggcgacccaaagagtcaatggggaaaagagttccttattgagaaagcagttatttcacccgggttcgacgtgttcgctaagaaaaatcagggcatcctcgaattctatggggacgatatcgcactgctgaagctggctcaaaaagttaagatgagtacccacgctagacctatttgcctcccctgtacaatggaagctaatctggctcttcgccgcccacaaggctcaacgtgtagggatcacgaaaatgagctccttaataagcagtccgtacccgcacatttcgtcgcattgaacgggtccaaattaaatatcaacttgaagatgggagtcgaatggactagctgtgccgaggttgtgagccaggagaagaccatgttcccgaatttaactgatgtgcgtgaggtcgtcacagatcaattcctatgctccggcactcaagaggacgagtccccgtgtaaaggcgaatccggtggtgccgtgttcctagaacggcggtttagattctttcaggtgggtcttgtgtcctggggactctataacccatgccttgggtctgctgacaagaattccagaaagagagctcctagatcaaaagtgccaccccccagagactttcacataaacctgtttcgcatgcaaccttggctccggcaacacctcggcgacgtgttgaattttctgccactatag

SEQ ID NO: 248755 - RNA, 1134 nt, synthetic construct
  misc_feature 1..1134: note = Description of Artificial Sequence: Synthetic coding sequence
  source 1..1134: mol_type = other RNA
atgaccgaagtcatctcaagtttagaaaacgccaactataaagaccacgagaacggtaccggtacaaacacatacgccgcactgaatagcgtatatttgatgatgaataaccaaatgcgactactggggatggaaactatggcttggcaggagataagacatgctattatcttactcacagatgggaaaagcaacatgggcggttcacccaagacagcggtagaccatatcagggaaattctcaatattaatcagaaaagaaacgattatcttgacatatatgccatcggggtaggcaagctggacgtcgattggagagaattgaatgagttaggcagcaaaaaggacggcgaacgtcatgcattcatcctgcaggataccaaagccctccatcaagtatttgagcacatgctcgacgtgagcaagctgaccgacaccatatgcggagttggcaatatgagcgccaatgcatcggatcaagaacgaactccctggcacgtgacaattaaacctaagagtcaggagacctgtcgcggtgctctgattagtgatcaatgggtgttgaccgctgcccactgctttagagacgggaatgaccactctctgtggcgggtgaatgttggagacccaaagtcccagtgggggaaggaatttttgattgaaaaggctgttatctctcctggctttgacgtgttcgcaaagaagaatcaaggaatattggagttctacggtgacgatattgccctgcttaagctcgcacaaaaggtgaagatgtcaacccatgcacggccaatctgtcttccttgcacaatggaagcaaacttagcactgagacgtccccaaggtagtacttgtagagaccacgagaatgagctccttaacaaacagagtgttcccgcacattttgttgccctgaacggatccaagcttaacattaacctcaaaatgggggtagagtggacgtcctgtgctgaagtcgtgagccaggagaaaactatgtttcctaacttgacagacgttcgagaggtggttaccgatcaattcctttgcagtggtacccaggaagacgaaagcccttgtaagggaggttctggggaattaggcagcctccagccccttccatggctgtgctag

SEQ ID NO: 248756 - RNA, 420 nt, synthetic construct
  misc_feature 1..420: note = Description of Artificial Sequence: Synthetic coding sequence
  source 1..420: mol_type = other RNA
atggggcccctcatggtgctgttttgcctcctctttttatacccaggtctggccgattcagcaccaagttgtccacagaatgtcaacatatctggtggcaccttcactctgagtcatggctgggctcctggctcgctgcttacctactcttgtccccaaggactttatccctcccccgcttcacgactgtgtaaatcttctgggcaatggcaaacacctggtgcgacccgctctttgtctaaagccgtgtgcaagccagttcggtgcccagctccagtgtcatttgaaaatggaatctatacacctagacttggatcctatcctgtgggtggcaacgtctctttcgaatgcgaggatggatttatattgagggggtctccggtgcggcagtgcagaccgaatggtatgtgggatggttag

SEQ ID NO: 248757 - RNA, 978 nt, synthetic construct
  misc_feature 1..978: note = Description of Artificial Sequence: Synthetic coding sequence
  source 1..978: mol_type = other RNA
atgggaacacgctccgctatcgctgccccgagaattctctgcagccgaggtttacggtctgggtccgcacgcgccacaggctctggggtcgagcgttcaccatctgctgcaaacccaacccttatgacttccctgcgaacttggcctctcccctgggcactcccgtcccccacgtgtcttggcccgccaattccacccagaagacagcggatcttttcttttgaaattaatgtgtctgtggcaatcatcactttcgcttccgagcctaaggtactgatgagcgtccttaacgacaattcacgcgatatgactgaggtgattagctcgttagaaaatgctaactacaaagaccatgaaaacggaaccggaacaaatacttatgcagccctgaactccgtttaccttatgatgaacaatcagatgagacttctgggaatggagaccatggcttggcaagaaatcaggcatgcaataatcctgctgacggatgggaagtcaaacatgggcggctctccaaaaacagccgtggatcacatccgcgaaatactcaatatcaatcagaaacgtaacgattatttagatatctacgccattggagtggggaagctcgacgtggattggcgcgagctgaatgaactcggaagtaaaaaagatggcgaaaggcatgcatttatcctgcaagacacgaaggcacttcaccaagttttcgagcacatgctggacgtaagcaagttaaccgataccatctgcggcgtgggaaatatgtcagccaatgcatccgatcaggaacgcacaccgtggcacgttacaattaaaccaaaatcccaagaaacctgtcgtggagcgttaatctcagatcaatgggtcttgaccgccgctcactgcttcagggacggaaacgatcacagtctgtggagggttaacgtgggcgatccaaaaagccagtggggtaaagaatttctgattgagaaggcctag

SEQ ID NO: 248758 - RNA, 1863 nt, synthetic construct
  misc_feature 1..1863: note = Description of Artificial Sequence: Synthetic coding sequence
  source 1..1863: mol_type = other RNA
atggggcccctgatggtactgttttgtctgctgtttctgtatcccgctggacactgccccaaccctgggattagcctaggcgccgtccgaaccggattccgattcggccatggcgacaaggttagatacagatgctctagcaatctcgtactcacagggtcgagtgaacgcgagtgtcaaggcaacggagtatggagtggcactgaacccatttgccgacaaccctattcatacgattttccagaagatgtggcaccagctctaggtacaagcttctctcatatgctgggcgcaactaaccccacacagaagactaaggagagcttaggaagaaaaatccaaatccagagatccggccacttgaacctgtaccttttactggattgtagccagtccgtgtctgaaaacgattttttaatatttaaggaatcagcttctctgatggttgaccgaatttttagctttgagataaatgtgagcgtggcaatcatcaccttcgctagcgagcccaaagtactgatgagtgtgctgaatgacaacagtagagacatgaccgaagttattagttcccttgaaaacgctaactataaggatcatgaaaatggaacggggacgaacacatacgccgctttaaacagtgtttacctcatgatgaacaaccaaatgcgattgttgggtatggaaactatggcttggcaagaaatacggcatgcaattatccttttaaccgacggaaagtccaatatgggcggatcacccaaaaccgctgtggatcacattagggagattcttaacataaatcagaaacggaacgattatctcgatatttatgcgataggtgtgggcaaactggatgtggattggcgggaactgaacgaactggggtcaaaaaaggatggcgaaagacatgcttttatcttgcaggacaccaaagccttacaccaagtatttgaacacatgttggacgtcagcaagctaaccgatacaatttgtggtgtcggcaatatgtcggcgaacgcctctgatcaagagcggactccttggcacgttacaatcaaacccaaatcacaagagacctgccgcggagctttaatttcagatcagtgggtgctaacggccgcacattgctttagggacgggaatgatcattcactctggagagtgaacgtcggtgacccaaagtctcagtggggcaaagaatttctgattgagaaagccgtcatttcccctggcttcgatgtattcgccaagaaaaatcaaggcatattggaattctacggcgatgacatcgccctgctgaaactcgcccagaaagtgaaaatgagcacgcacgcccggccgatctgtctgccctgtactatggaagctaatctcgctctgaggcgacctcaaggatccacgtgccgcgatcatgagaatgagctcctaaacaaacaatccgtcccagcacactttgttgccctgaacggctcaaaacttaatataaatcttaaaatgggagtcgagtggaccagctgtgcagaagtggtgagtcaagaaaagactatgttccccaatcttactgacgtacgagaagtggtcacggatcagttcctttgttcggggacccaagaggatgaatccccatgcaaaggtgaatcaggcggcgcggtatttcttgagcgcaggttccgtttctttcaggtcggactggttagctggggcctgtacaatccttgcctcggatctgcggacaaaaactcacggaaaagggcgccaagaagcaaagtacccccacccagagattttcacattaacttatttcgtatgcagccctggcttagacaacacctaggcgacgtcctcaactttctgccattatag

SEQ ID NO: 248759 - RNA, 5235 nt, synthetic construct
  misc_feature 1..5235: note = Description of Artificial Sequence: Synthetic coding sequence
  source 1..5235: mol_type = other RNA
atgcgcctgctttggggcctgatttgggcatctagtttctttacactttctctgcaaaagccccgcttattgctgttttctccttctgtcgtgcatttaggcgtccctctgagcgttggcgtgcagctccaggacgtgcctaggggtcaggtcgtgaagggaagtgtgttcttacgaaatcccagcagaaataacgtgccttgctcaccgaaagtcgattttactctctcgagcgagcgggattttgctctactctcattacaggtaccactcaaagacgcaaagagttgtgggcttcatcagctcctccgtggccctgaagtccaattagtcgcccattcaccctggctcaaggacagtcttagccggacgaccaatatacagggcataaacctgctcttctcttcgcggagaggccaccttttccttcagaccgatcagcctatttataatcctggacagagagtgaggtaccgcgtgtttgcgttagatcagaagatgaggccgagtactgatacaatcactgtgatggtagaaaactcacatggactgagagtacgtaagaaggaagtttacatgcctagcagtatctttcaggacgactttgtgatccccgatatttcagaacctgggacctggaagatctccgccagatttagtgacgggctggaatctaacagtagcacgcaattcgaggtgaaaaagtatgttctgccgaattttgaggtcaagatcaccccaggcaagccctacattttaacggttcccggccatctcgatgagatgcagttagatatccaggcacgatacatttacggaaaacctgtacagggagtggcatacgtgcgatttgggctgctggacgaggatgggaaaaagaccttctttagaggactggagagtcagacaaagcttgtgaatggtcaatcgcatatctccctttctaaagccgaatttcaagatgcactggaaaagttaaatatgggcatcaccgacttacagggtctccgactttatgttgccgccgctatcatcgaatccccaggcggggagatggaggaagccgaattgacatcgtggtatttcgtttcttcacccttcagtctcgacttgtctaaaacaaaacgtcacctcgtgcccggcgcccctttcttgttacaggccctggtccgggaaatgagtgggtcacctgctagtgggatcccagtgaaagtgtccgccaccgtgtcaagtccaggtagcgtgcccgaagtccaagacatccagcagaacacggatgggtccggacaggtaagtattccaatcatcattccacaaacaataagtgaactgcaactctccgtcagtgctggtagcccccatccagctatcgcaagattgaccgttgcagcccccccgagtggcggacccggtttcctgtctatagagcgccctgatagcaggcctccaagggtgggcgacactctgaacttaaatttgagagccgtcggatccggagccacgttttcacactactactacatgattctttccaggggccaaattgttttcatgaaccgggagcctaagcgtaccttaacttcagtcagtgtttttgtcgaccaccacttagctccttcgttttacttcgtagctttctactaccacggggaccatccagtcgcaaactcgctacgcgtggatgttcaggccggagcctgtgaaggtaaacttgaattgagtgtggacggggctaagcaataccgaaacggggaatccgtaaaactgcacttggaaactgactctttggccctagttgccctcggagcgttagacacggcactctacgcagccggtagcaaaagccataagccactgaacatgggaaaagttttcgaagcaatgaactcatatgacttaggatgcggccctggaggcggagacagtgccctgcaagtgttccaagcagccggactggcattcagcgacggagatcagtggacgctctctcgtaagagactttcttgcccaaaggagaagacgacaagaaagaaacggaacgtaaactttcagaaagctattaatgaaaagctcggccaatacgcgtcgccaaccgccaagagatgctgccaggatggtgtgacccgactgcccatgatgcgttcctgtgagcagcgagccgcacgtgtccagcagcccgactgtcgtgaacccttcttgtcttgttgtcaatttgccgagtccctgagaaagaaaagcagagataagggtcaggctggcctgcagcgcgccctcgagatactgcaagaggaggatttgattgacgaagatgatattcccgtgcgctcgttctttccggagaattggctctggcgggtggaaacggtagacaggttccagatcttaaccctttggctccccgactcactgaccacctgggagatccacggcctgtcactatctaagactaagggactctgcgtcgccactccagtgcaactgagggtctttcgtgaattccacttacatttgaggctaccaatgtcagtcagaagattcgaacagcttgagctccggcccgtactatacaattatctggacaaaaatttaacagtgtccgttcacgtcagcccagtggaaggcctgtgtctcgcaggagggggtggcttggcacagcaagtcctggtacctgctggctctgcccgaccggtagccttcagcgtagtgccaacagcagctgctgccgtgtcactcaaagtcgtagcccggggaagcttcgagtttccagttggagatgccgtctccaaagtgcttcaaatcgagaaagagggcgccatccacagagaagagcttgtgtacgaattaaaccccctggaccaccgcggaagaacacttgaaattcctggcaacagtgaccctaatatgattccagatggagacttcaattcgtacgtcagggtgaccgcttcagaccctctggacaccttgggcagtgagggagctttgtctcccgggggtgttgcaagtctactgcgactgccaaggggatgcggcgaacagacaatgatctatctcgcccctaccttagccgcctcaagatatctggataagaccgaacaatggtcaaccttgcccccagaaaccaaagatcacgccgtcgatctgatccagaaaggatacatgcgcatacagcaatttcggaaggctgacggatcctacgccgcatggctcagccgagactcttccacatggctaactgccttcgtacttaaagtccttagtttagcacaagagcaagttggcggttctcccgagaaactgcaggaaacatccaattggcttcttagccagcaacaggcggacggctcatttcaagacccctgccctgtgttagacaggtccatgcaaggtggactggttggtaacgacgagaccgtggctttgacagcttttgtaaccatcgccctccaccacgggctggcagtgttccaggatgagggcgctgagccactgaaacagcgcgtggaagcatcaatctcgaaggctaactctttcctaggtgagaaggcctctgcaggcctattgggcgctcatgctgcagcaatcactgcatatgctctgactctcacaaaagcgccagtggatctcctgggagtcgcccacaacaacctgatggctatggcacaagagaccggtgacaacctctactggggctcagtgacaggctctcaatccaacgcagtgtctccaactcccgccccccgtaacccctccgacccaatgcctcaggctcccgctctgtggatagaaacgacggcatacgcattgctgcatctcctactgcatgaaggcaaagccgaaatggccgaccaagccagtgcttggctgacgcgccagggatcatttcagggtgggttccggagcacgcaagatacagtgattgccctagatgctttatcagcctattggatcgcctctcataccaccgaggaaagagggttaaatgttactctgagttctacaggccggaatggcttcaagtctcatgcactgcaattgaacaatagacagatacggggcctagaagaagaacttcaattcagcttggggtcaaagatcaacgttaaggtgggtggtaactccaagggcacattgaaggtcttaagaacctataacgtgttagacatgaaaaataccacctgtcaggacctgcagatcgaggttactgtgaaaggacacgttgaatataccatggaggccaatgaggattatgaagactacgagtatgacgaacttccagccaaggatgaccccgacgctccccttcagcccgtgacacctttgcagctttttgaaggccggcgcaataggcgtagacgagaagcacctaaagtggtggaagaacaggagtcaagagtccattatactgtgtgtatctggagaaacggcaaggtgggcctgtccggaatggccattgccgacgtgacattgctctctgggttccacgccctgagagcagatctggagaagctcacctcgctcagtgatcggtacgtcagccacttcgaaacggagggtccccatgtgttactgtacttcgattcggtcccaaccagtagagagtgtgtgggttttgaagcagtccaggaagtaccagtgggcctcgtacaacctgcaagcgctactttgtatgactactataacccagaaagacgttgctccgtgttttatggcgccccatctaaatctcggctattggccacactgtgttcagccgaggtgtgtcaatgcgccgaaggtaaatgtccgagacaaagacgcgctttagaaagaggattacaggacgaagacgggtatcgcatgaagtttgcctgttattatccccgggtggagtacggttttcaagttaaggttctaagagaggactcccgcgccgcctttcgactattcgagaccaagatcacacaggttttacatttcacaaaagacgtcaaagctgctgccaatcagatgcggaacttcctggtgagggctagctgcagactgcgtctggagcctggaaaggagtatcttattatgggcctcgatggtgcaacttacgacctagagggtcatccacaatacttgctcgattccaacagctggattgaagaaatgccctctgagcgcctatgtaggtctaccagacagagagcagcatgcgcccagctgaatgactttctccaagaatacggtacccagggctgccaggtctag

SEQ ID NO: 248760 - RNA, 5097 nt, synthetic construct
  misc_feature 1..5097: note = Description of Artificial Sequence: Synthetic coding sequence
  source 1..5097: mol_type = other RNA
atgagactgctgtggggccttatatgggcttcttctttttttaccttatccctccagaagcccaggctactcctgttttctccctccgtcgtccacctgggcgttccactctcagttggtgtgcagctccaagacgttccaagaggtcaagtggttaaaggatcggtattccttcgaaacccatcccgcaataatgtaccttgctccccaaaagtggactttacactgtcgtccgagcgcgatttcgccctgcttagtctgcaagtgcccctgaaagatgccaagtcctgtggactgcaccagctcctcagggggccagaggtacagcttgtagcgcatagcccgtggcttaaagactccctgtcacgcactactaatatccaaggaatcaacttattgttctccagcagacgagggcatcttttcctccaaaccgaccagccaatttacaatcccggccagagagtaagataccgtgtcttcgctttagaccagaaaatgagaccctctactgacactatcactgtgatggtggaaaacagccatggcttaagagtcagaaagaaagaagtctatatgcccagctctattttccaagacgatttcgtaatacccgatatctctgaacccggaacatggaagatttcagcgagatttagcgatggactggagagcaacagcagtacacagttcgaagtgaagaaatatgtgctccctaacttcgaagttaaaatcaccccaggcaagccctacatcttaaccgttcccggccacctagacgaaatgcagctggatattcaggctcgctacatatatggaaagcccgtgcagggcgtggcttacgtgagatttggactgctagatgaggacggtaagaaaacattttttagaggtctcgaatcgcaaactaagcttgtcaacggccagagccacatcagcctctctaaagccgaattccaggacgctcttgagaagttaaacatgggaatcacagacctccagggcttgagactctacgtcgctgctgccattattgagtcaccaggaggagaaatggaggaagctgagctgacaagttggtactttgtgtcgtcacccttcagtcttgatctgtctaaaactaagcggcacctcgttcccggcgcccctttcctcctgcaggcgttagtccgtgagatgagtggctcccctgcatccgggatcccagtgaaggtttccgccacagtcagtagtcccgggtccgtgccagaagtccaggatattcaacagaacaccgatggaagcggccaggtatctatccctatcattataccccaaaccatttcagaactccagctttcagtgtctgccgggtcccctcatcctgcaatcgcccgccttacggtcgctgccccccccagtggaggacccgggttcctgagcatcgagcgaccagatagtagaccaccccgcgtaggggacacactaaacttgaatctcagagccgtgggctccggagccactttctctcattattattacatgatcctcagccgcggccagatagtcttcatgaatagagaaccaaaaaggacattaactagtgtgtcagtttttgtcgaccatcatctggctccatctttttattttgtcgccttctattatcatggtgatcatcctgtggcaaacagtctcagggtagatgtccaagctggagcatgcgaaggtaaactggagttgtcagtagatggcgctaaacagtatcgcaacggcgagtctgtgaaactccatttggaaacagatagcttagcactcgtagccctgggcgctctcgacactgccttgtacgcagctggttcgaaatctcataagcctcttaatatgggcaaggtgtttgaggccatgaactcatatgacttaggatgcggccctggcgggggcgatagtgctctccaggtattccaggcagccggattagccttcagcgatggagatcaatggaccttatcaagaaaacgcctgtcttgccccaaggaaaagactacaaggaagaaaagaaacgtcaactttcagaaagccatcaacgaaaagctggggcagtatgcctccccgaccgctaaaagatgctgtcaggacggggtgacaaggctccccatgatgagaagctgcgagcaacgagctgctagagtccagcagccagactgcagagagccgtttctgtcatgttgtcaattcgctgagtcgttacgcaagaagtcaagggataaggggcaggccggacttcagagagcactggagatacttcaggaggaggaccttattgacgaagacgatatccccgtgagatccttctttccagaaaactggctttggcgcgttgaaacagtagacaggttccaaattctgacactgtggctgccagatagcctgactacttgggaaattcatggactttcactcagtaaaacaaaaggactatgtgtcgcgacgccagtgcagctgagagtgtttcgcgagtttcacttacacttacgactgcctatgagcgtccgtagatttgagcagttagaattgcggcccgtgctgtacaattatctggacaaaaatctgaccgtgtcggtgcacgtgtcacctgttgaaggattgtgtctcgccggaggaggtgggctggctcagcaggttctggttccagccgggtctgcgcgccctgtggcttttagcgtcgtgcccactgccgctgccgccgtgtctctaaaggtagtcgctcgggggtccttcgaatttccagtcggcgatgcagtctccaaagtcctacaaatcgaaaaagaaggtgctattcacagggaagagcttgtgtatgagctgaatccattagaccataggggtagaaccttagaaataccgggaaactctgaccctaatatgatccccgacggagacttcaatagctacgtgcgcgtgaccgccagtgatcccttagacactctcgggtctgaaggcgccctgagtcccggaggagtggcatctctgctgagactaccgagaggctgcggcgagcaaaccatgatatatctggcccccacacttgctgcctcacgatacctggataagaccgagcaatggagtaccctcccgcccgagaccaaggatcacgccgtcgatttaattcagaagggttacatgcgaatacaacaatttagaaaggctgacggttcttacgctgcatggctgtcacgcgatagctcaacttggctcacagccttcgtgctcaaagtgctgtcactggctcaggaacaggtcggcggatcacctgagaagctgcaggagacttctaattggctgctctcccagcagcaagcagacggctcttttcaagatccatgtcccgtccttgacagatcaatgcagggaggacttgtcggcaacgatgaaactgttgctctcaccgcatttgtaaccatagcacttcatcatggtctcgcagtatttcaggacgagggtgccgagcccttgaagcaacgagttgaggcctccataagtaaagccaattcttttctgggggagaaggcctcggcaggactcctcggagcccatgcagcagccattacagcctacgccctcaccttgacgaaagcacccgtcgacctgctgggggtggcacataacaacttaatggccatggcacaggaaaccggtgataatttgtattggggctccgtaactggctctcagtcgaatgcagtctcccctactccagcgcctaggaacccctccgatcccatgccacaagcacctgcactttggatagagacaacagcctatgccctcctgcatttattgctccacgaaggcaaagcggagatggctgaccaagcctccgcctggctaacaagacagggtagttttcaaggcggttttcgaagcactcaggataccgtgattgcattggacgccctatcagcttattggattgcctcccacacaaccgaagagcgcggcctaaacgttactctctcctccactgggcgcaacggcttcaagagtcatgccttacagttgaacaatagacagattaggggactcgaggaagaactgcaatttagtcttggctctaaaattaatgtgaaagttggcggcaattctaaagggacgcttaaggtactgcgcacatacaacgtgctggatatgaaaaatactacctgccaagatctccaaatagaggtgaccgtgaagggacacgtggaatacacaatggaggccaatgaagactacgaggactatgaatatgatgagttacctgctaaggatgaccctgacgccccgttacaacctgtcactcccttgcaactgtttgagggcagaaggaaccgtagaagaagagaagcccccaagctgactagtctctccgatcgttatgtgagccactttgaaactgagggtccccatgttcttctttattttgatagtgtgccaacaagtcgagaatgtgtcgggtttgaagccgtgcaagaagttcctgtggggcttgtacagccagcttctgctacattatatgactattataatcctgaaaggaggtgttctgtcttctatggggcccctagcaaaagtcggttactagctaccctgtgctcagccgaagtatgtcagtgtgctgaaggaaaatgtcctcgtcagagacgggccctggagcgcggacttcaagacgaagatggttaccgcatgaagtttgcttgttactatcctagggtggagtatggctttcaggtgaaggtccttcgggaggacagcagggctgcatttagactatttgaaactaaaattacccaggtcctgcacttcaccaaggacgtcaaggctgccgcaaaccagatgaggaatttcctagtgcgagccagttgccgcctgagactggagcccggaaaagaatatttaatcatggggttggacggagccacttatgatttagaggggcacccacagtatctgttagattccaatagttggatagaggaaatgccatcagagagactctgtaggtccacccgccagagagcagcatgcgcccagttgaatgacttcttacaagaatacggtactcaaggctgtcaggtgtag

SEQ ID NO: 248761 - RNA, 813 nt, synthetic construct
  misc_feature 1..813: note = Description of Artificial Sequence: Synthetic coding sequence
  source 1..813: mol_type = other RNA
atgtgtcccgaagattcgctgcaggtccccctgaaggatgccaaaagctgtggcttacaccagctcctccgcggaccagaggtccagctagtggcccactcgccatggctcaaagactcgcttagtcggaccactaatattcaaggaataaatttacttttctcctctaggcgcggtcatttgttcttgcaaaccgatcagccaatttataacccaggccagagagtaaggtatagagtgtttgcattagaccagaaaatgcgacccagtaccgataccatcaccgtgatggttgagaatagtcacgggctgagggtgagaaagaaagaagtgtatatgcctagcagcatctttcaggacgactttgtgatacccgacattagtgaaccaggtacttggaagatttcggctagattctctgatgggctggagtcaaactcaagcacccaatttgaggtgaaaaaatacgtcctgccaaatttcgaggtaaaaatcactcccggaaaaccttacatcctcacagtccccggtcatctcgacgaaatgcagctggacattcaggctcgatacatttacggcaagcctgtgcagggagtagcctatgtgagatttggactgttagatgaagatggcaagaagacttttttccggggcctggagtcacagaccaagctggtaaatggccagtcgcatatttctctgtcaaaggccgagttccaggatgcgctagagaagctgaacatgggcattaccgatctgcaaggactgcgactgtacgtagcggcagccatcatagagtcacccggggggtag

SEQ ID NO: 248762 - RNA, 675 nt, synthetic construct
  misc_feature 1..675: note = Description of Artificial Sequence: Synthetic coding sequence
  source 1..675: mol_type = other RNA
atggccacccaccacactctttggatgggcttagcgctgttaggcgtactgggagatcttcaggcggcgccagaggcacaggtgtccgtgcaacccaattttcagcaagataaattcctgggcagatggttttccgccggcctcgcatcaaattcttcctggctccgcgagaaaaaggccgccttgtctatgtgtaagagtgtcgttgcacccgctaccgacggagggctgaacctcacatccactttcctccggaagaaccaatgtgaaacgaggaccatgctgttacagcccgcagggtcactcggatcctactcttataggtccccaagggaatggggcctgcaccgaccgccgggaccatctctcggagcaacattggccgggaccacccttggccagccccctgcagcagaaatccacggtgtaggagactggggcagcacttattcagtgtctgttgtggaaaccgattacgaccagtacgctctgctgtactcacaaggatcaaaaggaccaggtgaagatttcaggatggccactctttatagccggacccagacacctcgagcagaactgaaagagaaatttaccgctttttgcaaagcacagggctttaccgaagacacaattgtatttttgcctcagactgacaaatgcatgaccgaacaatag

SEQ ID NO: 248763 - RNA, 4992 nt, synthetic construct
  misc_feature 1..4992: note = Description of Artificial Sequence: Synthetic coding sequence
  source 1..4992: mol_type = other RNA
atggccacagatggagcaagctgtgaacccgatctgtcccgggcaccagaagatgcagctggagccgcagcagaagcagccaagaaggagttcgacgttgacaccctgagcaagagtgagcttcgcatgctcctctccgtcatggagggtgagttagaagcgcgcgacctggttatcgaagcactccgcgcccgacggaaagaagtattcatccaggagaggtatggaaggtttaacctcaatgacccattcctcgccctccaaagagattacgaagcaggcgccggcgataaagagaaaaagcctgtctgtaccaacccactgtcaattttggaagcagtcatggcacattgtaaaaaaatgcaggagagaatgagcgcccagctcgcggcagctgaatcccggcagaagaaactggagatggaaaagctacagcttcaggccttagaacaggagcataaaaaactcgccgcacgactcgaagaggaaagaggcaaaaacaaacaagttgtactgatgctggtcaaagaatgcaaacagctttccgggaaggtgatcgaagaggcacagaagctggaggacgtgatggccaaactagaggaggagaagaaaaagaccaacgagctggaggaagagttgtcagcggaaaagcggagatctactgaaatggaagcccaaatggaaaagcaactttcggagtttgatacagagagagagcagctgcgagccaaattgaaccgggaggaagcccacactaccgacctgaaagaggaaattgataagatgagaaagatgatagaacagctaaagcggggatctgatagcaaaccgagtttgagtttgccacgaaagaccaaggatcgcagactggtatccatttccgttgggacagaggggaccgtaacccgctctgtcgcctgtcagaccgacctggtcactgagaacgccgaccacatgaagaagctcccccttactatgcccgtcaagccttcaacaggctcgcctctggtctccgctaatgccaagggcagtgtgtgcacctccgcgaccatggcacgcccgggaatcgatagacaagcctcatacggagacctaattggcgcatccgtaccagctttccctccgccctctgccaataagatcgaagaaaacggcccctcaactggttcaacccccgacccaacctctagtacccctcctttgccgtctaacgccgctcccccaactgctcaaacccccggcattgctccccagaattcacaggcccccccaatgcactccctccatagcccttgcgcgaacacatcactacatcccggtttaaacccacggattcaagctgcacggttcaggtttcaaggtaatgctaatgatccagaccagaacggaaacactacgcagtcaccacccagtcgagacgtgagccctacatccagagacaaccttgtggccaaacagcttgctagaaacaccgtgacccaagccctgagccggttcaccagtccacaagcaggagctccctccagacccggggtgccccccacaggcgacgtcggcacacacccccctgtcggaagaacatccctcaaaacccacggagtagctcgcgttgatcggggcaacccacctcccatcccacccaagaagccgggcctttcacaaactccatcacccccccacccccagttgaaggtgatcatcgacagcagccgcgcatctaataccggagctaaagtcgataacaaaacagtcgcttccacaccttcttccctccctcaaggcaatcgggtgattaacgaggaaaatttacccaagagctcttccccccagctgcctcccaaaccaagcatcgatctcacagtcgcccccgcaggatgtgctgtgagcgcacttgctacatcacaggtgggagcctggccagctgccacacctggacttaatcaacctgcatgttcagactcaagcctcgtgatccctaccaccatcgcattctgttcgtccatcaacccagtgtctgcttcatcttgtagacccggcgcttccgactcgctcctcgtaacagcctccggctggagcccttccctgaccccactcctgatgagcggcggacccgccccactcgccgggcgcccaacgctcctgcagcaggctgccgctcagggaaatgtgacacttctctccatgttattaaatgaggaagggctggacataaactactcttgcgaagacggacattctgccctctactccgcagccaaaaatggacatactgactgcgtcagactgttgctcagcgcagaggcccaggtgaacgccgccgataagaacggatttactcccctctgcgccgctgctgctcaaggtcatttcgaatgcgtggagctcttgatctcatacgatgctaacattaatcacgctgccgatgggggccagacacctttatacctagcttgcaaaaatggcaataaggagtgtatcaaactgctgttagaagcgggcacaaacaggagcgtaaagacaaccgacggatggacaccagttcatgcggcggtagacaccggtaatgttgactctctgaaattacttatgtaccaccgcatccccgcccatggaaatagcttcaatgaagaggagtcggagagctccgtctttgacttggatggtggcgaggagagccccgagggaatttcaaaacccgttgtgccagctgacctaattaatcatgccaaccgggaaggttggacggctgcacatatcgccgctagtaaaggattcaaaaattgtctggaaattctgtgcagacacggggggcttgagccagaacggcgagataagtgtaaccggaccgttcatgacgtcgccacagacgattgtaaacatttgctagaaaacttaaacgctttgaaaatacccctgcggattagtgtgggagagatcgagccgtctaactatggtagtgacgacctggaatgcgagaatacaatttgtgccctaaacataagaaagcagacttcatgggatgacttctctaaggccgtgtctcaagccctgactaaccatttccaggctatttcttctgacggctggtggtcactcgaggacgttacttgcaataacacaactgactctaacataggtttgtctgcacgaagcatacgctctatcaccctggggaatgtgccctggtccgtcggtcaatcctttgcccagagcccatgggattttatgaggaaaaataaggcagaacacatcacagtactcctgtcagggcctcaagagggctgtttgtcttcggtaacttacgcatcaatgattccactccaaatgatgcagaattatctgaggcttgtcgagcagtatcataatgtcatatttcatggaccagaagggtctctccaagactacatagttcatcaactggctctgtgtctcaagcacaggcaaatggctgccggattttcttgcgagatagtgcgcgccgaagtggatgctggatttagtaaggaacagctgctggatctgttcatcagtagtgcttgtctgatccctgttaagcagagcccatcaaagaagaagattattatcatcctcgaaaatctggaaaaatcctcattatccgagctcttgcgggactttttggcacccctggagaataggagtacagagagcccctgcaccttccagaaggggaacggccttagcgaatgctactatttccacgaaaactgcttcctaatgggaaccatcgcaaaagcatgtttacaaggatctgatcttcttgtacagcagcactttcggtgggtacaactcagatgggacggcgaaccaatgcagggtcttctgcagcgcttcctcaggagaaaggtcgtaaacaagtttaaaggccaggctccctctccttgtgatcctgtttgtaaaattgtggactgggctctgtccgtgtggagacagctgaattcgtgtcttgcccggctaggcacaccagaagcccttttaggccccaagtattttctgagttgcccagtagtcccaggccacgctcaggtaacagtgaaatggatgtcgaaactttggaatggtgtgatcgcacctcgcgtgcaggaggccatcttatcccgagcgtcagtgaagcgccagcccggattcggacaaaccacggcaaagcgccacccttctcaggggcaacaagccgttgttaaagccgcgctttctatactcctgaataaggctgtgctgcacggctgccctctgcctcgcgccgaacttgaccagcataccgccgactttaaagggggatcttttcctttaagcatcgtgagctcatacaacacttgcaataaaaagaagggagaatctggagcctggcggaaagtgaacacctcacccagacgaaaatcaggccggttctcactgcctacctggaataagcccgatctcagcactgaagggatgaaaaacaagaccatctctcaacttaattgtaatagaaatgccagtctgtctaagcagaagagccttgagaacgatctctccctgacccttaatttagatcagagactgtcattgggtagcgacgatgaagctgatttggttaaagagcttcagagtatgtgcagctccaagtccgagagtgacatctctaaaattgccgacagccgcgacgaccttcggatgttcgactcgtcaggaaataaccctgtcctgtccgccaccattaataaccttaggatgcctgtgagccagaaagaagtcagtccattatcaagtcatcagacaacagagtgctctaactcgaagagtaaaaccgagctaggggtgagtcgcgtgaagagcttcttaccagtgccccggtctaaagttacccagtgctcacagaataccaaaaggagcagctcatcaagcaacaccagacagatcgaaatcaataataatagtaaagaagtgaattggaacctgcataagaacgagcatcttgaaaaacccaataaatag

SEQ ID NO: 248764 - RNA, 1233 nt, synthetic construct
  misc_feature 1..1233: note = Description of Artificial Sequence: Synthetic coding sequence
  source 1..1233: mol_type = other RNA
atgcagagactcctgtttccaccactgcgtgcactcaagggccggcaatatctgcctttgctcgctcctagggcagccccacgcgcccagtgcgattgcattcgccgaccattgagaccagggcagtactccacaatcagcgaggttgcattgcagtccggcagaggaacggtaagtttaccgagcaaggccgccgagcgagtggttggaaggtggcttctagtttgttccggtactgtcgcaggcgcggtgatattaggcggcgtcacaagacttactgagtcagggctttctatggtggattggcacttaatcaaagaaatgaaacctccaacttctcaagaagagtgggaagctgaattccaacggtaccagcaatttcctgagtttaaaattttgaaccatgacatgacgttgacagagttcaaattcatttggtacatggaatattctcataggatgtggggacgactggtaggactcgtgtacatcctgccggccgcatacttttggcgcaagggctggctttcacgaggaatgaagggtagagttctggctctctgtggactcgtgtgctttcagggcctcctcgggtggtatatggtaaagtcgggactggaagaaaaatccgatagtcatgacatcccccgtgtatctcaatacagactggccgcacatctcggatccgcattggtcttgtactgcgcctctctatggactagtttatctttgctactaccaccacataagctgcccgagacacaccagttgctacagctgagacgcttcgcacacggaacagccggcctggtgttcctgacagccctgtcgggtgcttttgtggctggcctagacgccgggttggtgtataattcttttcccaaaatgggtgaaagttggattcccgaagacctctttactttcagcccaatcctgcgcaacgtgtttgagaatccaacaatggtccagtttgaccaccgtatcctcggaatcacaagtgttaccgctatcactgtgctgtattttctttcgagaaggatccccttacctcgtcggacaaaaatggctgccgtaactctcctggccctagcctacactcaggtcgggctcggcatttcgaccctcctcatgtacgtcccaacccctctggccgccacccatcagtctggatcgctcgctctgctcacgggagcactgtggctcatgaacgaactgcgccgcgtaccaaaatag

SEQ ID NO: 248765 - RNA, 2604 nt, synthetic construct
  misc_feature 1..2604: note = Description of Artificial Sequence: Synthetic coding sequence
  source 1..2604: mol_type = other RNA
atggaggtgccagccgcaggccgggtgccggcagaaggtgccccaacagccgcagtcgctgaagttaggtgtccaggtccagcccccctgaggctattggagtggcgtgttgcggcgggggcagccgtaagaatcggcagcgtactggcagtctttgaggctgcagcaagtgcccagtcatccggggcaagtcagtcaagggtagcgtctggtggatgtgtccgtcccgctaggccagaaagaagactgcgtagcgagcgcgctggcgtcgtaagggagctatgcgcacagccaggtcaggtcgtcgcccccggagcggtattggtgcgtcttgaaggctgtagtcatccagtggtgatgaagggcttgtgtgcggaatgcggacaggatctgacgcagctgcagagtaagaatgggaaacaacaggtacctctcagtactgcaaccgtttccatggtgcacagcgttcctgagctaatggtttccagcgagcaagccgagcaattaggaagggaagaccaacagcggttgcacaggaacaggaagctggtgttgatggtagacctcgaccagacactgatacatacaaccgagcaacactgccagcagatgtctaacaaaggcatctttcattttcagctcggccgcggggagcctatgctacacactagactgcggccgcattgcaaagacttcttggagaaaatcgccaagctttacgaacttcatgtattcacatttggctcacgcctttatgctcacactatagccggctttttggatcctgaaaaaaaactgttttctcaccgcatattgtcccgtgatgaatgtattgatccctttagcaaaactggaaatcttcgcaacctttttccatgcggagattcgatggtttgtattattgatgatagggaggacgtctggaagttcgcacccaacctgataaccgtgaaaaagtacgtctactttcaggggactggcgacatgaatgcccctccaggctcacgggagagtcagactagaaaaaaggtaaatcattcccgcggcacagaggtcagtgaaccaagcccccccgtgagagaccccgagggagtgacacaagcacccggcgttgaaccttccaatggactagaaaagcctgcgcgggaattgaacggatctgaagcagcaacccccagggactcccctcggccaggtaaacctgacgaaagggatatctggccccctgctcaagcgccaaccagttcacaggagcttgcgggggcacctgaaccccaaggcagctgtgcacagggcggccgtgtcgcaccaggccaaagaccggctcagggcgctaccggaaccgatctggatttcgaccttagcagtgacagcgagagttcttccgagagcgagggcacaaaatcgtcatctagcgcatcagacggggagagcgaaggtaagagaggaagacagaaacctaaagcagcacccgaaggtgccggcgctttagcgcagggatctagcttggagcccgggaggccagcagcccccagtctgcccggagaagcggagcccggagcacatgcccccgataaggagccagagctgggtgggcaggaagagggagagcgcgatggtttgtgtggacttggcaacggatgtgctgatcgaaaggaagctgagaccgaatctcagaacagcgaactgagtggagtgaccgctggggagagcctggaccagtcaatggaggaagaggaagaagaagacaccgatgaggatgaccacctaatttaccttgaggaaatactggtgagagtacacactgactattacgctaaatacgacagatatttgaataaggaaatcgaagaagcacctgacatcaggaaaattgtcccagagttgaaaagtaaagtacttgccgatgtcgcaattatcttctctggcttgcacccaactaactttcctatagaaaagactagagaacattaccacgcaaccgcccttggtgccaagatactgactcggctggtcttatctcctgatgctcctgatcgagctacacacttaatcgccgcccgcgccggcacagagaaggtcctacaggctcaggagtgcggtcacctccacgttgtgaatcctgattggctgtggtcatgccttgaaagatgggacaaagtggaagaacagctgtttcccttacgcgacgatcatacaaaagctcagagagaaaactcaccagctgcatttcctgaccgcgaaggagtgccccccaccgccctgtttcaccctatgccggttctccctaaggcacagccaggccctgaagttagaatatatgacagcaacacaggtaagctgatcagaaccggcgcaagagggccacctgcccctagcagctcactaccaattcggcaggagccgtcaagctttagatggaccacatctcttgaaaaggctgccacaactgcaacagctcgcaggggaggattacggtccaggagaagaagtcccagtcctggctctcaggggcctgcaggtagtggtaggtccgggcatttaaggccagcacggggtgcacggcagggcgccggaggccccgaagctacccgtggaagctag

SEQ ID NO: 248766 - RNA, 606 nt, synthetic construct
  misc_feature 1..606: note = Description of Artificial Sequence: Synthetic coding sequence
  source 1..606: mol_type = other RNA
atggcaagggactacgaccatctatttaaactgctcatcatcggggattccggtgtcggaaagagctcactgctgctccgttttgctgataatacattttcaggctcttatattacaaccattggagtagacttcaagataaggacagtggagatcaacggcgaaaaagtgaaactccagatatgggacaccgccggccaagaacggttcagaactattacgagtacttattaccgtggcactcatggtgttattgtggtctatgatgtgacatctgccgagagttttgtaaacgtgaagaggtggctgcacgaaatcaaccagaattgtgacgacgtgtgcagaattcttgtgggcaataagaacgatgatcccgaaagaaaggtggtagaaactgaagacgcctataagtttgctggccaaatgggtatacagctgtttgagacatccgcaaaggaaaacgtaaacgtggaagagatgtttaattgcattaccgaacttgtcttgagagcaaaaaaagataacctggccaagcagcaacagcagcaacagaatgacgtggtgaaattgacaaagaatagtaagagaaaaaaacggtgctgttag

SEQ ID NO: 248767 - RNA, 1530 nt, synthetic construct
  misc_feature 1..1530: note = Description of Artificial Sequence: Synthetic coding sequence
  source 1..1530: mol_type = other RNA
atggcagcagctgctggaatgctgcttctaggattgctccaggccggaggaagtgtgctcggtcaggccatggagaaagtgactggtggaaatctcctctccatgctccttattgcctgtgcattcaccctgagtctcgtctacctgatcaggctagccgcaggacatctcgttcagttgccagccggagtcaagtctccgccatacattttctcacctattccttttctgggacacgcaatagcctttggtaagtctcccatcgagtttttagagaacgcgtacgaaaaatacggcccagtctttagcttcactatggtgggtaaaacatttacatacttgttggggtccgacgccgcagcactgcttttcaatagcaagaacgaggatttaaatgctgaagacgtgtatagccgccttacaacccctgtctttggaaaaggagtggcttacgatgtaccaaatcccgtatttctggagcaaaagaagatgcttaagtctggactaaatattgcgcactttaaacaacacgtctctatcatcgagaaagaaacaaaggaatacttcgaatcctggggggaaagcggagagaagaatgtgttcgaagcactatccgagcttatcattctcaccgcgtctcactgccttcacggcaaagaaataagatctcaattgaacgagaaggtggcccagctctacgcagacttagatggcgggttcagccacgcagcgtggctgctgcctggttggcttccattgcctagcttccgacggagagaccgcgctcacagagaaattaaggatattttctataaagcaattcaaaaaaggagacaatcacaggagaagattgacgatatactacagacattgctagatgctacctataaggatggacgcccgcttaccgacgacgaggtggctggcatgttgataggcctattgcttgctggtcaacataccagctccaccacttcagcctggatgggatttttcctggcacgtgacaagactctgcagaagaagtgctacctggaacagaaaacagtgtgtggcgagaacctaccacctctcacctatgatcagcttaaagatttaaacttactggatagatgcatcaaggaaacactcagactccgaccgcctatcatgattatgatgcgcatggctagaactccccaaactgtggccggctataccattccaccagggcatcaagtatgtgttagcccaactgtgaaccagcgcctaaaggacagctgggtagaaagacttgattttaaccccgatagatatctccaggacaacccagcctctggggagaagttcgcgtacgtcccattcggcgctggcagacaccgatgcatcggggaaaatttcgcatacgtgcagataaaaaccatctggtccacaatgttaagactgtacgagttcgacctgattgatggctacttccctacagtaaactataccaccatgattcatacgccagagaaccccgttattagatataagcgccgttccaaatag

SEQ ID NO: 248768 - RNA, 1080 nt, synthetic construct
  misc_feature 1..1080: note = Description of Artificial Sequence: Synthetic coding sequence
  source 1..1080: mol_type = other RNA
atgaaggcaaccattattctactgttgttagctcaggtcagctgggctgggccattccaacaaaggggccttttcgacttcatgctggaagacgaagcaagcggtattggcccggaagttcccgatgatcgcgacttcgaaccctccctgggcccagtttgtccattcagatgtcagtgccacttgcgggtcgtacagtgcagcgatttaggcctagataaagtacccaaagatctccctcctgacaccactttgttggacttacaaaataataaaatcaccgaaattaaggatggagacttcaaaaatctgaagaatctccacgcactgatcctggttaataataaaatctctaaggtttcccccggcgcatttaccccacttgtgaagttggaacggctttatctgtctaaaaaccagcttaaggagttgcctgaaaaaatgcccaaaactctccaggaactgagagcccacgaaaatgaaattacaaaagtgcgaaaagtcaccttcaatggactgaatcaaatgattgtcatcgaactcggcacaaatccactgaaatcaagcggtattgaaaacggcgcatttcaaggcatgaagaaactctcttacatcaggatcgccgatacgaatattacctccatacctcagggcctgcctcctagcctcaccgagctccatcttgatggaaataagatctcacgagtagatgccgctagccttaaaggactcaacaacctcgcaaagcttggactttcctttaatagcataagtgcagtggacaatggcagcctcgcaaatactcctcacctacgggaacttcacctggacaataataaactaactcgggttccaggcggactagccgagcataaatatatccaagtagtgtaccttcacaacaataatatttctgtcgtaggatctagtgatttctgtcccccaggacacaacaccaagaaggcctcttactctggcgtcagtctattttcaaaccccgtgcagtattgggagatccaaccgtcaacttttcgatgcgtctatgtccgctcagccattcaactgggaaactacaaatag

SEQ ID NO: 248769 - RNA, 909 nt, synthetic construct
  misc_feature 1..909: note = Description of Artificial Sequence: Synthetic coding sequence
  source 1..909: mol_type = other RNA
atgcactaccccacagctcttttgttcctgatacttgccaatggggcacaggcctttagaatttgcgcttttaatgcccagagattgaccctggctaaagtggcacgcgaacaggttatggatacattagtccgcattcttgccagatgtgacattatggtcctgcaggaagtggttgacagctccggtagcgctatccccctactgctgcgggaactgaacagatttgacggatcaggcccctattctaccttgagctctccccagttagggcggtcgacctatatggagacttacgtttatttttatagatcccataaaacccaggtcctgagctcctatgtatacaatgatgaagatgacgtattcgctagggaacccttcgttgcgcaattcagcctgccctccaatgtcctcccatctttagtattagtaccgcttcataccactcctaaagccgtagagaaagagctgaacgctctttacgatgtctttctggaggtgagtcagcactggcagtcaaaagatgtcattctacttggggatttcaatgctgactgtgcctcacttactaagaagagacttgacaagctggaattgagaaccgaacctggctttcactgggttatagcagatggtgaggatactacagtacgcgcaagcacacattgcacatatgatagagtggtactgcacggcgagcgttgccgttccctcctgcacaccgctgcagcatttgactttcccacatctttccagctgacagaagaggaggccctcaacatctcggatcactacccagttgaagtggagcttaaattatctcaagctcattctgtacaaccattatctctgaccgtccttctcctgctgtcgctgctctccccccaactgtgccccgccgcatag

SEQ ID NO: 248770 - RNA, 282 nt, synthetic construct; identical to SEQ ID NO: 248164
  misc_feature 1..282: note = Description of Artificial Sequence: Synthetic coding sequence
  source 1..282: mol_type = other RNA

SEQ ID NO: 248771 - RNA, 1689 nt, synthetic construct
  misc_feature 1..1689: note = Description of Artificial Sequence: Synthetic coding sequence
  source 1..1689: mol_type = other RNA
atggacgccatgaaacgaggcttatgttgcgttctcctattgtgcggtgccgtgtttgtgagcccatcccaagagattcacgccagatttagacgtggcgcccgatcctaccaggtgatctgcagagacgaaaaaacccagatgatctaccaacaacaccagagctggctgagacccgtgctccggagcaaccgggtggagtactgttggtgcaattccgggagggcgcagtgccactcagttcccgtcaagtcgtgttcggagccacgatgttttaatggagggacatgtcagcaagccttgtacttctccgacttcgtttgccaatgtcctgaaggcttcgcaggaaagtgctgcgagattgacacccgtgccacatgctatgaggatcaagggatctcctaccggggcacctggtctacagcagagtctggagcagaatgcaccaattggaactctagcgcactcgctcagaaaccctactctggcagaagacccgacgcaattcgacttggcctgggcaatcataactactgtagaaatcctgatagggattcaaagccttggtgctacgtttttaaagctggtaagtatagctctgagttctgctctacacctgcctgctcagagggcaattccgattgttacttcgggaatgggtccgcatacagaggcacacatagtcttactgaatccggtgctagctgtcttccttggaatagcatgatccttattggtaaagtatacaccgcacaaaacccaagcgcacaggctttagggctcgggaagcacaactactgtcgaaaccctgacggcgacgcgaaaccttggtgccacgtgctcaagaatcggcgcctgacttgggagtactgcgatgtacccagctgctcaacatgtgggttacggcaatattcgcagcctcaattccgtattaaggggggtttgttcgctgatatcgcttctcacccttggcaggctgccatattcgccaaacaccgacggtccccaggagaaaggttcttgtgtggagggatcctgattagtagttgttggattctgtctgccgctcattgcttccaagaacgctttccacctcaccatcttactgtgatcctaggaaggacgtatcgagtagtgcctggagaagaagaacagaaattcgaggtggaaaagtatatcgtccataaagagtttgatgacgatacctacgacaacgacattgcactgttacagctgaaatctgattcatctcgctgtgcccaggagtctagcgtggtacgaacagtatgtttacctcctgccgacctgcagctgccagattggactgagtgcgaactaagcggctatggaaaacacgaagccctgtcacccttctactcagagcgccttaaggaagcacacgtaaggctctatccctcctctcgctgtacaagccagcaccttcttaaccgaaccgtgacggataacatgctttgcgccggtgacacaagatctgggggaccacaggcaaaccttcatgacgcttgtcagggcgacagtggcggccccttagtttgcttgaatgatggaagaatgacacttgtggggattataagttggggtcttggttgcggccagaaggatgtcccaggcgtgtacactaaggtgactaactaccttgactggattcgtgataatatgcggccttag

SEQ ID NO: 248772 - RNA, 5286 nt, synthetic construct
  misc_feature 1..5286: note = Description of Artificial Sequence: Synthetic coding sequence
  source 1..5286: mol_type = other RNA
atgcagttccagttaaccctctttctgcacttaggatggctgagttactccaaggcccaggacgactgcaaccgaggtgcttgccaccctactaccggagacctcctcgtcgggagaaatacccagttaatggcttcatccacttgcggactttctagggctcagaagtattgcatactgtcttatctggagggagaacagaagtgttttatttgtgatagcagatttccatacgacccctacgaccagcctaattcccataccattgaaaatgttattgtaagtttcgaacccgatcgggagaaaaaatggtggcagtcagagaacgggttggatcacgttagcattcgattggatctggaggcacttttccgtttttcccatctcatcctcacttttaaaacttttaggcccgccgccatgctggtggagagaagtacagattacgggcataactggaaggtctttaagtattttgcaaaagattgtgcgacttctttcccaaacataacctcgggccaagctcagggtgtcggcgacatcgtatgcgactccaaatacagcgatatcgaaccatctaccgggggcgaagttgtcctaaaagtattggacccttcctttgagatcgagaacccctattcgccatatatacaggatttggttactcttaccaacctccggatcaactttaccaaactccataccttgggtgatgctctattgggccggcgtcaaaatgactccctggacaaatattattacgcgctgtatgaaatgatcgtgcgtggttcatgtttttgtaacggtcacgcttcagaatgccgtcctatgcagaaaatgcggggagacgtctttagtcctcccgggatggtccatggacagtgcgtatgccagcataacaccgatggacctaactgcgaacgatgcaaagatttctttcaagatgctccctggcggcccgcagcagatctgcaggataacgcttgtaggtcctgcagttgtaacagtcactccagccgatgtcattttgacatgaccacctatcttgctagcggaggtctgagcggcggcgtgtgcgaggattgtcagcacaataccgaaggacagcactgcgacagatgtcggcctcttttttatagagatcccctaaagactatatcagacccatatgcgtgtataccatgtgaatgcgaccctgatggcaccatttccgggggcatctgcgtgagccacagcgatcccgcactgggctccgtagctggtcagtgtctctgtaaagagaacgtcgagggggctaaatgcgatcaatgtaaacctaatcactacggcttgtctgcgaccgatccactaggctgtcaaccgtgcgattgcaacccactggggagtttgccattcttaacttgtgacgtggacacagggcagtgtttgtgcctgagctacgtgactggagctcactgtgaagaatgtactgttggttattggggtctggggaatcaccttcatggctgttccccatgtgattgcgatattggcggcgcttacagtaacgtgtgctcccccaagaatggccagtgcgaatgccgccctcacgtcaccggacggagttgttccgaacccgctcctggatacttcttcgcccccctgaacttttatctgtacgaagctgaagaagcgaccaccctgcaaggattagctccgctgggctcagaaaccttcggtcagtcacccgctgtccacgtagtgctcggtgaaccagtacccggaaacccagtcacctggaccggccccggtttcgcccgggtgcttcccggcgcaggcctgcgctttgcagttaataacatacccttcccagttgattttacaatagccatacactacgagacccagagtgccgcggattggaccgtccaaattgtcgtgaatcccccaggcggctccgagcactgtatcccaaaaaccctccaaagtaagccccagtcatttgctttacctgccgctacgcgcataatgcttctgcctacacccatctgcttagaacctgatgtgcagtatagtatcgatgtatacttcagtcagcccttgcagggggagtctcacgcacatagtcacgtactcgtcgattccctcggactgatcccacagatcaattccttagaaaatttttgttccaaacaggacttagatgaataccagctacacaattgtgtggagattgccagcgctatgggcccacaagtgctgcctggagcttgtgaacgtctgatcatatccatgagtgcaaaactgcatgatggtgccgtggcttgcaaatgccatcctcaaggttcagtcggtagttcatgttcgaggctaggcggtcaatgccagtgcaaaccactcgtagtcggccgctgttgtgatcggtgttcaacgggttcttatgacttaggtcaccacggttgtcacccttgtcattgccacccacaagggtcaaaagacacagtgtgtgatcaggtcaccggtcagtgtccttgccacggtgaggtttctggtaggagatgtgatcgttgcttagcaggttatttcggtttcccctcctgtcacccttgtccgtgcaataggtttgccgagctttgcgaccccgagactggttcttgcttcaattgcggcggttttaccactggaagaaattgtgagcgatgcattgatggctactatggaaacccgtcctcgggtcagccctgtaggccatgtctatgcccagatgacccttcttctaatcaatactttgcccactcctgctaccagaacttgtggagctccgacgtgatttgtaactgtttacaaggttatactggaacacagtgtggcgagtgtagcaccggtttttacggaaaccctagaataagcggcgccccctgccagccatgcgcctgtaataacaatattgatgtgacagaccccgaatcttgctcgcgagtgacaggtgaatgcctgcgttgtctgcataatactcaaggcgctaactgtcagctatgtaaacctggacattacggctcagccctgaatcagacctgcagaaggtgttcttgccatgcttccggagttagcccgatggaatgtccaccaggaggaggagcttgcctctgcgacccagtaacgggtgcttgcccgtgtttacccaatgttacaggtttggcttgtgatcgttgtgccgacggttattggaatttggtccctggccgaggttgccaatcgtgcgactgtgacccgcgcacctcccagagttctcattgcgaccagctcacagggcagtgtccatgtaaactcggatacggtggtaagcgatgttcagaatgtcaagaaaattattacggggatcccccaggaagatgcattccctgcgactgcaatagagccggcactcaaaagccaatctgtgaccctgacacaggcatgtgccgctgtagggaaggcgttagtggccagagatgcgaccggtgcgccaggggccatagtcaagaatttccgacatgcttgcagtgccacctctgcttcgatcaatgggatcataccatcagctcacttagtaaagctgttcagggactaatgaggctggccgcaaacatggaggacaaaagagaaaccctgccagtgtgtgaagctgattttaaagacctcagaggtaatgtgagtgaaattgaacgcatattaaaacaccctgtttttcccagtggaaagttcctgaaggtgaaagactaccacgactcagttcggagacagattatgcagctaaacgagcaactgaaggccgtgtacgagtttcaggacctgaaagatacaatcgagcgagccaaaaatgaagctgacctacttctcgaggatttacaggaagaaattgacttgcaatcctctgtgctgaacgcatcaatagccgatagttctgagaatataaaaaaatactaccatatctcaagttccgcggaaaagaagatcaacgaaacttcaagcaccataaacaccagcgcgaacaccagaaacgatctcctcacaatccttgacacgttgacatctaaagggaatctgagcctggaacgtcttaagcagatcaaaatccccgatattcaaatactgaatgagaaagtatgtggcgatccggggaacgtgccgtgcgttcctctgccttgtggaggcgctctctgcactggaagaaagggccaccgtaagtgtaggggacctggttgtcatggatcgctcactctatcaacgaatgctctgcaaaaagcccaagaggccaaaagcatcatacgcaacctggataagcaggtcagggggctgaagaatcaaatcgagagcatctctgaacaggcggaggtaagcaagaataatgctctgcaactaagagaaaaactgggaaacatcaggaaccagtccgacagcgaagaggagaatatcaacctgtttatcaagaaagtcaaaaattttcttttggaggagaacgtgccacctgaggatatcgagaaagtagcaaatggcgtgcttgatattcacctccccatcccaagccagaacttaaccgacgaactggttaagatacagaaacatatgcaactctgcgaagactacagaactgatgagaaccggttgaatgaagaagcagatggggcgcaaaaacttctggtcaaggcaaaggccgccgaaaaagccgcaaacatcctattaaacctagataaaacactgaaccagctgcagcaagcacagatcactcaaggtcgagctaactcaaccattacccagctgacggctaatattacgaagattaaaaagaacgttcttcaggcagaaaaccagaccagagagatgaagtccgagctggagttagcaaaacaacgcagtggcctggaagatggattgagcttactgcagacaaagctgcagcggcatcaggatcatgcagttaacgccaaagtgcaggcagagtccgcccaacaccaggcaggaagtttggaaaaagaatttgtggaattaaagaaacagtacgccatcctacaaagaaagactagtacaactggccttacaaaagaaacgctgggaaaagtgaagcagctcaaggacgcagccgaaaaattagcgggcgacacagaagcaaagatcagacgcatcacagacttggaacgaaaaattcaggacttgaatctatctcgccaggctaaagcagaccagttgcgcatcttggaagatcaggttgtagcgatcaaaaacgaaatcgtggaacaggagaaaaaatatgcccgatgttactcctag

SEQ ID NO: 248773 - RNA, 798 nt, synthetic construct
  misc_feature 1..798: note = Description of Artificial Sequence: Synthetic coding sequence
  source 1..798: mol_type = other RNA
atgatgaccatgactacaatggcagatggacttgaaggtcaagatagctctaaatctgcttttatggagtttggacagcaacagcagcaacagcactctcctgcgatggcaggtgcacattaccctctgcactgtctgcattctgcagctgccgcagccgccgcagggtctcaccaccatcatcaccaccaacatcatcatcatggctcaccttatgcttccggaggtggtaattcctataaccaccggtccctggcagcctatccatacatgtcacactcacagcacagtccttacctgcaatcataccataattcttccgctgccgctcagactcgaggcgacgacacagaccagcagaagacaacagtcatcgagaatggagaaatcagatttaacggcaagggaaagaagatacgaaagccacgtacaatatacagttctttacaactgcaggctctcaaccatagattccaacaaacacaatacttagctcttcctgaacgagccgagttggccgccagccttggattgactcagacccaagttaagatctggttccagaacaaaagaagtaaattcaagaagcttctgaaacagggttctaatcctcacgagtcagaccctctacagggaagcgcagccctctctccaaggtccccagcacttccacccgtatgggatgtttccgccagtgccaaaggagtgtcgatgccccccaactcatatatgcccggctacagccactggtacagttcaccccatcaggacactatgcagcggcctcagatgatgtag

SEQ ID NO: 248774 - RNA, 1563 nt, synthetic construct
  misc_feature 1..1563: note = Description of Artificial Sequence: Synthetic coding sequence
  source 1..1563: mol_type = other RNA
atgcctgctagcgagctcaaggctagtgagatcccatttcatccatctatcaaaacccaagatccgaaagcagaggaaaagtctcctaaaaaacagaaagtgacattaaccgcagccgaggcactgaaactatttaaaaatcagttgtccccatatgagcagagcgagatccttggctacgcagagctatggttcctggggttggaggccaaaaagttagataccgcccccgagaaattttcaaagacgtcatttgatgacgagcacggattttatctgaaagtactacatgatcatatcgcctatcgttacgaggtgctggagacaatcggtaagggttcttttggacaggtagcaaagtgtctagaccataaaaataacgagttagttgcattaaagatcatccgcaacaagaagagatttcaccaacaggccttgatggagctgaagatactcgaggctttgagaaagaaagataaggataatacctacaacgtagtacatatgaaggattttttttacttccgaaaccatttctgtatcaccttcgaactgcttggcattaacctttatgaacttatgaaaaataacaatttccagggcttttctctttcaatcgttcggagattcaccttatctgtgctgaagtgcctacaaatgctgtcggtggaaaaaattattcattgcgatcttaagcctgaaaacatcgtgctttaccaaaaggggcaggcctctgtgaaggttatcgacttcggttctagttgttacgagcatcaaaaagtgtatacttacatccaatcgcggttttacagaagtcctgaagtgatcctgggacacccctatgacgttgctatagacatgtggtccctgggttgtatcaccgcagagctatataccgggtatcctctctttcccggcgaaaacgaggtagagcaattagcttgtataatggaagtgctcgggctccctcccgctggttttattcaaacagcttccagacgacagacatttttcgattccaaaggcttcccgaagaatattaccaataataggggtaagaaaaggtatcccgactccaaagacctcaccatggtgcttaagacatatgacacctcctttttagacttcttgcgtaggtgcctagtctgggaaccttctctcaggatgactcccgaccaagcgctgaagcatgcttggatccaccagagccgcaacctcaaaccccagccccggcctcagaccctgagaaagtcaaactcattcttcccttccgagacacgcaaagataaagtgcagggatgccaccactccagtagaaaagcggacgaaattacaaaagaaaccacagaaaagacaaaggactcaccaaccaaacatgttcagcacagcggcgatcagcaggactgtctccagcatggggcagatacggttcagctccctcagctcgttgacgcccccaaaaagtcagaggcagctgtgggtgctgaagtatcaatgactagtcctggccagtccaaaaacttttctctgaaaaacaccaacgttctcccacccattgtgtag

SEQ ID NO: 248775 - RNA, 2619 nt, synthetic construct
  misc_feature 1..2619: note = Description of Artificial Sequence: Synthetic coding sequence
  source 1..2619: mol_type = other RNA
atgtcctccaaagccgagaagaagcagagattaagtggaagggggagttctcaggcttcatggtccgggagagctacgcgcgccgcagtcgccactcaggagcaaggaaacgctcccgctgtgagcgaacccgagttacaagctgagttaccaaaggaagaacccgaaccaagattggagggcccccaggcccagtctgaggaatctgtggagcctgaagctgacgtcaagcctctctttttatcccgggctgctctgaccggactcgctgacgcagtgtggacacaggaacacgacgctattctggaacacttcgcacaggacccaaccgaaagcatcctcacaatatttattgatccctgcttcgggttaaaattagaacttggcatgcctgtgcaaacccaaaatcaattagtttactttatccgccaggctcctgttcctatcacctgggagaactttgaggctactgtgcagtttggaacggtgagaggaccatatatacctgccctcctgcgcctgctagggggagtttttgctcctcagatctttgccaataccggctggccagagtctatccgcaaccactttgcttcccacttacacaagtttctcgcctgtctgacagatacacgatataagcttgaaggacacaccgtgttgtacattcccgcggaagctatgaacatgaaaccggagatggtgattaaagataaagaactggtacagcggcttgagactagtatgatccattggactcgacagattaaagagatgctgagtgctcaggagacagtagaaaccggagagaacctgggcccccttgaggaaatcgagttctggcgaaatagatgtatggacctgagtggaataagcaagcagcttgtaaagaaaggtgtcaaacacgtggaatccattttgcacctcgccaaaagcagttacttagccccatttatgaaattggctcagcagattcaggatgggagcagacaggcacagtccaatctgaccttccttagcatactgaaagagccgtatcaggaactcgcttttatgaaacccaaagacatcagctccaaacttccgaagctcatttctctcattagaatcatctgggtgaactctcctcattacaatacccgtgagcgactcacatctctgttcaggaagatgagtaatgaaatcatacgtctctgttgccacgccatttctctcgaccggatctttgagggttacgtctcttcgtccaaggaagacctacaggggtgtatactttgctgccacgcttggaaggaccattatgttcaggccgtgcagatgcacatacagtttagctcgagaggctgggttctggaccaaacatctatctttgcccaagtcgatgccttcgtgcaacgatgtaaagatttaatcgaggtctgcgattgtcaataccatttcgctcggtgggaagatggtaaacaaggcccgctcccgtgtttctttggggctcagggccctcagatcacaagaaatttgctggaaattgaagacatttttcacaagaatttgcacacgcttagggccgtgagaggggggattctggacgtaaagaatacatgttggcacgaggattacaataaatttagagcaggcataaaggaccttgaagtgatgacccaaaatctcataacatccgccttcgagttggtgcgggacgtccctcatggagtgctgctgctggacacctttcacagactcgcatccagagaagcgattaagcggacatatgacaaaaaggctgtcgacctgtacatgcttttcaactctgaactggctctcgtgaatagggaacggaacaagaagtggcccgacctagagccctacgtagcacagtactccggaaaggctcgatgggtacacatcctgagaaggagaatcgacagagtcatgacctgtttggccggtgcacattttctaccacgcattggcaccggaaaggagagcgtacatacttaccaacagatggtacaggcaatcgatgaactggtgaggaagacatttcaagaatggacgagttcactcgacaaagattgcattcgccggcttgacacccctttattacgaatcagtcaagaaaaagccggaatgctcgacgtaaactttgacaaatatcgctctcatctcgcaccctttccctacacaccgttgctccaactgtctcaagagttccactcccacctccttaccccactgttcataatcctctcactgtcacataccatatgccttcttagcagcttttactttttcttcagttcatttattttcgtgtcgccccacctccccccctgctatcagcattttaatttcaccacatacctaaagacccagcagaataagaccatgattgggcaagccaggtggttgacccctgtgatcccagcactgtgggaggctgaggtgggggccagcctcgagccacgatctcttagaacagcatgggccacttggcagaatcccgtttcagcaaaaaacacaaagatttcatgggcatggtggcacaaacctgtggtctccgcaacttgggagggtgaggtggggggttccccggagcctggaagacaaaggctgcagtag

SEQ ID NO: 248776 - RNA, 2592 nt, synthetic construct
  misc_feature 1..2592: note = Description of Artificial Sequence: Synthetic coding sequence
  source 1..2592: mol_type = other RNA
atggcacgccgaagcagctttcagtcctgtcagatcatttcactatttacatttgccgtaggagtcaatatctgcttgggattcaccgcccacaggattaaacgcgccgaaggatgggaggaaggcccaccaactgtattgtctgattctccctggacgaatatttccgggagctgtaaaggaaggtgtttcgaactgcaggaagcaggaccccctgattgtcgatgcgacaatctctgcaagagttacaccagctgttgccacgacttcgatgaactgtgtcttaaaactgctcggggctgggaatgtaccaaagacaggtgcggcgaggtgagaaacgaggagaatgcatgccattgtagtgaagattgcttagcccgaggcgactgttgcaccaactaccaggtcgtatgcaagggagagagtcattgggtggatgacgactgcgaggaaattaaagctgcagagtgcccagcagggtttgtgaggccaccgctcatcatattttccgtcgacggctttagagctagctacatgaaaaagggcagtaaggtgatgccaaacattgagaaactcagatcttgtggtacccacagcccttatatgcgccccgtctaccctacaaagacattccccaatctctacacattagccaccggtttgtatccggagagccacggaatagtgggcaattccatgtacgacccagtcttcgatgctacatttcacttgagagggcgtgagaagttcaaccacagatggtggggaggtcagcctctttggataactgctaccaaacagggggtgaaagctggtacttttttctggtcagtggtgattccccatgagagacgcatcctgacgatattgcagtggttgaccttgcctgaccatgaacggccaagcgtgtacgccttttattccgagcagcccgatttctctggccacaagtacgggccattcggacctgagatgaccaaccctctgcgggaaattgacaaaattgtgggccagctgatggacggtctgaaacagcttaagctccatcgctgtgtgaatgtgattttcgtgggagatcatggtatggaagatgttacctgtgaccggacagagtttctaagcaactatcttactaatgtggacgacatcaccctggtgcctggaacccttgggagaattaggagtaaatttagcaacaatgccaagtacgatcctaaagccattatcgccaaccttacttgcaagaagccagaccaacactttaaaccgtatctcaaacagcaccttcccaagcgcctgcattatgctaacaaccgccgcatagaagacatccatctgctggtggaaaggaggtggcacgtagcgcggaaacctctggatgtgtacaagaaacctagcggcaaatgtttttttcagggggatcatggtttcgataacaaggtgaattctatgcaaactgttttcgtcgggtacggctcaacttttaaatacaagaccaaagtgcccccttttgagaacatcgagttgtacaacgttatgtgtgacctgctcggtttgaaaccagcgccgaacaatgggactcacggttccttaaatcatctgctaagaacaaatacttttagaccaactatgccagaggaggtaactcggccaaactatcccgggatcatgtacctgcagagtgattttgatttaggctgcacctgtgacgataaagttgaacctaagaataagctagacgaacttaataaacggcttcacaccaagggcagcacagaagaaagacatctcctctacggtaggcctgcagtcctgtataggacccggtatgatatactctatcacacagacttcgaatcaggctactctgagatttttctgatgcccctttggaccagctacactgtgagcaaacaggccgaggtcagcagcgttccggatcacttaacttcttgcgttcgtcctgacgtccgagtatctccttccttttcacaaaattgcctagcatataagaacgacaaacagatgagttacggttttttatttcctccttatctttctagctcccctgaagccaaatacgatgcattcctggtcacgaatatggtgcctatgtatcccgcctttaaaagagtttggaactacttccagcgagtgctcgtgaagaagtacgcttctgagagaaacggcgtaaacgtgatttctggccccatcttcgattacgattatgacggactgcatgacaccgaagataagattaagcagtacgttgaaggctctagtatacccgtcccaactcactattactccattatcaccagctgtctggacttcacacagcccgctgacaagtgtgatggccccttatcagtcagttcattcattctacctcatcgaccagacaacgaagagtcctgcaattctagcgaggatgaatccaagtgggtcgaagagcttatgaagatgcatactgcaagagtgcgcgatatcgaacacttaactagcctcgatttcttcagaaaaacaagtcggagttaccccgaaattctcacactaaaaacctacctccatacttacgagtccgagatatag

SEQ ID NO: 248777 - RNA, 1332 nt, synthetic construct
  misc_feature 1..1332: note = Description of Artificial Sequence: Synthetic coding sequence
  source 1..1332: mol_type = other RNA
atgcttccctgtgcttcatgtctgcccggatcccttctcctctgggctcttcttctgctgctgttggggtccgcatctccccaagatagtgaagaacctgactcctataccgaatgtacagacggctacgaatgggaccctgattctcaacattgcagggacgtgaacgagtgtctgaccatccccgaagcttgcaagggtgaaatgaaatgcataaatcactacggtgggtatctttgtctcccacggtccgccgccgttatcaatgatctacacggtgaaggcccacctcccccggtcccaccagcccagcaccccaacccctgtcccccaggctatgaacctgatgaccaggactcgtgcgttgatgtggatgaatgcgcccaggccctccatgattgccgaccttcccaggattgtcacaacttgcctggctcttatcagtgtacatgtcccgacggctaccgaaaaatcggaccagagtgcgtggacatcgacgagtgtaggtatagatattgccagcaccggtgtgtcaatctcccaggatcgttccggtgtcaatgtgaaccagggttccagttaggccctaataatcggtcatgtgtagatgtgaatgaatgcgatatgggagctccctgcgagcaaaggtgcttcaacagctacggaacttttttgtgcaggtgccatcagggatacgagttacatcgggatggattcagttgtagcgacatcgatgagtgctcttatagctcttacctatgtcagtaccggtgtataaatgagcccggtcgtttctcctgccactgcccccaggggtaccagctgctggccacacggctgtgtcaagatatcgatgaatgtgagagcggcgcccaccagtgcagcgaggctcagacctgtgttaacttccatgggggataccgttgtgttgatactaataggtgtgttgagccgtatattcaggtgagcgagaatcgttgcctgtgtcctgcttccaatccactgtgccgcgaacagccttcaagcatcgtgcaccgctacatgactatcacctctgaacgatctgtgccagccgatgtcttccaaatccaggccacctctgtgtatcccggagcgtacaacgcatttcaaatacgagctgggaacagtcaaggcgacttctacataaggcaaatcaacaatgtctcggcaatgcttgtccttgctcgacctgtgactggcccgagagaatacgtgctcgatctggaaatggtgacaatgaactctctgatgagctatcgcgcttcaagtgtgctcaggctgaccgttttcgttggtgcatatacgttctag

SEQ ID NO: 248778 - RNA, 609 nt, synthetic construct
  misc_feature 1..609: note = Description of Artificial Sequence: Synthetic coding sequence
  source 1..609: mol_type = other RNA
atgttgccctgcgcaagctgcctgccggggagcttactcctctgggccctactgctccttctgcttggttctgcctccccgcaggattctgaagagcccgattcttacaccgaatgtaccgatggctacgaatgggatccagatagccagcactgccgtgacgtcaatgaatgtctcacaatcccagaggcctgtaagggagagatgaagtgtatcaaccattacggcggctacctgtgtttgccaagaagtgccgcagtcatcaacgacctccacggagagggccctcctccacccgtcccacctgcacaacatcccaatccctgtcctcccggttacgagcccgacgatcaggactcatgcgtggacgttgacgaatgcgcccaggcacttcacgactgccgcccctcccaggattgccacaatcttccaggaagctatcagtgtacttgcccagacggataccgaaaaatcggcccagaatgtgtggatatagatgagtgtcgctacaggtattgtcaacaccggtgcgtgaatcttccgggaagctttcgctgccagtgtgagcccggattccagctagggccaaacaacagatcatgcgtgtag

SEQ ID NO: 248779 - RNA, 552 nt, synthetic construct
  misc_feature 1..552: note = Description of Artificial Sequence: Synthetic coding sequence
  source 1..552: mol_type = other RNA
atgcttccctgtgctagctgcttacctgggtcactgttactgtgggcactcttacttcttcttctcggttcagcaagccctcaagacagtgaagaaccagacagctatactgaatgtaccgacggctatgagtgggatccggattcccagcactgcagagacgttaatgagtgtctaaccattcctgaagcgtgcaagggcgaaatgaagtgcattaatcattacggtggatatttatgtttgccaagatctgccgcagtcattaacgacctacatggagaaggcccgcccccgcctgtcccccctgcccagcatcccaacccctgtcctcctggctatgagcctgatgatcaggactcgtgcgtggatgtagatgagtgcgcacaagccttgcatgactgccgaccttctcaagactgtcacaatctcccaggctcgtatcagtgcacctgtccagatggctatagaaagatcggccctgaatgcgtcgacattgatgaatgtcgctacagatactgtcagcaccgctgcgtcaatcttccaggctcttag

SEQ ID NO: 248780 - RNA, 1332 nt, synthetic construct
  misc_feature 1..1332: note = Description of Artificial Sequence: Synthetic coding sequence
  source 1..1332: mol_type = other RNA
atgctcccatgcgcatcatgcctacccggaagcctgctcctctgggcactcctgctacttctccttgggtcagcttcacctcaagacagtgaagagccagatagctacacagaatgtaccgatggctatgagtgggatcctgacagtcaacattgcagagacgtcaatgagtgcctcacgattcccgaagcctgcaagggcgaaatgaaatgtattaaccactacggagggtatctgtgcttgcctcgcagcgcagcggtaatcaatgacctgcacggggagggacctccgccaccggtgccacctgctcagcaccccaacccatgtccccccggctacgaaccagatgaccaggattcttgtgtggacgtggacgagtgtgcgcaggcgctgcatgactgtagaccttcacaggactgccacaacttgcctggttcatatcagtgcacttgccccgacggctatcggaagattggaccagaatgcgtagatatcgatgaatgcagataccgctactgtcagcatcggtgcgtcaatttacccggctcatttcgttgccagtgtgaaccgggattccaactgggacctaacaatcgctcctgtgtcgacgtgaacgagtgcgacatgggagcaccatgtgagcaacggtgcttcaacagctatggaacatttctgtgcaggtgtcaccaggggtacgagctacatcgggacggattctcttgcagcgacattgatgaatgcagctacagtagctatttatgccaataccggtgcataaacgaaccaggaagattttcatgccactgtcctcagggatatcaactgctcgccaccagactgtgtcaggatattgatgaatgtgaaagtggggcgcaccaatgtagcgaggctcagacctgtgtcaactttcacggagggtaccgttgtgttgatactaatcgctgcgtggagccctatatacaggtgagtgagaataggtgcctgtgtccagcttctaacccactctgccgcgaacaaccttcttcaattgtccatcggtacatgacaattacttcagagagatctgtccctgctgatgtatttcagatccaggctaccagtgtttacccaggtgcttataacgcctttcaaatccgtgctggtaattcccagggtgatttttacatacgacagatcaataatgtgagcgctatgctcgttctagcacggcctgttacaggaccacgagaatatgtcttagatttagagatggtgacaatgaactcgctgatgtcataccgagcctccagtgtcctgcggttgaccgtttttgtaggcgcctataccttttag

SEQ ID NO: 248781 - RNA, 3018 nt, synthetic construct
  misc_feature 1..3018: note = Description of Artificial Sequence: Synthetic coding sequence
  source 1..3018: mol_type = other RNA
atggcaccagctagaggccggctgccaccagcactatgggttgttacagcagccgccgcagcagctacttgtgttagtgccgccagaggggaagtaaacctgcttgatacatctactatacatggagactggggctggctgacctatcccgctcatggttgggatagcatcaatgaagtcgacgagtccttccagcctattcatacctatcaggtgtgcaacgttatgagccctaaccagaacaactggctacgcacgtcctgggttcctagagatggtgctcggagagtgtatgcagagataaaatttactctcagagattgtaattccatgcctggggtcctgggaacttgcaaagaaaccttcaacttgtactatctggaaagtgaccgtgatttaggtgccagcacgcaggagtctcagtttcttaaaatcgacactattgctgctgacgaaagtttcactggggcggatcttggggtgagacgactgaaactgaatactgaagtgcggtccgtaggtcccctctcaaaaaggggcttttacctggcctttcaagatatcggcgcctgtctagccatcctgtcactgaggatttactataagaagtgccccgcgatggtgcgaaatctagcagccttttcagaagcagtgacaggagctgattcatccagtctagtggaagttagaggccaatgcgtccgccatagcgaggagcgggatactccgaagatgtactgctctgccgagggagaatggcttgttccaattggcaagtgtgtatgttccgccggctacgaagagagaagggacgcctgtgtcgcatgcgagctgggcttttacaaatctgccccaggggaccagctgtgcgcgcgctgcccaccccattctcactctgccgcccccgcagctcaagcttgccattgtgatctgtcttattacagagccgccttggatcctccatcatccgcctgcaccaggcccccttctgcccccgttaatcttattagctcagtgaatggaacatcagtgaccctcgaatgggctccacccctcgaccctggcggcagatccgacattacttataacgccgtatgccgtagatgtccctgggccctatctcgatgtgaagcgtgtggatctgggacgcgcttcgttccccaacagacttctctggttcaagccagtctgttggtggcgaatttgttagcccacatgaactacagcttttggatagaagccgtaaacggagtgagcgatctatcccccgaaccaagaagagccgctgttgtgaatatcacaaccaaccaggccgcccctagccaggtcgttgtaattcggcaagaacgcgcggggcagacctccgtgtcccttctctggcaggaaccagagcagcccaacggtatcatactcgaatacgaaattaaatactacgaaaaggataaggaaatgcagtcctattctacgcttaaagccgtgaccaccagagccacagtctccggcctgaaacccgggacccgctatgtgttccaagtgcgtgccaggacaagtgcgggctgtgggagattttcccaggccatggaggtcgaaacaggaaagccccgaccgcgatatgatacacggactattgtgtggatctgtttgaccctaatcaccggtttggtcgtgctcctgctcctcctgatttgtaaaaagcgtcactgcggatattctaaggccttccaagattcagacgaagagaaaatgcattaccagaatggacaggcacctccccctgtgttcctcccattacaccatcctcccggaaagctgccggaaccacaattctatgccgaaccgcatacgtacgaggagccaggacgcgcagggagatcctttactcgggaaatagaggccagcagaatccacatcgagaagataattggtagtggtgattccggagaggtttgttacggtaggctgcgggtaccaggacaacgggacgtcccagtggccataaaagccctcaaagccggatacaccgaaaggcagagacgagacttcctcagcgaggcatcaatcatgggacagtttgatcatcccaatatcatccgtttggaaggtgttgttactagggggagacttgcaatgattgtgacagagtacatggaaaacgggtcacttgataccttcctgcgaacccacgacggacaatttaccatcatgcaactggttggaatgcttcggggcgttggcgcaggaatgagatatctgtccgatttgggctatgtgcatcgagacctcgcggcccgaaacgtgcttgttgactcaaatctagtgtgtaaagtgtcggatttcggacttagtagagtgctggaggatgacccggacgctgcatacactactactggggggaagatcccgatcagatggaccgctcctgaggccatcgcttttcgaacattctcttcagccagcgatgtctggtcttttggcgtagtcatgtgggaggtgctagcatacggcgaacgcccctactggaatatgaccaacagggacgtgataagctctgtggaagagggatacagactccccgctcccatgggatgccctcatgccctacatcaattgatgctagattgttggcacaaagatagagcacagcgacccagattctctcaaattgtttccgtgttggatgccttgattcggtctcctgagtctcttagagcaaccgcaacggtatcgagatgccctccaccagcatttgtcaggtcctgcttcgatttacgaggcgggtcagggggcggcgggggactcactgtcggtgattggttagattcgatacgcatgggccgctacagagatcattttgctgcagggggatatagctcactggggatggtactgcggatgaatgcgcaggacgtcagagcgctgggaataacgttgatgggacaccagaaaaagatccttggatccatccagacaatgcgtgcacagttgacatctactcaaggcccacgtagacacctttag

SEQ ID NO: 248782 - RNA, 1653 nt, synthetic construct
  misc_feature 1..1653: note = Description of Artificial Sequence: Synthetic coding sequence
  source 1..1653: mol_type = other RNA
atgtccacatcatccctacggagacaaatgaagaatatcgtgcacaattactctgaagctgaaattaaagtgcgtgaagctacttccaatgacccttggggcccctccagcagcctgatgagtgagatcgccgacctgacttacaatgtcgtagcctttagcgagatcatgtccatgatctggaaacgacttaatgaccacgggaaaaactggcgccacgtgtataaggccatgaccctgatggaataccttatcaagactgggtccgaacgtgtgtcccagcagtgcaaagagaatatgtatgctgtgcagacactcaaagacttccagtatgtggaccgggatggaaaggatcagggagttaatgttagagaaaaggccaagcaactcgtagcacttcttagggatgaagatagactacgggaagaacgcgcgcatgccctcaaaaccaaggaaaaactagcccagactgctaccgcgtcctcagctgcagtagggtcaggaccaccacctgaggccgaacaggcctggccccagtcaagcggagaggaggagcttcagttgcaacttgcactggccatgtcaaaagaggaggcagaccaggaagaacgaattcggcgaggcgacgatttaagactacaaatggctatagaggaatccaagcgcgaaaccggcggcaaggaggagagcagtctaatggacctagcggacgtatttactgcgccagcaccggccccaactaccgacccatggggtgggccagccccaatggccgcagccgtgccaactgccgcccctactagtgacccctggggaggccctccagttccccccgccgcagacccctggggtgggcctgcccccaccccggccagtggcgacccctggcgacccgctgctcccgccgggccatcagtcgacccatggggaggaacgcccgccccagctgcaggtgaaggacctactcctgatccatggggaagttcggacggtggggtcccagtgagtggcccatctgctagtgacccttggactcccgctcccgcattcagtgacccttggggagggtcccctgcgaagccatccactaatggcaccactgcaggcggattcgacaccgagccggatgaatttagtgattttgaccgtctgagaactgccttgcctacttcaggatcttctgccggtgaattggagctcctggcaggcgaggttcccgcccgatcccctggcgcttttgacatgtccggcgtgcgtggcagtctggccgaagccgtcggaagccctccgcccgcagcaacccccacacccaccccacctacacgtaaaaccccggaatcttttctcggcccaaacgccgctctagtggacctggactcactcgtctccagaccaggcccaaccccgccaggggccaaggcatccaatccctttctccccggaggcggtcctgcaacaggccccagcgttaccaatcccttccagcccgcgcctccagccacactgaccctgaaccagctgcgactgagccctgtgcctccagttcccggagccccccctacatatattagccccctgggcggaggacccggccttccacctatgatgccccctggcccccctgcacccaataccaatccttttttgctttag

SEQ ID NO: 248783 - RNA, 1272 nt, synthetic construct
  misc_feature 1..1272: note = Description of Artificial Sequence: Synthetic coding sequence
  source 1..1272: mol_type = other RNA
atgtctagtcaggtagttggcattgagccgctgtacataaaggccgagccagcctctccagactctcccaaaggatcctccgagacggaaaccgaaccacctgtggcactggccccgggccccgcgcctacccgttgcctacctggacacaaagaagaagaggatggcgagggagccggacccggagagcagggggggggcaaactggtcctctcatcactcccaaaacgactctgcctcgtctgtggcgatgtcgcttcagggtatcactatggtgttgcctcctgtgaggcttgtaaggccttcttcaaacgcaccattcagggaagtatcgaatactcatgtccggcctccaacgagtgtgaaattaccaagaggaggaggaaggcttgtcaggcgtgtagattcacaaaatgtcttcgagttgggatgctcaaagaaggagtcaggcttgacagggtcagagggggcaggcagaagtataagaggagacctgaggtggatccgctcccattcccagggcccttccctgccggacccttggccgtagccggtggtccccgcaaaacagctgcaccagtgaatgctttggtttcccatctactagtggtcgaaccggaaaagttatacgcaatgccagatccagccgggccggatggacatctccctgcagtcgccaccctgtgtgacctgtttgatagagagattgtagtcacaatctcctgggccaagtcaatcccaggcttctcctccctgtccctgtctgaccagatgagtgtgttgcagtccgtgtggatggaggtcctcgttctcggggtcgcccaaagatcactacctttacaggacgagctggcttttgcggaagatctagtccttgatgaggaaggggccagggccgccggcttgggggaactgggagcagccctgctgcaactcgtgagacgacttcaggctctccgcctggaacgggaagaatatgtactccttaaagcgcttgctctggccaactccgacagtgtacacatcgaggacgcagaggcggtggaacaacttagggaggctttacacgaggccctcctcgaatatgaagcaggtcgtgctgggcccggcggtggcgcagaacggcgtcgagccggcagactgctactcacactccccctgctccgacagaccgctggcaaggtgttagctcacttttatggagtgaagctggaggggaaagtaccaatgcataaactgtttctcgaaatgttggaggctatgatggattag

SEQ ID NO: 248784 - RNA, 1239 nt, synthetic construct
  misc_feature 1..1239: note = Description of Artificial Sequence: Synthetic coding sequence
  source 1..1239: mol_type = other RNA
atgggcctccatctccggccataccgagtaggcctactccctgatggattgctgtttctcctgctcctgttgatgctgttagctgaccccgcactccctgcaggacgccatccccctgtcgtactagtccctggtgaccttggcaaccagcttgaggccaaattggacaagccaaccgtggtgcactacttgtgcagtaagaaaactgaatcctacttcaccatttggctgaacttagaattgctgctacctgttattatcgattgctggatagataacattaggctggtttacaataaaacaagtagagcaacacagtttcccgacggagttgacgtacgcgtgccgggtttcggcaaaacattctctctggaattcctcgatccctccaagagcagtgttgggagttatttccataccatggttgagtcactagtagggtgggggtacactcgtggcgaggacgttcgtggggctccctatgattggagaagagcaccaaacgagaacggtccgtactttcttgccctgagagaaatgattgaagaaatgtaccagctgtatggcggaccggtggtcctggttgcgcactcaatgggaaacatgtacacactttacttcttgcagaggcaacctcaggcttggaaagacaaatacatcagggccttcgtctcgttaggggcaccttggggaggagtcgcaaaaactctcagggtgctggcaagcggggataacaataggattcctgtcattggacctttaaaaattagagagcaacagcgatctgcagtgtctacttcttggctgctgccctataactacacatggtcaccggagaaagtgtttgtccagacacccactattaactacaccttgcgcgactatcgaaaattcttccaggatattggttttgaagacggatggctgatgaggcaggacactgaaggactcgtggaggccaccatgccccctggcgttcagctgcactgtctttacggaacaggcgtgccaacacctgactcattctactatgaatcattccctgatcgcgaccccaaaatttgctttggcgatggtgatggcacagtcaatctgaagtcagctttacagtgtcaggcttggcagtctagacaggaacatcaggtactcctacaagaactccctggttccgaacatatagagatgctcgcaaacgcaacgactttggcatacctcaagagagttttacttggcccgtag

SEQ ID NO: 248785 - RNA, 939 nt, synthetic construct
  misc_feature 1..939: note = Description of Artificial Sequence: Synthetic coding sequence
  source 1..939: mol_type = other RNA
atggcaaaagttttttcattcattttagtgaccactgcactgactatgggaagagagatcagtgcacttgaggactgtgcacaggagcagatgagactacgtgctcaggtccgtttattggaaactagggtaaagcaacagcaggtgaaaataaaacagctactgcaagaaaacgaggtacaatttctcgacaaaggcgatgaaaacactgtaatcgacctgggaagtaagcgccagtatgccgattgtagcgagatttttaatgacggctacaagctgagcgggttctataagattaaacctttacaatcacctgctgagttttccgtttactgtgatatgtctgacggcggcggatggactgtaatacagagaaggtcggacggcagcgagaatttcaataggggctggaaggattatgagaatggctttggcaattttgtgcagaaacatggtgagtattggcttggcaataagaacctccacttcttaactacacaggaggactataccctgaaaatagacctggcggacttcgagaaaaactcacgttacgctcaatacaagaattttaaggtcggggatgagaaaaatttttacgagttgaacataggcgagtatagtggtacggcaggcgattccctagcaggcaacttccaccccgaggtccagtggtgggcttctcatcaaagaatgaagttttcgacatgggatcgtgaccacgacaactatgagggaaactgcgctgaagaagatcagtccggctggtggttcaatagatgtcactctgcaaaccttaacggtgtctattattcaggtccatatacggccaaaactgacaacggaatcgtgtggtacacatggcatggatggtggtactccctcaagagcgtcgtaatgaagattagacctaacgactttattcccaacgtgatatag

SEQ ID NO: 248786 - RNA, 939 nt, synthetic construct
  misc_feature 1..939: note = Description of Artificial Sequence: Synthetic coding sequence
  source 1..939: mol_type = other RNA
atggccaaagttttctccttcattttagtgaccacagcattaaccatggggcgcgaaatctcagctctcgaagactgtgcccaggaacagatgagactccgggctcaggtcagattgctcgaaacacgggtgaagcaacaacaggttaaaatcaagcaactcctgcaggagaacgaggtgcaatttcttgataagggcgatgagaatactgtaattgacctgggtagcaaaagacagtatgccgattgctcagaaattttcaacgacgggtataaactgagcggcttttacaaaatcaaaccccttcagagtccggccgaattctccgtgtattgtgacatgagcgatggaggcggctggacagtgattcagaggaggtctgatggctctgaaaactttaatagaggatggaaggactacgagaatgggttcggaaatttcgttcagaagcacggtgaatactggctcggcaataaaaacctgcactttctgacaacacaagaagattacacccttaaaatcgatttggcagactttgagaagaacagccgatacgcacaatacaagaacttcaaggttggggatgagaaaaacttttatgagctgaatataggagagtactctggcactgcaggcgattcgcttgccgggaactttcaccccgaggtacagtggtgggcctcccatcaacgaatgaaattctccacctgggacagagatcacgacaactatgagggaaattgcgccgaggaagatcaatctggttggtggttcaatagatgtcacagcgccaatctgaacggagtttattacagcggaccctatactgccaagaccgacaatggcattgtgtggtacacctggcacggctggtggtattcactgaaatcggtcgtaatgaagattagacccaacgacttcatcccaaatgtaatttag

SEQ ID NO: 248787 - RNA, 939 nt, synthetic construct
  misc_feature 1..939: note = Description of Artificial Sequence: Synthetic coding sequence
  source 1..939: mol_type = other RNA
atggccaaagtgttctcattcattttagtaacgacagccctcactatgggaagggaaatttcagccctcgaagattgcgcacaggagcagatgaggttacgagcacaggtacgtcttttggagactcgcgtgaaacagcaacaagtgaaaattaaacagttactgcaagagaacgaggtacaatttctggataagggcgatgagaacaccgttatcgatctgggaagcaagaggcagtacgcagattgcagtgagatcttcaacgatgggtacaagttgagtggattctataagatcaagccactgcaaagcccagcagagttcagcgtctactgtgacatgtctgacggcgggggatggactgtgatccagagaaggtccgacggcagcgaaaatttcaacaggggctggaaggattacgagaacgggtttggtaatttcgttcaaaaacatggggagtactggctgggtaataagaatctacattttctgaccacacaagaagattataccctgaaaatcgatctggctgattttgaaaaaaactctcgttacgcacagtataaaaactttaaggttggagacgaaaagaatttctacgagctcaacattggtgaatatagtggaactgcaggtgacagtctggctggcaactttcacccagaggttcagtggtgggcatctcaccagcgcatgaagttctcaacctgggaccgtgaccatgacaactacgaaggaaactgcgccgaggaagaccagagtggctggtggttcaatagatgtcattcggccaatctcaacggagtttactatagtgggccctatactgccaaaactgacaatgggatcgtatggtacacttggcacgggtggtggtattctcttaaaagtgtagtgatgaaaatccgccccaatgatttcatcccaaacgttatctag

SEQ ID NO: 248788 - RNA, 939 nt, synthetic construct
  misc_feature 1..939: note = Description of Artificial Sequence: Synthetic coding sequence
  source 1..939: mol_type = other RNA
atggcgaaggttttctcttttattttagtgactacagccttgactatgggaagggaaatttcagcattggaggactgcgctcaagaacagatgcgcctgcgagctcaggtgagactgcttgaaacgcgcgtgaagcagcaacaagtcaaaataaaacaactgctccaggagaacgaggttcagtttctggacaagggcgacgagaacaccgtgattgacctagggagcaaacgacagtacgctgattgctcggaaatttttaacgacggctacaaacttagcggattttacaagattaagcccctacaatctccagcagagttctctgtgtactgtgatatgagtgacggtggtggttggacagtcatccagaggcgatcagatgggtccgagaacttcaacaggggctggaaagactatgaaaacggtttcggaaactttgtccagaagcatggcgagtattggctgggcaacaagaacctccactttctaacaacccaagaggactacacgctgaaaatcgatctggcagatttcgagaagaatagtagatacgcgcaatataagaactttaaagtgggtgatgagaaaaacttctatgagttaaacattggcgaatattccggtacagcaggtgatagcttagctggcaactttcaccctgaggtgcaatggtgggcctcgcaccaaaggatgaaatttagtacttgggaccgcgaccacgataattatgaggggaactgtgcggaagaggaccaaagcggctggtggtttaatcgctgccattcggctaacctgaacggagtatactattccggcccctatacagcaaaaactgacaacggcattgtgtggtatacttggcacggttggtggtattccttgaaaagtgttgtcatgaaaatcaggcccaatgactttatcccaaatgtaatttag

SEQ ID NO: 248789 - RNA, 939 nt, synthetic construct
  misc_feature 1..939: note = Description of Artificial Sequence: Synthetic coding sequence
  source 1..939: mol_type = other RNA
atggccaaagttttctcatttatactggtgaccaccgccctgaccatgggacgcgaaatttctgcactagaggattgcgcccaagaacagatgaggctccgggcccaggtgcgcctgttagaaactagagttaagcaacagcaagtgaagattaaacagctcttgcaggaaaacgaagtgcaattcctagataagggtgatgaaaatacggtgatcgatctcgggagcaagagacagtatgccgattgttctgaaatatttaatgatggctataaactgagtggcttctataagatcaagccgcttcagtcacccgccgagttcagcgtttattgtgacatgtccgacgggggggggtggacagtgattcaacggagatcagacgggagcgagaatttcaacagaggttggaaagattacgaaaatgggtttggaaacttcgttcagaagcatggggaatattggctgggtaacaaaaatctacatttcctgacgacgcaggaggactacaccctcaagatagatttagcagactttgagaagaattccagatacgctcaatacaaaaactttaaggtaggagatgagaaaaacttttacgaactcaacatcggagaatatagtggaactgctggagattcccttgccggcaactttcaccccgaagtgcaatggtgggcctcacaccagcgcatgaagtttagtacctgggatcgagaccatgacaattacgaaggcaactgtgcggaagaagaccaatccggttggtggttcaatcgatgtcatagcgcaaacctgaacggggtctactattccggaccttataccgcaaaaactgataatggcatcgtatggtatacctggcacggctggtggtactctctgaagtcagtagttatgaaaattaggcccaacgactttataccgaatgttatttag

SEQ ID NO: 248790 - RNA, 939 nt, synthetic construct
  misc_feature 1..939: note = Description of Artificial Sequence: Synthetic coding sequence
  source 1..939: mol_type = other RNA
atggccaaggtattctcttttattcttgtaactaccgccctcaccatgggcagggagatcagtgccttagaggattgcgcccaggaacagatgcggttaagggcccaggtccgtttattagagacacgcgtcaagcaacagcaagtgaaaattaaacagttacttcaggaaaacgaggtgcaatttctcgacaaaggggacgagaatacagtcatagatctggggtctaagaggcagtatgctgattgctcagagatatttaacgacggatacaagctgtctggattctataagataaaacctctccagagccctgccgaattttcagtctactgcgatatgtcagacgggggggggtggaccgttatacagaggcggagtgatggtagtgagaatttcaatagagggtggaaggactacgagaatggattcggtaatttcgtccagaagcacggggaatactggctcggaaataaaaatttgcactttttaactactcaggaggactacacgctgaaaatcgaccttgctgattttgaaaaaaacagtagatacgcccagtacaagaattttaaggtaggggacgaaaaaaacttctatgagttgaacatcggcgagtatagcggcacagctggcgattctctcgctggcaattttcacccagaggtgcagtggtgggctagtcaccagaggatgaagttctccacttgggaccgcgaccacgataactacgaaggcaactgcgctgaagaagaccaaagcggatggtggtttaatagatgtcattctgccaatttgaacggggtatactactcaggtccctatacagccaaaacagacaacgggattgtatggtacacatggcatggttggtggtatagcctaaagtctgtcgtaatgaagattaggccaaacgactttataccgaatgttatatag

SEQ ID NO: 248791 - RNA, 849 nt, synthetic construct
  misc_feature 1..849: note = Description of Artificial Sequence: Synthetic coding sequence
  source 1..849: mol_type = other RNA
atgagattacgggctcaggtgagattactcgaaactagggttaagcaacagcaggttaagatcaaacaactgttacaagagaacgaggtgcagttcttggataaaggcgacgaaaacaccgttattgacctggggtctaagagacagtatgcagattgctccgaaatttttaacgacggatacaagcttagtggtttttacaaaataaaacctctacagtcacctgcagaattttcggtatactgtgacatgtctgacggcggggggtggactgtgattcagagaaggtctgatggatcggagaactttaacagaggatggaaagattatgagaacggttttgggaatttcgtgcagaagcatggcgagtattggttgggcaataagaatctccactttctaacaactcaagaggattacacattaaagatcgatctggctgacttcgaaaagaactctagatatgcgcagtacaaaaattttaaagtgggagacgaaaagaacttctacgaactcaacattggtgaatattccggtaccgctggggattcactcgcagggaactttcacccggaagtccaatggtgggctagccaccagcggatgaaattctctacatgggacagggatcacgataactatgaaggtaactgcgctgaggaagaccagagcggttggtggttcaatcggtgtcactctgcaaacctgaatggagtttactactctggcccttataccgcgaagactgataatggcattgtttggtatacctggcatggatggtggtactctctgaaaagcgtggtaatgaaaattcgccctaacgattttatacctaacgtgatttag

SEQ ID NO: 248792 - RNA, 939 nt, synthetic construct
  misc_feature 1..939: note = Description of Artificial Sequence: Synthetic coding sequence
  source 1..939: mol_type = other RNA
atggcaaaagtcttctcttttatactcgtgacgacagctctgactatgggaagagagatttcagcccttgaggattgtgcgcaggaacagatgcgacttcgtgctcaagtacgcctattggaaacgcgagtcaagcagcaacaagtgaagattaagcagctactccaagagaatgaggtccaattcttagacaagggggacgagaacacagttatcgacttgggatcgaaacggcagtacgccgactgctcagagatctttaatgatggttacaagctgagtgggttttacaagataaaaccattgcaaagccccgcagagttttccgtctattgtgacatgagcgacggcggcggatggacagtgattcagcgccgctccgatggatccgagaactttaacagaggatggaaggattacgagaatggattcggcaactttgtgcaaaaacatggggaatattggttgggtaataaaaatctccacttcctcacaacacaggaggattacacactgaaaattgacttggcagatttcgaaaagaactcacggtacgctcagtacaaaaacttcaaagtaggggacgaaaagaacttctacgaattaaacattggcgagtactctggaaccgctggtgattcattggctggaaacttccatcccgaggtacagtggtgggcaagtcatcagcgcatgaaattttcaacatgggaccgcgaccacgataattacgaaggaaactgcgccgaagaagatcaatccggctggtggttcaatagatgccactctgccaacctgaacggggtctattactcggggccgtatacagcaaagactgacaatggcattgtatggtatacctggcacggctggtggtattccctaaagagtgtcgtgatgaagattagaccaaacgatttcatcccaaatgttatttag

SEQ ID NO: 248793 - RNA, 2052 nt, synthetic construct
  misc_feature 1..2052: note = Description of Artificial Sequence: Synthetic coding sequence
  source 1..2052: mol_type = other RNA
atggagcgagccgccccttcacgacgtgtacccctgcctttgttacttctaggcggattggcattacttgctgcaggagtggacgcagacgttctgttagaagcgtgttgcgcagatggtcacagaatggctacacaccagaaagactgttccttgccctacgcgaccgaatctaaggaatgtcgaatggttcaagaacaatgctgtcattctcagctggaagaactgcactgcgcaacaggcatttccctggcaaatgaacaggataggtgtgctacaccacacggcgacaacgcgtccctcgaggctacattcgtgaaacgatgctgtcactgctgtctgcttggcagagccgcccaagcacaaggacaaagttgtgaatactctctaatggtgggctaccaatgtggtcaggtgttccaagcatgttgcgtgaagtctcaggaaactggggacctggatgtggggggcctgcaggaaaccgacaaaatcattgaggtggaagaagagcaggaggatccctacctgaacgaccgttgccgtggtggtggcccttgcaagcaacaatgtcgagacactggcgacgaggtcgtatgttcgtgcttcgtaggatatcaactgctgagtgacggcgtcagctgcgaggacgtgaatgagtgtatcaccggctctcatagctgccgactgggcgagtcctgcatcaacacagtcggctcttttcgctgtcaacgcgactccagctgtggaacaggatacgaacttactgaggacaatagctgtaaagacatagatgaatgtgaatctggcattcacaactgtttacctgatttcatctgccaaaatactcttgggagtttccgatgtcggcccaagctgcaatgcaaatccggatttatacaggatgcattagggaattgcattgacataaatgagtgccttagcatatcagccccgtgccccatcggtcatacatgtatcaatacggagggaagctacacatgccagaaaaacgtgcctaactgtggtcggggatatcacttgaatgaagaaggtacacgctgtgtcgacgtggatgaatgcgcccccccagccgaaccttgtgggaaaggccataggtgtgtcaactctcctgggtccttcagatgcgagtgcaaaaccggatattacttcgatggcatttccagaatgtgcgttgatgtcaacgagtgtcaaagataccctgggcgcctatgtggacacaaatgcgagaacactctcggaagctacctctgttcttgctccgtgggctttaggttgtcagtggacggtcgatcatgtgaggatataaatgagtgttcttctagtccctgctcacaggaatgtgctaatgtttatggcagctaccagtgctactgcagacgagggtatcagctttctgatgtggacggcgttacgtgcgaagacattgacgaatgtgctctccccaccggtggacacatatgttcatatagatgtatcaacatccccggatcatttcaatgctcttgtccatcttccggctacagactggccccaaatggcagaaactgccaggatatagatgagtgtgtgacaggtatccataattgctctatcaacgagacatgcttcaacatacagggaggctttaggtgtctggcctttgaatgccctgagaactatcgacgatccgctgcaacacgatgcgaaaggctgccttgtcacgaaaatagagaatgctccaaactgccgctcagaatcacatactaccatctcagttttcccactaacatacaggcccccgccgttgtgtttcggatgggccctagcagtgctgtgccgggcgattctatgcaactcgctatcactggtggaaacgaagagggattctttacaactaggaaggtttcaccccacagcggcgtggtggcactcacaaagcccgtcccagaacctcgcgatctacttcttaccgtgaaaatggacttgagccgacatggaacagtcagttctttcgtggcaaaactgtttatctttgtctctgccgaactctag

SEQ ID NO: 248794 - RNA, 2112 nt, synthetic construct
  misc_feature 1..2112: note = Description of Artificial Sequence: Synthetic coding sequence
  source 1..2112: mol_type = other RNA
atggaacgagcggcaccgtcgcggcgtgttcccctacctctattattgctgggaggactcgccttacttgccgcgggcgtggacgcagacgtgctcctggaggcctgctgcgccgacggtcatagaatggctacccaccaaaaggattgttcattaccttacgctaccgaatccaaagagtgcaggatggtgcaggagcagtgctgccactctcaactggaagagttacactgtgctacaggaatcagtttggcaaacgaacaggataggtgcgcaaccccccacggcgacaatgcgagcctcgaggctacgtttgtgaaaagatgctgccattgttgcctgcttgggcgtgcagctcaggcacaggggcaaagttgtgagtatagtttgatggtggggtaccaatgcggccaggttttccaagcttgttgcgtcaaaagtcaagagacaggtgatcttgatgttggtggcttacaggaaacagacaaaattatcgaggtggaagaggaacaggaggatccatacttaaatgaccgatgcaggggtgggggtccatgtaagcagcaatgtcgagatacgggggatgaggtggtgtgttcatgttttgttggataccaactgttgtcagacggcgtttcatgcgaggacgtcaacgaatgcattaccggtagccattcctgtagactgggagagagctgtatcaataccgtaggaagcttccgctgtcagagggactctagctgtgggaccggatacgaactaactgaggacaatagttgcaaggatattgacgagtgtgaatccggcatacacaactgtctgcctgattttatatgtcagaatacacttggctcattccggtgtcggcccaagctacaatgcaaaagcggattcatacaggacgcgctgggcaattgcatcgatattaacgagtgcttgagtatctctgccccctgccctatcggccacacctgcattaacaccgaaggttcatatacttgccagaagaatgtccctaactgcggccgtggctaccacctgaatgaggaaggaaccagatgcgtggacgttgatgaatgtgccccgcctgcggaaccctgcggaaagggccaccgctgcgtgaatagtcctgggtcctttagatgcgaatgtaaaactggttactatttcgatggcatttctcggatgtgcgtggatgttaatgaatgtcaaagataccccgggagactctgcggccataaatgcgaaaatacactaggaagttatctgtgctcttgcagcgtcggtttccgattgagcgtagacggtaggtcctgtgaggacatcaacgaatgcagcagctccccttgctcgcaagaatgcgccaacgtatacggcagttatcaatgctattgtcgaagggggtaccaattgtcagacgtagacggtgtcacctgcgaggacattgacgagtgcgccttacccaccggaggacatatttgttcttaccgttgcataaacatccccggatccttccaatgttcatgtcctagcagtggatataggctggcaccgaacggaaggaattgccaagatatcgatgaatgcgtcacaggaatacacaattgctctataaatgaaacctgctttaacattcagggtggctttagatgcttggccttcgagtgcccagagaactatcgacgatccgccgccaccctgcagcaggaaaaaaccgataccgttcgttgtattaaatcttgtagacctaacgatgtgacatgcgtcttcgaccccgtgcacaccatttcccacacagtgattagcctcccaacctttcgcgagttcaccaggcccgaggagatcatttttttacgagccattactcccccacaccccgcctctcaagccaacataatttttgacattactgagggaaacctgcgagactcgttcgacatcatcaaacggtatatggatggaatgactgtgggcgttgttcgacaagtgaggcctatcgttggaccctttcacgcagtgcttaaactcgaaatgaactatgtggtcggcggggtcgtcagtcacagaaacgtggtcaatgtgcatattttcgtcagcgagtattggttttag

SEQ ID NO: 248795 - RNA, 1701 nt, synthetic construct
  misc_feature 1..1701: note = Description of Artificial Sequence: Synthetic coding sequence
  source 1..1701: mol_type = other RNA
atggagcgcgccgcaccttctaggagggttcccctccccctgctgctgctaggaggcctcgctctgctggctgccggcgtcgacgctgatgtgctcctcgaagcttgctgcgcagacggccatcgcatggcaactcatcagaaggattgctctctgccctacgccacagaatccaaagagtgtcgcatggttcaagaacagtgttgtcatagccaactggaagagctgcactgtgccaccggtatttccctagcaaacgagcaagaccgttgtgctacccctcatggtgataatgcttcacttgaagctaccttcgtcaaacgctgttgtcactgttgtctgttaggacgggcggctcaggcccaggggcaaagctgcgaatactcactgatggttggctatcaatgcgggcaggtgtttcaggcgtgctgcgtgaagagtcaggaaacaggtgatctcgatgtgggcgggttgcaggaaacagataaaatcattgaagtcgaggaagagcaagaagatccatacttgaacgatcgatgtcgaggcggaggcccttgtaagcaacaatgtcgggacacaggtgacgaagttgtttgctcatgttttgtcggctaccaattgctctccgatggtgttagctgtgaggatgtgaatgaatgtataactgggtcccactcgtgtcgtctgggggaatcctgtattaataccgtcgggtctttccgatgccagcgagacagcagttgtgggaccggatatgaactgactgaagataacagctgcaaggacatcgacgagtgtgagtcaggtatccacaactgtcttcccgatttcatttgccagaacactctcggctcctttagatgcaggcctaaattgcagtgcaagagcggattcattcaggacgcactgggcaattgcattgacattaatgaatgcttatccatctccgctccctgtcctattggccacacttgcataaataccgagggatcttatacttgccaaaaaaacgtgccaaactgtggtcggggttatcatttgaatgaggaaggcacaagatgcgtcgacgttgacgagtgcgcacccccagccgaaccttgcggtaaaggacatcgatgtgtaaatagtcccggatccttccgttgcgaatgtaaaactggttattattttgacggaatttcacgcatgtgcgtggacgtgaacgagtgccaacggtatcctggacggctttgcggccacaaatgcgagaatactctgggctcttatctgtgcagctgtagcgtgggctttagattatcggtggacggtagaagttgcgaagacataaacgagtgcagctccagtccttgcagtcaggaatgcgccaatgtctacggctcatatcagtgctattgcaggagaggataccaactaagcgacgtcgacggcgtaacatgtgaggacatagatgagtgcgccctgcccactggaggtcatatttgtagctaccgatgtattaacatccctggatcctttcagtgttcttgtccctcgtccggctacagattagcacccaatggtcgcaactgccaggacatcgatgaatgcgttaccgggatacataattgcagcataaacgaaacgtgttttaacatccaaggcggctttcgttgcttagcattcgagtgcccagagaactaccgtagatcggccgctacttag

SEQ ID NO: 248796 - RNA, 2112 nt, synthetic construct
  misc_feature 1..2112: note = Description of Artificial Sequence: Synthetic coding sequence
  source 1..2112: mol_type = other RNA
atggagagagcagctccgtcaagacgcgtcccactccccctgttactactaggaggccttgcgctgttggcagcaggcgttgacgccgacgtattgcttgaagcctgctgcgctgatggccacaggatggcaacgcaccagaaagattgtagtctgccgtacgccactgagtcaaaggaatgtaggatggtccaggaacagtgttgccacagtcaactagaggaacttcattgcgctacgggaatttcactcgctaatgagcaggacaggtgcgccacacctcatggcgataatgccagcttagaggcgacgttcgtgaagaggtgctgtcactgttgcctgctcggacgggccgcacaagctcaaggccagtcatgcgagtactctttgatggtcggataccagtgtggccaggtatttcaagcatgttgcgtcaagtcgcaggaaacaggggatttggacgtcggaggcctgcaagaaacagacaaaataatagaagtggaagaagaacaggaggacccctatttaaatgacagatgtcgcggcggcggtccctgtaaacaacagtgcagggacacgggagacgaggtggtgtgtagctgtttcgtaggataccagcttctgtccgatggagtgtcttgtgaggacgtcaacgagtgtatcacagggagccacagctgccgactgggagaaagctgcattaataccgttggaagcttccgctgtcagcgcgactcttcctgtgggaccgggtatgaacttactgaagataatagctgcaaagacatcgatgaatgtgagtctgggattcacaactgcctgcctgatttcatttgtcagaacacattaggaagctttcgttgccgaccaaaactgcagtgtaagtctggattcatccaagatgcactcggcaattgtattgatataaatgagtgcctgtccattagtgctccatgtccaataggccacacctgtatcaacactgaaggatcatatacctgccagaaaaatgtgcctaattgtggaagaggttatcatttgaatgaggaggggacacggtgcgtcgacgtggatgaatgcgccccaccagcggaaccctgtgggaaaggacatcgctgtgttaattctcccggctcgtttagatgcgaatgcaaaacgggatactatttcgatgggatcagcagaatgtgtgtggatgtaaatgagtgtcaacgttaccccggtcgtctgtgcggacataagtgcgagaacacccttggctcatatctttgctcctgttcggtaggctttaggctgagtgtcgatggaaggtcgtgtgaagacatcaacgagtgttccagttctccctgttcccaagaatgtgccaatgtctatggctcataccagtgttactgccgtagaggctaccaactgtcagacgtagatggagtgacctgcgaggacatcgacgagtgtgccctacctactgggggacacatctgctcctatcgctgcatcaatatccccggttcgtttcaatgttcttgtccctcaagcggctataggctcgcacccaacggccgcaattgccaggacattgatgaatgcgttaccggcatccacaattgctcaataaatgaaacttgtttcaacattcaaggcggctttagatgtctggcatttgaatgtcccgagaattatcgacggtccgcagcaacccagaaaagtaagaaaggacgacaaaacaccccagcaggcagctctaaggaggattgtcgtgtcctcccatggaagcagggcttagaagatacacacctcgatgcttatcttccctgctgtcgccgtttcacaagaccagaagaaatcatcttcctacgggctattacacctccacatcccgctagccaagccaatattatattcgacatcaccgaaggcaatcttcgcgattcattcgacattatcaagcggtacatggacggtatgacagtcggcgtggtaaggcaggttcgaccgatagtgggcccattccacgcagttcttaagctggaaatgaattacgtggttgggggtgtggtttctcaccgaaatgttgtcaacgttcatatctttgttagtgagtattggttctag

SEQ ID NO: 248797 - RNA, 2166 nt, synthetic construct
  misc_feature 1..2166: note = Description of Artificial Sequence: Synthetic coding sequence
  source 1..2166: mol_type = other RNA
atggaaagggctgcacctagcagacgagttcccttgcccctgctgctgctcggtggactggccctgcttgccgccggcgtcgatgctgatgtgctgctcgaggcttgctgtgctgatggccacagaatggccacacaccaaaaagactgttcactaccatacgccaccgagtctaaagagtgcagagcagtgggactcgcttcattgtgtcaggatttgaatggcgcatgggctgtgtggaaagttggtcgagcctcccaggccgagggcaccgcaagcgcgcgcgcccaaagacgaggtatggttcaagagcaatgttgtcattcgcagctggaggagttgcattgcgctactggaatctccctcgccaacgaacaggatcggtgtgcaacaccacatggggataatgcaagtctcgaagccacctttgtcaagcgatgttgtcactgctgtctgctcggtcgagcggcacaggctcaaggtcagtcatgcgaatattccctcatggttggatatcagtgcgggcaggtttttcaagcatgttgtgttaagtcccaagagaccggtgacctggacgtcgggggtctgcaagagactgacaagattatcgaagtggaggaagagcaggaggatccatatctcaatgacagatgtcggggcggtgggccatgtaagcagcagtgtcgtgatacaggtgacgaagtcgtttgctcctgtttcgttggttaccagctgctgagcgacggagtctcttgcgaagacgtaaacgagtgcattaccggatcccatagttgccgtctcggcgaaagttgcattaatacagtgggctcctttcggtgtcagcgggactctagctgcgggacaggatatgaattaaccgaggataacagctgtaaagatatcgacgagtgtgagtccggaattcacaactgtttgcctgatttcatctgtcagaatacgctgggctctttccgctgtcgccccaaactccagtgtaagtcaggctttattcaggatgccctcggcaactgcattgatattaacgaatgtttatccatatcagcgccttgtcccattggacacacatgtataaacaccgaagggagctatacctgtcagaagaacgtgcctaattgcggtcgcgggtaccatctcaacgaggaaggaacacggtgcgtggatgtagatgagtgtgctccgccggctgaaccgtgtggcaagggacataggtgtgttaacagcccaggatcttttagatgcgaatgcaaaaccggctattactttgacggaatctccagaatgtgtgtcgacgtcaacgaatgtcaaaggtacccagggaggctgtgtggacacaaatgcgaaaatacgctcggctcctacctgtgtagttgtagcgttgggtttcgactctcagttgacggcagaagttgtgaagatataaatgaatgcagttcatctccatgcagtcaggaatgcgctaatgtatacgggtcataccagtgctattgtcgaaggggataccagcttagcgacgtagatggcgtcacttgtgaagacattgacgaatgtgccttacccaccggcggccatatttgttcatatcggtgcattaacatcccagggtccttccagtgttcctgtcccagcagcggttacagactcgctcccaacggtagaaactgccaggacatcgatgaatgtgtaacaggaattcataactgcagcatcaacgaaacctgctttaacattcaaggcggctttaggtgtctggccttcgagtgccctgagaattatcgtcggagcgccgcaacccggtgtgaacgtttgccttgtcacgagaatcgcgaatgcagcaaactgccattgcgcatcacctattaccacctatctttcccaaccaatattcaggccccagcagtcgttttccggatgggcccatcgagtgcagttcccggagactcaatgcagctggcaattaccggaggtaacgaggaaggattttttactactagaaaagtgagccctcatagcggcgttgttgccttgacaaagcccgtaccagaacctcgcgatctcctactcaccgtcaagatggatctgtcacgacatggtacagtatcctcattcgtcgcaaagctcttcattttcgtgtctgctgaactctag

SEQ ID NO: 248798 - RNA, 570 nt, synthetic construct
  misc_feature 1..570: note = Description of Artificial Sequence: Synthetic coding sequence
  source 1..570: mol_type = other RNA
atgaatagttacacccgtggttcaaggcggccatcagcgaaagccgcatctccggctgcatcagttacttctcgagtgtctccatccggcccgggcgtgcccgtagacgcggacgtgctcctggaagcctgttgtgctgacggtcatagaatggccacgcatcaaaaagactgtagccttccatatgccacagagtcaaaagagtgcaggatggtccaagagcagtgttgtcactcacaactagaagagctgcactgtgctactggcatctcattagcaaatgagcaagatagatgcgcaaccccccatggagataacgcctctttggaagccaccttcgtaaaaagatgttgccactgctgtttgctaggcagggccgcccaagcccagggccaatcatgtgaatatagtttgatggtcggatatcaatgtggacaagtcttccaggcgtgctgtgtgaagtcccaggagacaggggatctggatgttggtggactgcaggaaacagataaaatcatagaagtagaggaggaacaggaagatccatatctgaacgacagatgccggtag

SEQ ID NO: 248799 - RNA, 81 nt, synthetic construct; identical to SEQ ID NO: 248193
  misc_feature 1..81: note = Description of Artificial Sequence: Synthetic coding sequence
  source 1..81: mol_type = other RNA

SEQ ID NO: 248800 - RNA, 1806 nt, synthetic construct
  misc_feature 1..1806: note = Description of Artificial Sequence: Synthetic coding sequence
  source 1..1806: mol_type = other RNA
atggaacgagccgccccgtcccgacgagtcccactccccttgctgcttttggggggcctcgcgttgcttgcagccggcgtggacgcagatgtgctccttgaagcttgttgtgctgacggtcatagaatggcaactcaccagaaggattgctctttaccctatgccactgagagtaaagagtgcaggatggtccaggaacaatgctgccattcccagcttgaagagctccattgtgcaactggcatctcactcgccaatgaacaagatcgatgcgccacaccccacggcgacaacgcctccctggaggcaacttttgtgaagaggtgttgtcactgttgcttactgggtagggccgcgcaggcacaaggccaatcctgtgagtattctctgatggtgggttatcaatgtggacaagtatttcaggcctgttgtgtcaagagccaagaaactggtgatctcgacgtgggtgggctccaggagaccgacaagattattgaagtggaggaagagcaggaagatccctatctcaatgatcggtgcagaggcggcggaccttgcaaacagcagtgccgagatacaggtgatgaggtcgtttgttcctgcttcgtaggataccaattattgtccgacggcgttagttgtgaggatgttaatgagtgcattactggaagtcactcttgcagactgggagaaagctgtattaacactgtgggaagttttagatgtcagagggacagctcttgcggaaccggctacgagttgactgaggacaatagttgtaaagatatcgacgagtgcgagagtggcattcataactgcctacctgatttcatctgtcagaacaccttgggtagctttcgctgcaggccaaagctccaatgcaaatctggatttattcaggacgctctcggaaactgtatcgatattaatgagtgcttatccatctcggccccttgcccgatcggccacacgtgtattaacacagaagggtcttatacctgccagaaaaatgttcccaattgcggacgaggatatcacctgaatgaggagggtaccagatgcgtggatgtggatgaatgcgctcccccagccgaaccatgtggaaaaggccatagatgcgtgaactcgccaggatcttttcgctgtgaatgcaagacgggatattacttcgatggcatctctagaatgtgtgtggatgtgaatgagtgtcagagataccccggcaggctttgtggccacaaatgcgaaaacaccctgggctcttatctatgttcatgctctgtggggttccgcctatccgtagacggaagaagttgtgaagatattaacgagtgctcaagctccccctgttcccaagaatgcgcaaacgtttacgggagttaccaatgctactgcaggcggggttatcagctgtcagatgttgacggcgtaacatgtgaggatattgatgagtgtgctctacccactggcgggcatatttgcagctacagatgtattaatatacccgggtcctttcaatgttcttgtccatctagcggatacagactggcccccaatggacggaactgccaggacatagacgagtgtgtcacaggcattcataactgttctattaacgaaacgtgttttaatatccagggcggctttagatgcttagcctttgaatgccctgaaaactacaggaggagcgcagcaacacaaaaatcgaagaaaggacgccaaaacacccccgccggctcaagtaaagaggactgcagggtactcccatggaaacagggtttagaggatactcatctggacgcatag

SEQ ID NO: 248801 - RNA, 198 nt, synthetic construct; identical to SEQ ID NO: 248195
  misc_feature 1..198: note = Description of Artificial Sequence: Synthetic coding sequence
  source 1..198: mol_type = other RNA

SEQ ID NO: 248802 - RNA, 546 nt, synthetic construct
  misc_feature 1..546: note = Description of Artificial Sequence: Synthetic coding sequence
  source 1..546: mol_type = other RNA
tgtaggatggttcaggaacagtgttgtcactcacaactcgaagagctccactgcgccacaggcatcagtctcgccaatgagcaagatcgatgtgccactccccacggcgacaacgcaagcctggaggctacctttgttaaaagatgctgccactgttgtctgctgggtagagcagctcaggcccagggacagagttgcgaatattcacttatggttggataccaatgtgggcaagtttttcaggcgtgttgcgtgaagagtcaagaaaccggcgaccttgacgttggcggtctgcaggagacaggcggcggcccatgtaaacaacagtgtcgggacacgggagatgaagtagtgtgttcttgcttcgttggatatcaacttctctcagatggtgtctcttgcgaggacgtcaatgagtgcatcactggaagccactcctgcagattgggggagtcttgtattaatacagtcgggtcattcaggtgccagagagattcatcctgcggtactggatatgaactgaccgaagacaatagctgtaaatag

SEQ ID NO: 248803 - RNA, 420 nt, synthetic construct
  misc_feature 1..420: note = Description of Artificial Sequence: Synthetic coding sequence
  source 1..420: mol_type = other RNA
atggccacacaccagaaagattgctctcttccctacgccaccgagagtaaggaatgcagaatggtgcaggagcagtgctgtcattctcagctggaagagttacactgcgctacggggatttcgctcgctaacgagcaggaccgatgcgctacaccccacggcgacaatgccagtttagaggctaccttcgtcaaaaggtgctgtcattgctgtctcctaggacgtgccgctcaagctcagggtcagtcttgcgaatacagtctcatggtcgggtatcagtgcggacaggtttttcaagcctgttgtgtcaagagtcaggagaccggggatctggacgttggcggcctgcaagagacagacaaaatcatcgaagtggaagaagagcaagaggacccttacttgaacgataggtgccggtag

SEQ ID NO: 248804 - RNA, 519 nt, synthetic construct
  misc_feature 1..519: note = Description of Artificial Sequence: Synthetic coding sequence
  source 1..519: mol_type = other RNA
atggaaagggcagcgccttccaggagggttcctctccctcttctattactcggaggactggccctgcttgcagctggtgtcgacgctgatgtgcttcttgaagcctgttgcgccgatggtcaccggatggcaacacaccaaaaggactgcagtctgccatacgcgaccgaatcaaaagaatgtagaatggtccaggagcagtgttgtcacagccagctcgaggaactccattgcgctaccggcatatccctggccaacgagcaggacagatgcgccacaccgcacggcgacaatgcttctttagaagccactttcgtgaagagatgctgccactgttgcctgcttggcagggcggctcaggcccaggggcagtcctgtgaatactctttgatggtcggttatcagtgtggccaggttttccaagcatgctgtgtcaaatcccaagagacgggtgacctagatgtaggcggcttacaggaaaccggaggaggaccttgcaaacaacagtgtcgggactag

SEQ ID NO: 248805 - RNA, 792 nt, synthetic construct
  misc_feature 1..792: note = Description of Artificial Sequence: Synthetic coding sequence
  source 1..792: mol_type = other RNA
atgaggcctggagcccctggccctttgtggccccttccttggggagctctcgcttgggctgttggattcgtttcttctatgggtagcggaaatcccgctcctgggggtgtgtgctggttacagcaggggcaggaggcaacatgttcacttgtcctgcagaccgatgtaacacgggccgagtgctgcgcatcaggcaacattgacactgcatggagtaatttaactcacccaggtaataagattaacctactcggctttctgggacttgtacactgccttccatgcaaagactcttgcgacggcgttgaatgtggtccgggaaaggcgtgtcgaatgctgggtggcaggcccaggtgtgaatgtgctcccgactgctcagggctccctgcaaggctccaggtttgtggatccgatggcgccacatacagagacgagtgtgaacttcgggcggccagatgtcgcggtcatcctgatctatccgtgatgtaccggggaagatgtcgaaagagttgtgaacacgtggtgtgccccaggccacagtcttgtgtcgtggaccagacaggctctgctcactgcgtcgtgtgccgtgctgctccatgccccgtcccaagtagtcctggccaggaattgtgcggcaacaacaacgttacatatatttcttcgtgccacatgcgtcaagcaacatgtttccttggtaggtctattggtgtacgtcatgctggatcctgcgccggcacccccgaagaacctccaggcggggagtctgcagaagaggaagagaacttcgtatag

SEQ ID NO: 248806 - RNA, 984 nt, synthetic construct
  misc_feature 1..984: note = Description of Artificial Sequence: Synthetic coding sequence
  source 1..984: mol_type = other RNA
atgggtcgtacaagcaaagataaacgggatgtgtattacaggctggctaaagaaaacggctggcgggctagatctgcctttaagttgctccagctagataaagagttccagctgtttcagggagtcactagggccgtagacctttgcgccgcacccggctcatggtcacaggtactgtctcaaaagatcggagggcagggatccggacacgtcgtagcagttgacctacaagctatggctcccctccctggcgttgttcagattcaaggagatattacgcaactttctaccgccaaagaaattatccagcacttcaaggggtgcccggctgatcttgttgtgtgtgatggggcacctgatgtgacgggcttacatgatgtcgacgagtatatgcaggcccagcttcttctggcagcattgaatatagccacgcacgtattaaagccgggcggttgttttgtggcaaaaatttttagaggacgcgacgtgacacttctctactcccaactgcaagtcttcttcagctccgtgctctgcgccaaaccgagaagttcccggaattcttccatcgaagccttcgccgtgtgtcaggggtacgaccctccagaaggtttcatccctgacctcagcaagcctctgctggatcattcttacgactttaaccagctcgatggcccaaccagaattattgtgccattcgttacctgcggtgacctgtcctcatatgacagcgaccgctcctatccacttgacttggaaggcggatctgaatacaaatacacccctcccacccagccgcccatctcacccccctatcaggaagcatgtacacttaaacgcaagggtcaattagcgaaagagatacgaccccaggactgccctatcagtcgtgtggacaccttcccacagccccttgccgctccccaatgccatacacttcttgcaccagaaatggaagataacgaaatgtcatgctctccctag

SEQ ID NO: 248807 - RNA, 1404 nt, synthetic construct
  misc_feature 1..1404: note = Description of Artificial Sequence: Synthetic coding sequence
  source 1..1404: mol_type = other RNA
atgcgaccacaagaacttccccggttagccttcccgctgcttttgctgctgttgcttctgctgccaccccccccttgtcccgcccactcagctactcgcttcgatccaacatgggagtcactggacgctaggcaactgccagcatggttcgatcaggcaaagtttggcatattcatccactggggcgtgttctctgtcccatcattcggaagtgaatggttttggtggtactggcagaaggaaaagattcccaaatatgttgagtttatgaaagacaattatcctccatcgtttaagtacgaggatttcgggccattatttactgccaaattctttaacgcaaatcaatgggcagatatttttcaggcgagcggagcaaagtacatcgtgttgacctccaaacatcatgagggattcactttgtggggttctgaatatagttggaattggaacgcaattgacgagggacctaagagagatattgtcaaagagctggaggtggctattaggaacagaaccgacctccgctttggtttgtactactccctcttcgaatggtttcacccgctgtttctcgaagacgaaagctcatctttccacaaacgccagtttcctgtaagcaagacacttcccgaactctacgaattagtgaataattatcagcccgaagtgttatggagcgatggcgacggcggtgccccagaccagtactggaactcaaccggatttctcgcctggttgtataacgagagcccagtccggggcaccgtggtgacaaacgaccgctggggcgccggatctatttgtaaacacggaggtttttacacgtgctctgacagatataaccctggacatttgctgccacataaatgggaaaactgtatgactatcgataagctcagttgggggtatcgaagggaagctggtatctccgattacttaacgattgaggaactggtgaaacagctggtcgaaactgtgtcttgcggtggtaaccttctgatgaacatcggaccaacactggatggaaccatttccgtggtgtttgaggagcgactccgccaaatgggcagctggctcaaagttaatggtgaagcaatatatgaaactcatacctggagatctcagaatgatacagtcacacctgacgtgtggtacacctctaagcccaaagaaaaacttgtctacgctatttttctcaaatggccaacatcaggccagttgtttctcggacatcctaaggcgatcctcggtgctactgaagtcaagctcttgggtcatggtcagcccttaaattggatctctcttgagcaaaatgggattatggtcgaattaccccagctgacaattcaccaaatgccttgcaagtggggttgggctctcgcactaaccaatgtcatctag

SEQ ID NO: 248808 - RNA, 354 nt, synthetic construct
  misc_feature 1..354: note = Description of Artificial Sequence: Synthetic coding sequence
  source 1..354: mol_type = other RNA
atgaagtggatgtttaaagaggatcactcattggaacacagatgtgttgaatctgctaaaatccgtgctaagtaccccgaccgagtgccagtcatcgtggaaaaggtgtccggatctcagatcgtagacattgataagaggaaatacctggttccctctgacattacagtggctcagtttatgtggatcatacgaaaaagaattcaactaccgagcgaaaaggccatttttctatttgtcgataaaacagtcccccaatctagcctgacaatgggccagctttacgaaaaagagaaggacgaagatggcttcctttacgttgcatacagtggtgagaacacattcggattttag

SEQ ID NO: 248809 - RNA, 1371 nt, synthetic construct
  misc_feature 1..1371: note = Description of Artificial Sequence: Synthetic coding sequence
  source 1..1371: mol_type = other RNA
atgagaaagtcgcccggtctctcggattgcctgtgggcctggatattactgctcagcacattaaccggaagatcttatggacagccttcactgcaggatgagttaaaagataacacaactgtcttcactagaatactggatagactccttgatggctatgataatcggcttagaccgggcctgggggaacgggttacggaggttaagacagacatctttgtaacaagctttggtcccgtatccgaccacgatatggagtacactatcgacgtgttttttcgccaatcctggaaagatgaaaggctcaagtttaaagggcccatgactgtcctaaggctgaacaacctcatggcatctaagatttggacccccgacacattttttcacaatggcaaaaagagcgtagctcacaatatgacaatgcccaacaagctcctgcgaatcaccgaagacggaactcttctctatactatgcgccttaccgtgagagcagaatgccctatgcacctcgaagattttcctatggacgcacatgcctgcccactcaaattcggtagttacgcttacactcgtgccgaggtcgtatatgaatggactcgcgaacctgctagatctgtggtggtggcagaagacggctccaggctgaaccaatacgacctcttggggcagactgtggattctggaattgtgcaatcatctactggcgaatatgtagtgatgacaactcactttcacctgaaaaggaagatcggttacttcgttatacagacttacctaccttgcatcatgaccgtcatcttatcccaggtttccttctggctgaatcgggaaagtgtgcccgcgaggacggtgttcggcgtcacaacagtgctgacaatgactaccttgagcatttcggctaggaactctctgccaaaagttgcttacgccaccgccatggactggttcatagccgtctgttatgccttcgtgttttccgctctcatcgaatttgctaccgttaactattttacgaaaagagggtacgcttgggatgggaagtctgtcgtgcccgagaagcctaaaaaagtgaaagatccgcttattaagaagaataacacttatgctcccaccgctaccagctacaccccgaatttagccagaggagaccccggattggctacaattgccaagagcgccactattgaacccaaggaggtcaaacccgaaacgaaaccgcccgaacctaaaaaaacatttaattcagtgagtaaaatcgatcgtctgtcccgcattgctttccctttgctgtttggcatattcaacctcgtatattgggccacttacctgaatcgcgagccccagctcaaagcacctactccacatcaatag

SEQ ID NO: 248810 - RNA, 345 nt, synthetic construct
  misc_feature 1..345: note = Description of Artificial Sequence: Synthetic coding sequence
  source 1..345: mol_type = other RNA
atggccaactccggatgtaaagatgtgaccggcccagatgaagaaagctttctgtactttgcttacggatcaaacctcttgaccgaacgcatccacttgcggaatccctcggctgccttcttttgcgtggcacggctccaggacttcaaactcgatttcggtaactcccaaggaaaaacatctcagacctggcatggtggcatcgctacgatctttcagagccctggagatgaggtatggggcgtcgtgtggaaaatgaataagtcaaacttgaattccctcgatgaacttttcgcctgggtacaaaagaaaatggtgtgtagatggtccataaagagatcctag

SEQ ID NO: 248811 - RNA, 2196 nt, synthetic construct
  misc_feature 1..2196: note = Description of Artificial Sequence: Synthetic coding sequence
  source 1..2196: mol_type = other RNA
atggtcgtggaacaccccgagtttctaaaagccggtaaggagccgggattgcagatttggcgcgtggagaaattcgatctagtacctgttccgacaaatctgtacggggatttttttacaggagatgcttacgtaattctgaaaaccgtgcaactacgaaatggcaatctccaatacgaccttcactattggctgggtaacgagtgctcgcaggatgagtctggggcagcagctatattcaccgtgcagttggatgactacctcaatggaagggcggtacagcacagagaggtacaaggatttgaatccgctacgttcctgggctactttaagtccggtctcaaatataagaaggggggggtcgcttccggtttcaaacatgtcgtgcctaatgaggttgtcgtgcagaggctgtttcaagtaaaaggtcggagagtggtgcgcgctacagaggtgccggtgtcctgggaaagttttaataatggcgactgtttcattctggacctgggaaataacatccaccaatggtgcggttcaaatagcaataggtatgagagattgaaagccacacaggtgtctaaaggaatccgggataatgagagatcggggagagctagagtgcacgtatccgaggagggtaccgagcccgaggcgatgttacaggtattaggtcctaaacccgcactaccagctgggacagaagataccgcgaaagaagatgccgccaatcgaaaactagctaagctctataaagtgtcaaacggagctgggactatgagtgtgtcccttgtcgctgatgaaaatcccttcgctcagggtgcattaaagtcagaggactgctttattcttgaccacgggaaggatggtaaaatcttcgtctggaaaggtaaacaagccaatacggaagaaaggaaagccgccctcaagacggcaagcgactttatcacaaagatggactatccaaagcaaacccaagtgagcgtactgcctgagggaggagaaacccctctgttcaaacaattttttaagaattggcgcgaccctgaccagaccgacggtcttggcctatcttacctgtcttctcatatcgcgaatgtagagcgcgtcccttttgatgccgctactctgcacacctcaactgcgatggcagcacagcatggtatggatgatgatggcaccggccaaaaacagatctggcgcattgagggaagtaacaaggtgccggtggatccagccacatatggacagttttacggtggtgattcttatattattctctacaactacagacacggcggaaggcaaggtcagataatatataattggcagggtgcccagtctactcaagacgaggtggccgcttcagctatcctcactgcgcagctagatgaggaacttggaggtaccccggtgcagagcagagtggtccaaggaaaagagcccgctcacttaatgagtctctttggcggcaaacctatgattatctacaaagggggtacgtctcgggagggaggacagacagctccggcttcaactcggttgttccaggtgagggccaatagcgccggggccacaagagctgtcgaggtgttgcccaaggcaggcgccctaaactccaacgatgccttcgtgcttaaaacaccaagcgcggcatacttgtgggtaggaactggtgcatcagaagccgaaaagaccggggcacaagaactattacgcgtactgagagcacagcccgtgcaggtggctgaagggagcgagcccgatggattctgggaagcccttggcgggaaagccgcataccgcacctctccccgacttaaggataagaaaatggacgcccatcctccccgattgtttgcatgcagtaacaaaatcgggagatttgttatagaggaggttcccggagagcttatgcaagaggatctggcaacggacgacgtgatgcttttggacacctgggatcaagtttttgtatgggttggcaaagattcacaagaagaggagaagactgaggcattgacatctgctaagcggtacattgaaacagaccccgccaatagagatagacgcacacctataaccgttgtgaaacaaggctttgaacccccttcctttgtcggttggttcctcggatgggatgatgattactggtcggttgaccctcttgatcgcgcaatggccgaactggcagcctag

SEQ ID NO: 248812 - RNA, 2196 nt, synthetic construct
  misc_feature 1..2196: note = Description of Artificial Sequence: Synthetic coding sequence
  source 1..2196: mol_type = other RNA
atggtggttgaacatcccgagttcctgaaggctggcaaggagcccggactccagatctggcgtgtcgagaagtttgacttggtaccagtgcctaccaacttgtatggcgacttcttcacaggggacgcctacgtaattttgaaaactgtgcaactaagaaacgggaatttgcagtatgacttacattattggcttggaaatgagtgttcgcaagacgagagcggggcagcagctattttcaccgtacagctggacgactacctgaacggaagggctgtgcaacatagagaggtccaaggctttgagtccgcaacattcctgggttatttcaaatctggcctaaaatacaagaagggcggcgtcgcatccgggtttaagcacgtcgtgcccaatgaggtagttgtgcagcggctctttcaagtgaaaggaaggcgggtggtaagagctacagaggttcctgtgtcctgggagtctttcaacaacggggattgtttcattctggacctaggtaacaacattcaccaatggtgtggctcaaacagcaacagatacgaacgactgaaggccacacaggtgtctaaaggcatccgagataacgagcgttccgggcgtgcacgagtgcacgtttcagaggagggaacagagccagaagctatgttgcaggtgcttggaccaaagccggcgctgcccgcaggaacagaagatactgccaaggaggacgcagccaatagaaaattagccaaattgtataaggtgtcaaatggcgcaggaacgatgtcagtaagtctagtggccgacgagaaccctttcgcccaaggggctctcaagtcagaagattgttttattctggatcacggaaaggatggaaaaatattcgtatggaaagggaagcaagccaataccgaagagaggaaggccgccctcaaaacagccagcgactttataactaaaatggactatccaaaacagacacaagtgtctgtattacccgaaggtggagaaacaccactttttaagcaattcttcaagaattggcgtgatcccgaccagacggatggactcggcctctcatacctgagctctcacattgcgaatgtcgaaagagtgccattcgatgcagctacactccacactagtacagcaatggcagcccaacacgggatggatgatgacggcacgggacagaaacagatatggagaatcgagggatcaaacaaggtgcccgtggatcccgccacttacggccaattctatggcggagatagttacattatcctttataattataggcacgggggaaggcagggacagattatctataattggcaaggagcccaatcaacacaggacgaagtggcagcttcggccattctgaccgctcagttggacgaagagctcggcggcactcctgtacagtcacgggtagttcaaggcaaggagccagcccatttgatgtcgctgttcggaggcaaaccaatgatcatctacaaaggggggacatcgcgcgagggtggacagacagcacccgcatcgactaggctgtttcaagtcagagccaatagtgcgggagccacaagagccgtggaagtcctacctaaagcaggagctcttaactcaaatgatgcttttgtgctgaaaacaccttcggctgcatatctctgggtcggtactggcgcttcggaagccgagaagaccggcgcgcaggagctcctacgggtgttaagagcgcaacccgtccaagtggccgagggcagcgaaccggatggtttttgggaggcgttgggaggtaaggccgcataccgtacgtcccccagattgaaggataaaaagatggacgcacacccgccaagactttttgcatgtagtaataaaatcgggcgttttgtgatcgaggaggtgccaggcgaacttatgcaggaggatttagctacagatgatgtcatgttgctggatacatgggaccaggtgttcgtgtgggttgggaaggactcgcaggaggaagaaaagaccgaagcactcacatcagccaaacggtacatcgagacagacccagctaatagagatcggaggactcccataactgtagtaaaacagggatttgaacctccttcttttgttggatggtttctagggtgggacgatgattattggagcgtcgatcccttggaccgggccatggcagaacttgcagcttag

SEQ ID NO: 248813 - RNA, 2349 nt, synthetic construct
  misc_feature 1..2349: note = Description of Artificial Sequence: Synthetic coding sequence
  source 1..2349: mol_type = other RNA
atggcaccccacagaccagccccagccctgctgtgcgcactcagcctggccctgtgtgccttgtcactccctgttagagctgcaactgcttctagaggcgcctctcaggccggtgccccccagggccgcgtgccggaggcgagacccaactcaatggtcgtggaacatccagaatttctcaaggctgggaaagaaccagggttacagatttggcgggttgaaaaattcgacttggttccagttccaacaaatctgtacggagacttcttcacaggagatgcttatgtgattttgaaaacagtgcagttgcgaaacgggaacctgcaatacgacctccactattggctgggaaatgaatgctcgcaggatgaatctggcgcggccgcgatttttactgtgcagttagacgactacttgaatggacgcgcggtgcagcatagagaagtgcaaggcttcgaatcggctacatttctcggatacttcaagtctggcctgaaatataagaaaggtggagtggcctcaggatttaaacacgtggtgcctaacgaggtagttgtgcagcgcctgtttcaagtgaaaggaagacgtgtggtcagagctactgaggtgcctgtgtcttgggagagcttcaacaacggagattgttttattctagacctgggaaataatatccatcagtggtgtggtagcaacagtaataggtatgaacgtctcaaggcaactcaagtctccaaaggtatcagggacaacgaacggtccgggcgcgcccgggtacacgtgtccgaagaaggaaccgagcctgaggctatgctccaagtcttaggacccaagcccgccttgccagccggaactgaggacaccgccaaagaagatgccgccaatcgaaaacttgcgaaactgtataaggtgagcaatggagcaggtactatgtctgtgagtctggttgccgacgagaacccgttcgcgcagggcgccctgaagagtgaggattgtttcatactggaccatgggaaggatggaaaaatatttgtttggaaggggaaacaggccaacaccgaggaaaggaaggcggcgctgaagacggcaagtgactttatcactaaaatggattaccccaaacaaactcaggtgagtgtactgcctgaaggaggagagaccccattatttaagcagtttttcaaaaattggagggaccctgaccagaccgatgggctgggtctatcctatttaagttcacacatcgcaaacgttgagagggtgccattcgacgcggccacacttcacacaagtactgccatggcagctcagcacggaatggatgacgacggaaccggtcagaagcaaatctggcgcatagagggatcaaacaaagtacccgtagacccagctacatacggacagttttatggtggagactcgtacataatattatataattacagacatggggggcggcaggggcagatcatatacaattggcagggagctcaatctacacaagatgaagtcgccgcatcggctatacttactgcacaactcgatgaggaactgggtggcacgcctgtgcaatctcgagtggttcagggcaaagaaccagcacatttgatgtctctatttggggggaagccaatgatcatctacaaaggcggaacaagccgggaggggggccagactgcgcctgctagcaccaggctgttccaggttcgagccaactctgcgggagcgactagggccgtggaagtgcttccaaaagcaggcgcactcaatagcaacgacgcgttcgtcctgaagacaccttccgcagcatacctttgggttggcaccggggcaagcgaagccgagaagaccggagcccaggaacttttgcgagtgttgcgagcccagcccgtgcaggtagctgaaggctccgaacctgacggtttctgggaagcgctgggcggtaaggctgcatatagaacttcaccccggttgaaagacaagaagatggacgcacacccccccaggctatttgcttgctctaataaaattggccggtttgtgatcgaggaggtccctggtgaacttatgcaagaagacttggctacagatgatgtgatgctactagacacttgggaccaagttttcgtttgggtaggaaaagattcgcaagaagaggaaaagacagaggccctgaccagtgcaaaacgatatatcgagacagaccccgcgaatagagatagacgcacgccgatcaccgtggttaagcagggctttgaacccccgagtttcgtcggatggtttttggggtgggacgatgactattggtctgtggatcccttagatagagctatggccgagctggctgcatag

SEQ ID NO: 248814 - RNA, 2196 nt, synthetic construct
  misc_feature 1..2196: note = Description of Artificial Sequence: Synthetic coding sequence
  source 1..2196: mol_type = other RNA
atggtagttgagcaccctgaatttttaaaagcaggcaaggaacctggcctacagatctggcgagtggagaaatttgacttagtccctgtgcccaccaatctttatggcgactttttcactggagatgcgtatgttatcctgaaaacggtgcaacttcgaaacggaaatctgcaatacgacctgcactactggctaggcaacgaatgtagtcaagatgagtcgggggccgctgctatcttcaccgttcagttagacgattacttaaatggtcgggccgtccagcatcgggaggtccagggatttgaatcagcaacatttctagggtacttcaagtccggtctgaaatacaaaaagggaggagttgctagcggttttaaacacgtggtgccaaatgaagtggtggtacaacgcctgtttcaagtgaagggccggagggtggtgagggcaacagaggtcccagtgtcttgggagagctttaacaatggggactgcttcatacttgaccttggcaataacattcaccagtggtgtggtagtaactccaatagatacgaacgtctgaaggcaacacaggtaagtaaaggcatcagagataacgagcgttcagggcgggctcgggtgcatgttagcgaggagggtaccgaaccagaggctatgttacaggtgttggggcccaagcccgcactccctgcaggcacagaagacacagcaaaggaggatgccgccaataggaaattagctaaactgtacaaggtctcaaatggagccgggacaatgtccgtctcgctagtagccgatgagaacccatttgcccagggagctttaaaatcggaagactgctttatcctcgatcacgggaaagatggcaagatctttgtttggaagggcaaacaggccaacacagaggaacggaaggcagccctaaaaaccgcatcagattttataaccaaaatggattacccgaagcagacccaggtgtctgtgttacccgagggtggcgaaactccactgtttaagcaattctttaagaattggcgcgaccccgatcagaccgacggactgggactttcttatctctcctcccacattgcaaacgtggaacgagtccctttcgacgccgcgacccttcacacctcaaccgcaatggccgcccagcacggtatggacgatgatggaaccggacagaaacagatttggcgcatagaaggatctaataaggtgcccgtagacccagcaacctacggtcaattttatggcggggactcctacataattctgtataactataggcacggaggacgtcaggggcagatcatctacaactggcagggagctcagagtacccaggacgaagttgcagcttcagccattctgacagcacagcttgacgaggaactgggtggcactccggtacagagcagagtggtccagggcaaagaacccgcccacttaatgtccctgtttggtggcaagccgatgattatttacaaaggcggaactagccgtgaaggaggacagacagccccagcctctactaggctgtttcaggtgagggctaactccgcaggcgctactagggcggtggaagtcctgcccaaggccggtgccctgaattccaatgatgcttttgtcctgaaaaccccatccgccgcttatctatgggtcggaactggtgcctctgaagcagaaaaaactggagcccaggaacttctcagagtgcttcgcgcacagcctgtccaagtggctgagggcagtgaacctgacggcttctgggaagccctgggtggaaaagccgcgtatcggacttcccctcggcttaaggacaaaaaaatggatgcacatcctccgagattattcgcatgttctaataaaatcggcagattcgtgattgaagaagtcccgggggaactgatgcaagaggatttagccacagatgatgttatgcttttagacacctgggatcaggtatttgtatgggtcggaaaggactcacaggaagaagagaaaactgaggctctgacttctgctaaaagatacatagaaacagatccagcaaacagagatcggcggacccccattaccgtagtcaaacaaggatttgaacctccatccttcgtaggctggtttctgggttgggatgatgactattggagcgttgatccactcgatcgagcaatggctgaactggctgcctag

SEQ ID NO: 248815 - RNA, 2148 nt, synthetic construct
  misc_feature 1..2148: note = Description of Artificial Sequence: Synthetic coding sequence
  source 1..2148: mol_type = other RNA
atggtggtggagcacccagaattcttgaaggcaggcaaagagcccggactacagatctggcgcgttgaaaaatttgatgcatacgtcattttgaagacagttcaactgaggaacggtaatttacagtatgacctacactattggctggggaatgagtgttcacaggacgaatccggagccgcggcaatttttacagtgcagctggatgattatttgaatgggcgcgccgtgcagcaccgggaggtccaaggttttgagtccgcaacctttctggggtatttcaaatcaggcctgaagtataaaaaaggtggcgtggcatccggcttcaaacacgtagtacctaatgaggtggttgtgcagcgcttatttcaagttaaggggcggagggtggtccgagccacagaggtgccagtcagttgggaaagcttcaataacggcgactgtttcattttggatctgggaaataacatccaccagtggtgcggatcaaatagtaataggtacgagaggttaaaggcgactcaggtcagcaaggggattcgggacaacgagagatcaggcagggcccgagtgcacgtgagcgaggagggaacagagcctgaggctatgctgcaagttctaggtcctaagcccgctttgcccgccggaacagaagacactgccaaagaagacgccgccaatcgcaagctggccaaattatataaggtctcaaacggtgccggaacgatgagcgtgtcactggtagctgatgaaaacccctttgcacaaggtgcacttaaaagtgaggactgtttcattttggaccacggaaaagacggaaagatattcgtgtggaagggtaagcaggccaacaccgaggaacggaaggccgctttaaagactgcttctgattttattactaagatggactatcccaagcaaactcaggtttcagtcctgcctgaaggaggcgagacgcccctcttcaagcagttctttaagaattggcgagatcctgaccaaaccgacggtttagggctcagttacctgtcttcacatatcgccaatgttgaaagagtcccattcgatgcggccaccctccacactagcactgctatggcggctcaacacgggatggatgatgatggcacagggcagaagcagatttggcggattgaggggagcaacaaggtaccggtggaccccgcaacatatggacagttctatggtggcgatagttatataattctttacaattaccggcacggaggccggcagggtcagattatctacaattggcagggagctcagagtacgcaggatgaggttgccgcgtccgcaatcttaacagctcagctagacgaagaactgggcgggacgccagtgcaatcaagggtggtccaggggaaagagccagcacacctgatgtccctttttggagggaagcccatgattatttataagggtggtacgagcagagaaggaggacagaccgctcccgctagcacaagactattccaggtaagagcaaattccgctggagcaactagggccgtggaagtcttgcctaaggccggggctttgaacagtaacgacgctttcgtgctgaaaactcccagcgccgcttatctctgggtcggcaccggcgcctccgaagctgagaagactggagctcaagaacttctacgggtgttgagagcccagccagtgcaggttgcagaaggttccgagccggacggattttgggaagccttgggaggaaaagcggcttaccgaaccagtcctagactgaaagacaagaagatggatgcccacccaccaaggctattcgcatgcagcaacaaaattggacgctttgttattgaagaggttccaggcgagctgatgcaagaagacctggctactgatgatgtaatgctactggatacatgggatcaggtgttcgtttgggtaggaaaagacagccaagaggaagaaaaaacagaggccctcacgtccgctaagcgctatatcgagaccgacccagctaatagggaccgccgcactcccatcacagtcgttaagcagggatttgaacccccttccttcgtagggtggtttctgggatgggacgatgattactggagtgtcgaccctctggaccgtgctatggctgagctggctgcgtag

SEQ ID NO: 248816 - RNA, 2229 nt, synthetic construct
  misc_feature 1..2229: note = Description of Artificial Sequence: Synthetic coding sequence
  source 1..2229: mol_type = other RNA
atggagaaactgttctgctgctttcccaactcaatggtcgtggagcacccagagttcctgaaagctgggaaggagccaggactgcaaatatggcgtgttgagaaatttgatttagttcccgtcccaacgaatctttatggcgattttttcaccggcgatgcatacgtgattttgaaaacagtgcaactgcgtaatggtaacttgcagtacgacctgcactactggctaggaaacgagtgtagccaagacgagtccggcgccgcagccatttttaccgtacaattagacgactacctcaatgggcgcgcagtccaacacagagaggtgcaggggtttgagagtgcaacgttcctaggatatttcaagagtggactcaaatataagaaaggaggagttgctagcggttttaagcatgttgtgcccaacgaggtggtcgtgcagcggttgtttcaggttaaaggccgcagggtggtgcgtgcaactgaggtgccggtcagctgggaatcctttaataacggtgattgttttattctagatttagggaataacatccatcagtggtgtggcagtaactccaacagatacgagcgtttgaaggccacacaggtctcgaagggtattagagataatgagagatccggccgcgcaagagtacacgtgtcagaagaaggcactgaacccgaagccatgctgcaggtactggggcctaaaccagctctccccgctggcaccgaagacacagccaaggaagacgccgccaacagaaaactggccaagctgtacaaggtatctaacggcgccgggactatgtctgtgtcgctggtcgctgatgaaaatccgttcgcgcagggtgctctgaagtctgaggattgcttcatcctggatcatggaaaagatgggaaaatctttgtttggaaagggaaacaggctaacacagaggaaagaaaggcagcacttaaaaccgcaagcgacttcattaccaagatggactaccctaaacaaacacaagtatccgttctccctgaggggggcgagacgcctttattcaaacagttttttaaaaattggagggacccagaccaaaccgatggactcggcctcagctacttgtcttcacatattgctaatgtggaacgggtcccgttcgatgccgccacgctgcacacctcaaccgccatggccgcccagcacgggatggatgatgatggtacgggtcaaaaacaaatttggagaattgagggcagtaacaaagtacccgtcgaccccgcaacatatgggcagttctacggcggagacagctacattatcttatacaactaccgacatggcggcagacagggccaaattatttacaactggcagggcgcccagtcaacccaggatgaagtcgccgccagcgcgatcttgaccgctcagcttgacgaggaattggggggaacgcccgtgcaaagccgcgtggtccagggaaaggagcccgcccacctgatgagtctgttcggcggtaagccaatgattatctataaagggggcacttcgagggagggggggcaaacagccccagcttctaccagactgttccaggttagagcaaattccgccggggctactagggcagtggaggtcctgccgaaagctggggctctaaactcaaacgatgcatttgtgcttaaaacaccatctgcggcatatttatgggtcggcactggggctagcgaagccgagaagacgggtgctcaggaactcttgagggtcttacgagcccagcctgtacaagttgcggagggcagtgagcccgatggtttttgggaggcgttaggcggcaaagcggcttataggacttcgcctagacttaaggacaagaaaatggacgctcatcccccaagactcttcgcatgctccaacaagatcggacgatttgtaatcgaggaagtgccgggagagttaatgcaagaagacttagcgacagatgatgtgatgctgctggacacctgggaccaagtttttgtgtgggtgggtaaggactctcaggaggaagagaagactgaggccctgacaagtgctaagagatacattgaaacagatcctgcaaatagagatagacgtacaccgattacagtggtgaagcagggttttgaacccccctcttttgttggatggttcctaggctgggatgatgactattggtcagttgatcctttggacagggctatggccgagcttgcggcatag

SEQ ID NO: 248817 - RNA, 2196 nt, synthetic construct
  misc_feature 1..2196: note = Description of Artificial Sequence: Synthetic coding sequence
  source 1..2196: mol_type = other RNA
atggtggtagaacacccggaattcttgaaagcaggtaaggagcctgggctgcagatctggcgcgtggagaaattcgacctcgtacccgtcccaaccaatctctacggcgacttctttaccggggacgcttacgttatcctaaagacggtgcaactcaggaacggcaaccttcaatacgatctacactactggctgggtaatgagtgctcgcaggatgagagtggagcagccgcaatcttcaccgtgcagttagacgactacctaaacggccgagccgtgcagcatcgcgaagtgcagggctttgaatcagccacattccttggatacttcaagagtggactaaagtacaaaaaaggtggcgtggcatccggtttcaagcatgttgtgcctaatgaggtggtcgtgcaaaggttgttccaggtgaaaggacgaagagtagtgcgagcaaccgaggttcctgtgtcctgggaatcattcaacaacggagattgtttcattctcgacttgggaaacaacatacatcaatggtgcggctccaatagtaacagatacgaacgtcttaaagcaactcaggtgagtaaaggcattcgcgacaatgagcgaagcggcagggctcgcgtccacgtttccgaagagggtaccgaaccagaggcaatgctccaggtgctcgggccaaaacccgcacttcccgccggaactgaagacactgctaaggaagatgcagccaacagaaaactcgccaagttgtacaaggtttccaatggcgccgggacaatgtccgtctctttagttgccgatgagaacccattcgcacagggtgcattgaaaagcgaagattgtttcattttagatcacggtaaggacggcaagatattcgtgtggaaagggaaacaggccaatactgaagagagaaaggccgccctcaagacagcatccgactttattaccaagatggactacccaaaacaaacacaggtttctgtgctccctgaaggaggtgagactcccctgttcaaacagttctttaaaaattggagggatcccgaccagactgatggcctgggcctgagttatctctcctcgcacattgcgaatgtggaacgagtgccatttgatgcagctaccctccataccagcactgcaatggctgcgcagcatggaatggatgacgatgggactggacagaagcagatttggaggatcgagggaagcaataaagtccccgttgatccagcaacatatggccagttctacggcggcgattcctatataatcttatataactacagacacggcgggaggcagggccagataatctacaactggcagggagctcaaagtacgcaggatgaggtagcggccagcgccattcttacagcccagttggacgaggagttagggggcacaccagtgcagtcaagagtcgtgcaggggaaagagcccgcccacctgatgtctctcttcggtggcaagcctatgattatttataaggggggtactagcagagaaggcggacagaccgcccccgcaagcactagactttttcaagtaagagccaattctgcgggagccaccagagctgtggaggtactcccgaaagcaggtgcactgaatagcaacgatgcttttgtgctgaaaacgcctagtgccgcatatttatgggttggaacgggcgctagcgaagccgagaagactggagcgcaggaactgctcagagttctgcgggcccaaccagtgcaggtggccgaaggaagcgaaccggacggcttttgggaagcgcttgggggcaaagcagcgtaccgtactagtccccgcctcaaggataaaaaaatggatgctcatccgccaagactattcgcttgtagtaacaagatcggaagattcgtaatcgaagaggttccaggagaactaatgcaggaagaccttgccacagatgatgttatgctgttggacacatgggatcaagtttttgtctgggtggggaaggactcccaggaggaggagaaaaccgaggcactgacttccgccaaaagatatatcgagaccgacccggctaatagggaccgtaggacgccaatcactgtagttaagcaaggattcgaacctccctcgtttgttggctggtttctgggctgggatgacgattactggtcagtagatccccttgacagggcaatggccgaacttgccgcatag

SEQ ID NO: 248818 - RNA, 783 nt, synthetic construct
  misc_feature 1..783: note = Description of Artificial Sequence: Synthetic coding sequence
  source 1..783: mol_type = other RNA
atggttgtagaacaccccgagtttctgaaagcgggtaaggaaccaggcctgcagatatggcgggtggagaaattcgatcttgtgcccgtgcctaccaatctctatggagacttctttactggcgacgcgtatgtgattctcaagacagtccaactccgcaatggaaacttacaatacgatctacactattggcttggaaacgaatgttcacaggatgagagcggcgctgctgctatcttcacagttcagctggacgactacctaaatgggagggcagttcaacaccgggaagtacagggctttgagagcgctacatttctgggatatttcaagtccggtctcaaatataaaaaaggaggcgtggctagcggatttaaacacgttgtgcctaacgaggtcgtagtccagcggctattccaggttaaaggcagaagggtggtacgcgcaacagaagtgcctgtgtcttgggaatcttttaacaatggcgactgttttatcctcgatctcggcaataatattcaccagtggtgcggtagcaactctaataggtacgagcgtcttaaggccacgcaggtttccaaaggaatccgggacaatgaacgaagtggaagggcgagagtgcacgttagcgaggagggcaccgaacctgaggctatgctgcaagttctaggccctaagccagcgctgcccgcaggaacggaggacacggccaaggaggatgccgctaaccgaaaactggccaaattatacaaggtgagcaacggagccggaacaatgtcttag

SEQ ID NO: 248819 - RNA, 2229 nt, synthetic construct
  misc_feature 1..2229: note = Description of Artificial Sequence: Synthetic coding sequence
  source 1..2229: mol_type = other RNA
atggagaagctgttctgttgctttcctaatagcatggttgtggagcatcctgaatttctcaaggccgggaaggagcctggactgcagatatggagagtggaaaaattcgacctcgtcccagtacccactaatctttatggggacttcttcacaggtgatgcatatgtcatcctcaagactgtgcagctgagaaatggcaatttacagtacgacttacactactggttaggaaatgagtgttcccaggatgaatcaggggccgccgcaatttttaccgtacagctggacgattacttgaatgggagagccgtccagcatcgcgaagtccagggtttcgagtccgccacctttctgggctactttaaatctggtctgaaatacaagaaaggcggggtcgcaagcgggttcaaacacgttgtccctaatgaagtggtagtccaaagattattccaagtgaaaggacggagagtcgtgagggccacagaggttcccgtgtcctgggaaagtttcaataacggagattgctttatccttgacctaggaaataatatacaccagtggtgcggatccaacagcaatcggtacgaaaggctcaaggccacacaagtatccaaaggcattagggataacgaaagaagtggacgcgctagagtccacgtgtccgaagaaggtacggagccagaggccatgctccaggtacttggacctaaacccgcactccctgcaggcaccgaagacactgccaaagaggacgcagcaaatagaaagcttgccaagctctacaaggtctctaatggtgcaggaactatgagcgttagcctcgtcgccgacgaaaatccttttgcccagggagccctcaagtcagaagactgtttcatcctcgatcacggcaaagacggaaagattttcgtctggaagggaaagcaagccaacaccgaggaacgcaaagccgccttaaaaaccgctagcgactttatcactaagatggactatcccaagcagacccaggtttccgtcctgcccgagggcggagagacacccctatttaagcagttctttaaaaactggcgggacccagatcagactgacgggctcggcctctcatatttatcatcacatatcgctaacgtggaacgggttccttttgacgcagccacactccacacctctaccgctatggccgcacaacatggaatggatgacgacggtacagggcagaaacagatctggcgtatcgaaggatcgaacaaggttcccgtggaccctgcgacatacggacaattctatggaggcgatagctacattatcttgtataattatcggcacggggggagacaaggtcagatcatctataactggcagggggctcagagcacacaggatgaagtcgccgctagcgcaatccttacagcccagctggacgaagaacttggcggcacaccggtgcaatctagggtggtccagggtaaggaacccgcacacctcatgtctctatttggtggcaaaccaatgattatctacaagggtggtacatcaagggaaggcggccagaccgccccagcatctactagactgtttcaagtacgcgccaactccgctggagcaacaagggcggtcgaagtgctgcctaaagccggggcacttaacagcaatgacgcgttcgttcttaaaacaccctccgctgcatatctatgggtgggcactggcgctagtgaagccgagaaaaccggagcacaggaactgctcagggtgctgcgcgcacagcctgtgcaggtggcagaggggtccgagccagacgggttttgggaagcattgggaggtaaagccgcctacagaaccagccctaggctcaaggataagaaaatggacgctcacccaccgagattgttcgcctgctcaaataaaatcggtcgctttgtgatagaagaagttccaggcgaattgatgcaggaggaccttgcaactgacgatgtaatgctgctggacacatgggatcaagtgttcgtgtgggtggggaaagatagccaggaagaggaaaagacagaggcgctgacttccgccaaaagatatattgaaaccgatcccgctaatcgcgaccgtagaactccgatcacagttgtgaagcagggcttcgaaccccctagttttgttggctggttcctaggttgggatgatgactactggtcagtggatcccttggatagagcaatggccgagttagctgcctag

SEQ ID NO: 248820 - RNA, 2196 nt, synthetic construct
  misc_feature 1..2196: note = Description of Artificial Sequence: Synthetic coding sequence
  source 1..2196: mol_type = other RNA
atggtagtggaacatcctgaatttttaaaagccggaaaagaaccaggcctgcagatttggcgcgtggaaaaatttgacctcgtgcctgttccaactaatttatatggagattttttcacgggtgacgcttatgtaatcctcaagacagtgcagctgagaaatggcaatctgcagtatgacctccattattggctcgggaatgaatgttcacaggacgagtctggggcggcagctatcttcacggtccaactggatgactatctgaatggcagagctgtacagcaccgcgaagtgcagggattcgagagcgctactttcctggggtatttcaagagcgggttaaaatacaagaaaggaggagttgcatcaggatttaaacacgtcgtgcctaacgaggtcgtggttcagcgtttgtttcaggtgaaaggacgcagggttgttagagccacagaagtgccagtctcgtgggaatcattcaataacggtgactgcttcatcctggatctgggcaataatattcaccagtggtgtggatcaaattcaaaccgttacgaacggcttaaggcgacacaggtctctaagggtattcgcgacaatgaaaggtccggacgggcccgcgtgcacgtgagcgaggagggaactgagccagaagccatgcttcaggtgttgggacctaaacccgccctgccggctggcactgaagacaccgcaaaggaagatgctgcgaacaggaagctcgcaaaactctacaaggtaagtaatggagcgggaaccatgtctgtgtccctggtggcagacgagaacccctttgcacaaggagcactgaagtcagaagactgctttatcctggatcacggtaaagatggaaaaatcttcgtatggaaaggtaaacaggcgaatactgaagagcggaaggctgccctgaagacagccagtgactttatcacgaaaatggattatcctaagcaaacccaggtgagtgtgctccccgagggcggcgagacccctctctttaaacagttcttcaagaattggcgtgatccggaccagacagatggacttggcctgtcatatctgagctcccacattgccaacgtagagagagtgccatttgatgcagccacattacataccagtaccgctatggcagcacaacacggaatggacgacgatggaacggggcagaaacaaatatggcgcattgagggctccaacaaggtccccgtagacccagccacctacggccagttttacggaggtgattcctacatcatactatacaactatcgacacggcggaaggcagggccagatcatatacaattggcagggtgcacagagtacccaggacgaggtcgcggcatctgcgattctgacagcgcagcttgatgaagaactgggaggcacccccgtacaaagccgcgtggtccaaggcaaagaaccagcacatctgatgtcactttttggaggcaaacccatgattatctacaaaggaggaacttcaagagaaggtggccagaccgctccagcatcaaccagactgtttcaggtgcgggccaacagcgctggcgccacaagagccgtggaggtgctgcccaaagcgggcgccttgaactctaatgatgcgttcgtcctgaaaaccccctcagcagcctacttgtgggtggggaccggagcatccgaagcagaaaagactggggcacaagagctccttcgcgtgttgagagcccaaccagttcaagttgccgaagggagcgagcctgacggcttttgggaggcattaggcggaaaagctgcttataggacgtcccccagactgaaggataagaagatggatgctcacccccccaggcttttcgcttgctcaaataagattggaaggtttgtcatagaagaggtacctggcgaacttatgcaggaagatttagctacagacgatgttatgctgctcgatacgtgggaccaagtgttcgtgtgggtcggcaaggacagccaggaagaagagaaaaccgaagcgttaacctctgcaaaaagatacatagaaactgatcccgcaaatagggatagacggacccccattacagtggtgaaacagggatttgaacccccatcttttgttggctggttcctcggctgggatgatgattattggagcgtggaccccctggacagagctatggcagagctggctgcttag

SEQ ID NO: 248821 - RNA, 2118 nt, synthetic construct
  misc_feature 1..2118: note = Description of Artificial Sequence: Synthetic coding sequence
  source 1..2118: mol_type = other RNA
atggtcgtcgaacatcctgaattcctcaaagcagggaaggaacctggccttcagatatggagggtagaaaagtttgacttagtgcccgtacccactaatctgtacggcgacttttttaccggcgacgcatatgtgatcctgaagaccgtccaattaagaaatggcaacctgcaatacgaccttcactactggctagggaacgagtgctcacaggatgaatccggtgctgctgcaatttttactgtgcagttggacgattacctgaaatacaaaaaaggaggagtagcatcaggcttcaagcatgtggttcctaatgaagtcgtcgtgcagagactgtttcaagttaaagggaggagggttgtccgggccacagaggtgcccgtttcgtgggagagcttcaataatggcgactgttttattctagacttaggtaacaatatccaccagtggtgtggcagtaattctaatagatacgaaaggttaaaggcaacacaggtgtccaaagggattcgcgacaatgaacgatcaggacgcgccagagtccatgtaagtgaagagggtacagaaccggaggctatgctgcaggtgcttggccccaagcctgccttgcccgccggcacagaggacaccgctaaggaggacgcagcgaatagaaaattagccaaactttacaaagtgtctaacggcgcggggactatgtcagtgagcctggtggcagacgaaaacccattcgcacaaggtgcgttgaaaagcgaggactgtttcatcctagaccacggcaaggacggtaagatattcgtatggaaaggaaaacaggcaaatactgaggaaaggaaagccgccctcaagactgcgagtgacttcattaccaaaatggactacccaaagcagacccaagtctcagtattacccgaaggaggagagacacccttattcaagcagtttttcaagaactggagagatcctgaccagactgacggactcggcctgagctatttgagttctcacatcgccaatgtggagagagtgcccttcgacgctgcaacgctccatacttccacagctatggccgcccaacacggcatggatgatgacggcaccgggcagaaacaaatttggcggatagaaggttcaaacaaggttcctgttgatcccgctacatacgggcaattttatggtggcgactcgtacattatcctctacaactacagacacggcggcagacaggggcagatcatttacaactggcagggagcgcagagcacccaagacgaagtagccgcgtctgcgatattgaccgctcaactcgatgaagaacttggaggtactcctgtccaatcacgggtcgtccagggtaaagagccagcccatctcatgtctctttttgggggcaaacctatgatcatttataaaggcggcaccagccgggaaggaggccagaccgcccccgccagtaccagactcttccaggtgagggctaacagtgccggtgctacacgagcagtagaagtcctcccaaaagccggggcacttaactctaatgatgcctttgttctcaagacgcctagtgccgcctacctatgggtcggtaccggtgctagcgaggccgaaaagaccggagcccaagaattgctgagggttttaagagcacagcctgtccaagtggccgagggaagcgaacctgatgggttttgggaagccctagggggcaaggccgcgtatagaacaagcccccgcctcaaagataaaaaaatggacgcccaccctccccgactgttcgcttgctctaataagattggaagattcgtgattgaggaggtccctggggaacttatgcaagaggacctggcaacagatgatgtgatgctgctggatacatgggaccaagtgttcgtgtgggtgggaaaagatagccaagaagaggagaagacagaggcactcacttcggccaagagatacatagagacagatcccgcaaatcgggaccgcagaactcccatcaccgtggtcaaacagggatttgagccaccgagctttgtaggttggtttttgggatgggacgacgactactggtccgtggaccctttagacagagcaatggccgaacttgcagcctag

SEQ ID NO: 248822 - RNA, 2220 nt, synthetic construct
  misc_feature 1..2220: note = Description of Artificial Sequence: Synthetic coding sequence
  source 1..2220: mol_type = other RNA
atgcccctgtgtaccccaaattcaatggtggtggagcaccccgaatttcttaaggcagggaaggaaccgggcctccagatttggagagtggaaaaatttgacctcgttcccgtgcccacaaacttgtacggcgatttttttaccggtgatgcatacgtgatcttgaaaaccgtccaactacgaaacggaaatctgcaatatgatttgcattattggttaggcaacgagtgcagccaagatgagtccggggccgccgcaatattcacagtgcaactagacgactatctgaatggaagagctgtccagcaccgggaggttcaaggattcgagtccgctacattcctggggtacttcaagagtggtttaaaatataagaaaggcggagtcgcctcagggttcaaacatgtggtccctaacgaggtcgtcgtgcaaagactttttcaggttaaaggaagacgagtggtcagagccacagaggtgcccgtgagctgggaatccttcaacaatggcgattgcttcatcctcgatctgggaaacaatatccatcagtggtgcggatctaattctaatcggtatgagaggttaaaggctacacaggtgtccaagggaataagggacaacgagaggagcggaagggccagggtgcacgtgtcagaagaaggaacagagccagaggccatgctgcaggtccttggtccgaaacctgctctgcccgcgggaacagaagacacggcaaaggaggacgcagccaacagaaagttagccaaattatataaagtatccaacggagccggtaccatgtcagtctctctagtggcagacgagaatccattcgcccagggggcactcaaaagcgaagactgctttatactcgaccacggaaaggacggaaagatcttcgtgtggaagggcaaacaagcaaatacggaagagcggaaagcagcgctaaaaacagcgtctgattttattacgaagatggattacccgaagcagacacaggtgagcgttttacccgagggcggcgaaactcccttgtttaaacagtttttcaagaattggagagaccccgaccagacagacggccttggcttatcttatctcagttcccacattgcaaacgtggaacgcgtcccttttgatgcagccaccctgcatacaagtaccgcaatggcagcgcagcatgggatggacgatgacgggacaggacagaaacagatatggagaattgagggctcaaataaagtaccagtggacccagccacctacggacagttctatggcggtgattcctatatcattctatacaattacagacatggcggccgccaaggacagattatatacaattggcaaggagctcaatcgactcaggacgaagtggcggcatcagctatattaactgctcagcttgacgaggagctggggggaacacctgtgcagtcccgcgtggtgcagggtaaggagcctgctcatctgatgagtctatttggagggaagcctatgatcatttataagggcggtacaagccgagaaggcggccagactgccccagcctccacgagactatttcaggtgagggcaaattcagctggcgccacaagagctgtcgaagtcctgccaaaagccggagcgctcaattccaacgatgcattcgtcctgaagacccctagtgccgcctatttatgggtgggtaccggagctagcgaagctgagaagaccggagcacaggaactgcttagggtactgcgggcccagcccgtgcaagtcgccgaggggagcgagccagacggattttgggaagccttgggagggaaggcagcgtaccggacatctcccagattaaaagacaagaagatggatgcacatcccccaaggttgtttgcatgttctaacaagattggccgttttgttattgaggaagtacctggcgagctcatgcaggaggacctagctactgatgatgtcatgctcctcgatacatgggaccaggttttcgtctgggttggcaaagattcacaggaggaggagaagactgaggctttgacctctgccaaaagatacatagaaacagaccccgcaaatcgtgacagaaggacacctataacagtcgttaagcagggattcgagccaccaagcttcgtgggatggttcttaggttgggatgacgattattggtccgttgacccactggatcgtgcaatggcagaactggctgcatag

SEQ ID NO: 248823 - RNA, 351 nt, synthetic construct
  misc_feature 1..351: note = Description of Artificial Sequence: Synthetic coding sequence
  source 1..351: mol_type = other RNA
atgccctcaccgggtacagtgtgttctcttctccttttagggatgctttggttagatctggcaatggccggctcttcttttctttcccctgagcaccaacgggtccagcgaaaggaatcaaagaaaccgccggcgaaattgcagccacgggcactggccggttggctacgacccgaggatgggggacaggcagaaggagccgaagatgaacttgaagtgcgcttcaatgcaccctttgacgtcggaatcaagctctctggagttcagtatcagcagcacagccaggctttaggcaagtttctacaagacatactctgggaggaggctaaggaggcaccagctgataaatag

SEQ ID NO: 248824 - RNA, 354 nt, synthetic construct
  misc_feature 1..354: note = Description of Artificial Sequence: Synthetic coding sequence
  source 1..354: mol_type = other RNA
atgcccagccctggtaccgtctgttcacttctacttctgggtatgctttggcttgaccttgctatggcgggctcttcttttctgtctcccgagcaccagagagtgcagcagaggaaggaatctaaaaagccacccgcgaaacttcagcctagggcgctggcaggctggttacgacccgaggacggaggccaagctgaaggcgcggaggatgaactagaagtgcgattcaatgcaccatttgacgttggcattaaactgtccggggtgcagtatcagcaacattcacaagctctgggaaagttcctgcaagacatcctttgggaagaagctaaggaagcccccgccgacaaatag

SEQ ID NO: 248825 - RNA, 276 nt, synthetic construct; identical to SEQ ID NO: 248219
  misc_feature 1..276: note = Description of Artificial Sequence: Synthetic coding sequence
  source 1..276: mol_type = other RNA

SEQ ID NO: 248826 - RNA, 102 nt, synthetic construct; identical to SEQ ID NO: 248220
  misc_feature 1..102: note = Description of Artificial Sequence: Synthetic coding sequence
  source 1..102: mol_type = other RNA

SEQ ID NO: 248827 - RNA, 354 nt, synthetic construct
  misc_feature 1..354: note = Description of Artificial Sequence: Synthetic coding sequence
  source 1..354: mol_type = other RNA
atgcccagtccagggacagtttgtagtctccttctgctcggtatgttgtggttggacttggccatggccggtagttctttccttagtcctgagcatcaacgcgttcaacaacggaaagaatctaaaaagccgccagcgaaattacagcctcgcgcactcgcagggtggctgagaccagaggatggaggccaggctgaaggggccgaggacgaactggaagtgaggtttaatgcgcccttcgatgtgggcattaaattatcgggtgttcaataccagcagcactctcaggctctagggaagttcctccaagacattctctgggaagaggcaaaagaggcaccagcagacaaatag

SEQ ID NO: 248828 - RNA, 351 nt, synthetic construct
  misc_feature 1..351: note = Description of Artificial Sequence: Synthetic coding sequence
  source 1..351: mol_type = other RNA
atgccctctcctggcacggtttgtagcttgttattactaggcatgctctggctggatcttgccatggcaggctcctctttcctatccccagagcaccagcgcgtgcagagaaaagagagcaaaaagccacccgctaagctgcagccaagggcactggccggatggctgagacccgaggacggtgggcaggccgagggcgcagaggatgaactggaggttcgctttaacgctcccttcgacgttggcatcaaactaagcggagtacagtaccagcagcactcccaagctttaggaaagtttctccaggacatcctttgggaagaagcaaaagaggctcccgctgacaagtag

SEQ ID NO: 248829 - RNA, 318 nt, synthetic construct
  misc_feature 1..318: note = Description of Artificial Sequence: Synthetic coding sequence
  source 1..318: mol_type = other RNA
atgttcacttgctggtggtcttatctgagatcaacactcgcagcagtcccgggcgaggccagccgggtgcagcaacgcaaagagtctaagaaacccccagccaaactccaaccccgcgcacttgccggatggctccgtcccgaggatggcgggcaggccgagggggcagaggatgagttagaggtaagattcaacgccccctttgacgtaggtatcaaactgtcaggagtccaatatcaacagcactcacaggctttagggaagtttctacaggacatcctttgggaggaggccaaagaggcccctgctgacaaatag

SEQ ID NO: 248830 - RNA, 201 nt, synthetic construct; identical to SEQ ID NO: 248224
  misc_feature 1..201: note = Description of Artificial Sequence: Synthetic coding sequence
  source 1..201: mol_type = other RNA

SEQ ID NO: 248831 - RNA, 315 nt, synthetic construct
  misc_feature 1..315: note = Description of Artificial Sequence: Synthetic coding sequence
  source 1..315: mol_type = other RNA
atgtttacctgctggtggtcttacctgagaagcacactagcggctgtaccaggcgaggcatcgagggtgcagcggaaagagtctaaaaaacctcccgcaaaattgcagccccgcgctttagcaggttggctcagacccgaagacggcgggcaggctgagggggccgaggacgagctagaagttagattcaatgccccattcgacgtcgggatcaagctttcgggcgtgcaataccagcaacactcacaggcactgggaaaattcctgcaggacattttatgggaagaagcaaaggaagcgccagcagataagtag

SEQ ID NO: 248832 - RNA, 351 nt, synthetic construct
  misc_feature 1..351: note = Description of Artificial Sequence: Synthetic coding sequence
  source 1..351: mol_type = other RNA
atgccttccccaggtactgtgtgctcactacttttactcggtatgttgtggctcgacctggcaatggccggatcgtcgtttctgtctcccgaacaccagcgagttcagcgaaaagagtccaagaagcctcctgctaaactgcagcctagggccttagcaggatggttgagacccgaagacggaggacaagccgaaggagctgaagatgagctcgaggtcaggtttaatgcaccctttgacgtcgggataaagttgtcaggcgtgcagtaccagcagcatagtcaggcactcgggaaattccttcaagacattctatgggaagaggccaaggaagccccagcggataagtag

SEQ ID NO: 248833 - RNA, 354 nt, synthetic construct
  misc_feature 1..354: note = Description of Artificial Sequence: Synthetic coding sequence
  source 1..354: mol_type = other RNA
atgccatcccctggcaccgtctgctccctgctgttactaggcatgttgtggttagacctggcaatggctggctcgtcgtttctgtcaccggagcatcagagagtccagcagcggaaagaatccaagaaaccacccgcaaaactgcagcccagggccctggcggggtggctgcggcccgaagatggaggacaagccgagggcgctgaagacgaactggaggtgcgatttaatgccccttttgacgtgggaatcaaactttccggtgttcagtatcagcagcacagtcaagcactgggcaaatttttgcaagacattttatgggaagaagccaaggaagccccagccgataagtag

SEQ ID NO: 248834 - RNA, 354 nt, synthetic construct
  misc_feature 1..354: note = Description of Artificial Sequence: Synthetic coding sequence
  source 1..354: mol_type = other RNA
atgcctagccccggaactgtctgttcgctgcttctccttggaatgctgtggttagatctcgctatggccggaagcagctttctctcccctgaacatcagagggttcaacagaggaaggagtcaaaaaagcctcccgcaaaattgcagccacgtgccctcgcggggtggcttcgcccagaagatggcggccaggctgagggagccgaggatgagctagaggtgagattcaacgccccattcgatgtgggcatcaaactgagcggagtgcaatatcagcagcacagccaagctctcggtaagttcttacaagacatactttgggaggaagcaaaggaagcccctgcagataagtag

SEQ ID NO: 248835 - RNA, 1350 nt, synthetic construct
  misc_feature 1..1350: note = Description of Artificial Sequence: Synthetic coding sequence
  source 1..1350: mol_type = other RNA
atgtattctttcaatactcttcgtctgtatttatgggaaacaatcgtctttttctccttggcagcttccaaagaggccgaagcagccagatctgcccccaagcctatgtctccttctgactttctcgacaaacttatgggaagaacttccgggtacgacgcacggattcggccaaactttaaaggccctcccgttaatgtgagctgtaacatctttataaatagtttcggttctattgcagagaccaccatggactatcgagtgaatatatttctgagacagcagtggaacgaccctagattagcctataacgaataccctgatgacagcctggatctcgaccccagcatgcttgactcaatttggaagcccgacctcttctttgccaatgaaaaaggcgcacactttcatgagattactaccgataacaaactcttgcgaattagtcggaacggaaatgtgctttactcaattaggatcactttaacactcgcctgccccatggatctcaagaattttcctatggacgtccagacctgcattatgcagctggaatcttttggatacacaatgaacgatcttatattcgaatggcaagagcaaggggcagtgcaggtggcagatggactgactctcccccaattcatccttaaggaagagaaagacctgcgttactgtacaaagcactacaacacagggaagttcacatgcattgaagccagatttcacctcgaacggcagatgggatactacctcatccagatgtatatcccttcgttattgattgtgatacttagctggatttctttttggatcaacatggatgcagctcccgcacgcgtgggccttgggataacgacagtacttacaatgaccacacaatcatctggctctcgggctagtctgcccaaggtgtcctatgtcaaggcaatagacatttggatggcggtgtgcctgctttttgtgttctcagcactcctggagtacgcagccgtcaattttgtatctcgtcaacataaggagttactgcgcttccgaagaaaaagacggcatcacaaggaagatgaggctggcgaaggacggtttaacttttcagcgtatgggatggggcccgcatgtctgcaagctaaggatggcattagcgtgaaaggggctaataactcaaatacaaccaatccccccccagctccctcaaagagccccgaggagatgcggaagttatttatacaaagggctaaaaagatagataagatttcaagaatcggatttcccatggctttcctgatctttaatatgttctattggattatatataaaatcgtcagacgggaggacgtacataatcaatag

SEQ ID NO: 248836 - RNA, 1374 nt, synthetic construct
  misc_feature 1..1374: note = Description of Artificial Sequence: Synthetic coding sequence
  source 1..1374: mol_type = other RNA
atgtacagcttcaacactcttcgcttatatctatgggagactatagtctttttttctctggctgcaagcaaggaggccgaggccgcaagatcggcacctaaaccaatgtcaccctctgacttcctagacaaacttatggggcgcacatctggctacgatgcccgaattagacccaacttcaagggacctcctgtgaacgtaagctgcaacatctttattaactcctttggtagtattgcagagaccactatggactatcgtgtcaacatttttcttagacagcagtggaatgatcctcgccttgcttacaacgaatatcccgatgattcacttgacctagacccatccatgttagattccatttggaagccggacctcttcttcgctaatgagaaaggcgcacattttcatgaaattactactgataataagcttttgagaatttcgcgaaatgggaacgtactgtattctatcagaattaccttaaccctcgcatgtccaatggatctcaagaacttcccgatggacgttcaaacctgtatcatgcagctagaatcattcggctatactatgaatgatctcattttcgaatggcaggagcaaggcgcagtgcaggtggccgacggacttacattgccccagtttattctgaaggaggagaaggatttgcgttactgtaccaaacattataacaccgggaaattcacatgtatagaagccagattccatctagagcggcaaatgggctattatttgatccagatgtatataccgtcattattgattgtcattctcagctggatttctttctggatcaacatggacgcagcgcctgcccgggtgggtctcggtattacaacagttctgacaatgaccactcagagtagcggttccagggccagcctgcctaaagtctcatatgttaaggcgatagacatctggatggcagtctgtttactgttcgtgttcagcgcattattggaatacgcggcagtcaatttcgtgagcagacaacacaaagaactactacgctttcggcgcaaacgcagacatcacaagagtccaatgctcaacttattccaagaagatgaggccggagagggacggtttaatttttctgcctacggaatgggccccgcttgccttcaagcaaaggacggcattagtgttaaaggtgctaacaacagcaatacaactaaccccccccctgctccttcaaagagccccgaggagatgcgcaaactctttattcagcgtgccaaaaaaatcgacaagatctctagaattggctttccaatggcttttctaatatttaacatgttttattggatcatttacaaaatcgtacgacgcgaagatgtacacaaccaatag

SEQ ID NO: 248837 - RNA, 1101 nt, synthetic construct
  misc_feature 1..1101: note = Description of Artificial Sequence: Synthetic coding sequence
  source 1..1101: mol_type = other RNA
atggactatcgcgtcaatatctttcttcggcagcagtggaatgatcctcgattggcctacaatgaatatcccgacgactctcttgacttagatccctctatgttagatagcatctggaaaccggacctttttttcgcaaacgaaaagggcgcacattttcatgagattactaccgacaataaattactgcgaattagtcgcaatggtaatgtcctttactccatccgaataactctgacactcgcttgccccatggacttaaagaacttccctatggacgtgcagacctgtataatgcagctggagtcttttggatatactatgaatgatctgatcttcgaatggcaagaacagggcgcagtgcaagttgctgacgggctgacattgcctcagttcatcctcaaagaagagaaagatctacggtactgtaccaagcattataacacagggaaatttacatgcatagaggcccggtttcacctcgaacggcagatgggctactacctcatccagatgtacatccctagcctcttgattgtcatccttagttggatttctttttggatcaacatggacgccgccccagctcgcgtgggtctgggcattaccaccgtactgacgatgactacacagagcagcggatcaagagccagcctgcccaaggtctcgtatgtgaaagccatcgatatttggatggcagtttgtctcttgtttgttttctccgctctactagaatacgctgccgtgaatttcgtgtcaaggcaacacaaagagctgctcaggttcaggcgcaaacggaggcatcacaaagaagatgaagccggtgaaggacgcttcaacttctcagcttacggaatgggccctgcgtgcttacaggctaaggacggtatttcagtgaaaggcgccaacaactcaaacactaccaaccctccacccgctccgtccaagtcacctgaagagatgagaaaactctttatccagagggcaaaaaaaatcgacaaaatctctagaatagggttccctatggcatttctgatcttcaacatgttctactggatcatttacaaaatagtcagaagagaagacgtacacaaccaatag

SEQ ID NO: 248838 - RNA, 1365 nt, synthetic construct
  misc_feature 1..1365: note = Description of Artificial Sequence: Synthetic coding sequence
  source 1..1365: mol_type = other RNA
atgtccgctggtggaccctgtcccgcagcagctggcggaggacccggaggagcatcctgcagtgtcggagccccgggcggcgtctccatgttccggtggctggaagttctcgagaaagaattcgacaaggcctttgtcgacgtagatctgcttctgggtgaaatagaccccgaccaggccgatatcacatatgagggacggcaaaagatgaccagtctgagcagctgtttcgcacagctgtgtcacaaagctcagtccgtatctcaaattaatcacaaattggaggctcagctcgtggaccttaagtcagaacttaccgagacacaggcagagaaggttgttctggaaaaggaagtacacgaccagctgctccagctgcacagtatccagcttcagttacacgccaaaacggggcagtccgcagattcaggaactattaaggcaaaactcgaacgtgagctggaagccaacaagaaggaaaagatgaaggaggcgcaattggaagccgaagttaagttgttgcgcaaagagaacgaagcacttagaagacatatcgccgtactccaagccgaggtatacggcgcacggctggccgccaagtatctagataaagaattggcagggagggtacagcagattcaactgcttgggagagatatgaaaggccctgctcacgataagctgtggaaccaattggaggctgagatccaccttcacagacataaaacagtaatccgggcctgtcgtggaaggaacgacctcaaacgaccaatgcaagctcctccaggccacgatcaggacagtttgaagaaatcccagggggtaggaccaatccgaaaagtgctgcttttaaaggaagatcatgaaggcctgggcattagtattacggggggcaaggagcacggagttcccatcctgatatctgagatacaccccggccaacccgccgatagatgcggtggcttgcatgtgggggatgctatactcgctgtgaatggcgtcaacctgagagatacgaaacacaaagaagctgtgacaatactgagccagcagaggggtgaaatcgagtttgaggtcgtctatgtggcccccgaggtggacagcgatgacgagaatgtggaatatgaggatgaaagtgggcataggtatcgtttgtatctcgacgaattggagggcggcggcaatccaggcgcctcttgtaaagataccagcggtgaaattaaagtgctgcaaggatttaataagaaggccgtgactgatactcacgaaaacggcgacctgggtacagcaagcgaaactcccttggatgatggtgcttccaaactggatgacctccatacactatatcacaagaaaagttactag

SEQ ID NO: 248839 - RNA, 918 nt, synthetic construct
  misc_feature 1..918: note = Description of Artificial Sequence: Synthetic coding sequence
  source 1..918: mol_type = other RNA
atggctgcaggcctcgcccgcctgttattgctacttggtctttcagctgggggcccggcaccggcaggcgcagctaaaatgaaagtggtggaagagcccaacgcgtttggtgtaaacaacccgtttctcccccaggccagccggctgcaggcaaaacgtgatcccagccccgtctcaggccctgtacatcttttcagactgtcgggaaagtgttttagcctcgtcgaatcaacatacaagtacgagttttgtcccttccacaatgtcacccagcatgagcagacatttcggtggaatgcttactccggaatattaggaatttggcatgaatgggagatagcgaacaacacctttaccggaatgtggatgcgagacggagatgcatgcaggagcagaagccggcaaagcaaagtggagctcgcttgtggaaagtctaatcgtttagctcatgtgagtgagccctcgacatgcgtatacgctttaacgttcgaaacaccgctcgtgtgccaccctcacgctctgttggtgtatcccactctaccagaggctcttcagcgacaatgggaccaggtggaacaagatctagccgatgagcttatcaccccacagggtcacgagaagttactcagaactttgtttgaggacgctggatacttaaagacccctgaagaaaacgagcccacacagttggagggaggaccggattcccttggttttgaaactctggaaaactgtcgcaaggcccacaaagagctcagtaaagaaattaaaagactgaaaggactgttaactcagcacggcattccctatacacgtccgaccgagaccagtaacctagagcatttgggccatgagactcctcgcgcaaaatctcctgaacagctccgcggtgatccaggtctgagggggagtctgtag

SEQ ID NO: 248840 - RNA, 2196 nt, synthetic construct
  misc_feature 1..2196: note = Description of Artificial Sequence: Synthetic coding sequence
  source 1..2196: mol_type = other RNA
atgagttggtttgtcgatctggctggcaaagccgaggatctactcaatagggtcgaccagggagcagccacagccctgagccggaaggacaacgctagcaacatctatagcaagaataccgactatacagaactacaccagcaaaatacagacttaatctaccagactgggcccaaatccacctacatttcttccgcagcggacaacatcaggaaccaaaaggcgacaatattggctggcacagcaaacgtgaaggtcggttcacggacaccagtagaagcatcacaccctgtcgaaaacgctagcgtgccccgaccttcttcgcattttgtccggcgcaaaaaatccgaacccgacgacgagttgctctttgactttctcaactcctcgcagaaggaaccaacaggtcgggtcgaaatacggaaagagaagggtaagacaccagtctttcaaagctcccagacatcttccgtgtcctcagttaatccttccgtcacaacaataaagaccattgaagaaaattcattcggctcccagacacacgaggctgcctccaactccgattcgtcccacgaaggtcaagaagagtccagcaaggagaacgtgtcctccaatgccgcatgccccgaccataccccaacccctaatgacgacggaaaatcccacgaactcagcaatcttcggttggagaatcaactgttgagaaacgaggttcagtccttgaaccaggagatggcaagtctactgcagagatccaaagagacccaagaggagctcaacaaggcaagagcaagggtggagaagtggaatgccgaccatagtaaaagtgacagaatgactcgaggccttagggcacaggtggacgatctaacagaagccgtagcagccaaggattcccagctggcggtgctcaaagtgaggttacaggaagcagaccagctattgtccacacgaaccgaagcactggaagctctgcaatcagaaaaatcccgaattatgcaagaccaatccgaaggtaactctctgcagaaccaagcccttcaaactttccaggaacggctgcacgaggcagatgcaactttgaaaagggaacaagagagttataaacagatgcagtccgagtttgcagcacgcctgaacaaggttgagatggagagacaaaacctggccgaggcaatcaccttggctgaaagaaaatattccgacgagaaaaagcgagtggacgaattgcagcagcaagtaaagctttacaagctgaacctggaaagctctaaacaagaactaatagattacaaacaaaaggcaacccgcattcttcagagtaaagaaaaactgattaactctcttaaagagggcagtggtttcgagggtctggactcctctaccgcctcatccatggaactcgaggaattaagacatgagaaggaaatgcagagagaggaaatacagaagctgatgggacaaattcaccagctgaggtctgagttacaggacatggaagcgcaacaagtgaatgaagctgaatcagccagagaacaactccaagacctgcacgatcagatcgccggacaaaaggcctccaagcaagaactcgagaccgaattggaaagactaaagcaggaattccactatatcgaagaggatctataccgaaccaaaaatacgctacagtcaagaatcaaagatcgggacgaagaaatacagaaacttaggaaccagctgacgaataagacccttagcaactcatctcaaagcgagttagaaaaccgtttacaccagctgacagagactctgatccagaagcagactatgctcgagtctttgtctactgagaagaactcactcgttttccagctggagcgtttggaacagcaaatgaacagtgcatccggaagcagcagcaacggatccagtatcaacatgtcagggatcgacaatggggagggcaccagacttcgcaacgttccggtgctattcaacgacactgaaactaacctcgcgggtatgtacggcaaggtgcgaaaggcagcaagcagcatcgatcaatttagcatccgactgggaattttccttcgccgataccccatcgctcgcgtctttgttatcatctacatggccctactccacctgtgggttatgattgttctcttgacttacacgcccgaaatgcatcacgatcagccttacggtaaatag

SEQ ID NO: 248841 - RNA, 1782 nt, synthetic construct
  misc_feature 1..1782: note = Description of Artificial Sequence: Synthetic coding sequence
  source 1..1782: mol_type = other RNA
atgtggactctggtgtcatgggttgcccttacagccggtctggtcgccggaaccagatgccctgacggtcagttctgccccgtcgcttgttgcttggatcctggaggggcttcctacagctgttgtcgcccacttctagataaatggcccaccaccttatctcgtcatctcggggggccctgtcaagttgatgctcactgtagtgcgggtcactcctgcatctttactgtctcgggcacctcatcatgttgtccgtttcctgaggctgtggcttgcggcgacggtcatcactgttgccctagaggctttcattgcagcgctgatggccggagctgtttccaaaggtccggtaataactctgtcggagcaattcaatgcccagattcccagttcgagtgtccagacttttcaacctgctgtgtaatggttgacggcagctggggatgctgcccgatgcctcaagccagctgctgcgaggatagggtgcattgttgtccacatggagccttttgtgaccttgtgcatacgaggtgtattacccctacaggcactcaccctctcgctaaaaaactaccagcccagcggactaacagagccgtggctctgtcaagctcagtcatgtgccccgatgccagaagtaggtgccccgatggaagtacgtgctgcgagctgccatccggaaaatatggatgttgcccaatgcccaacgccacatgttgctctgatcaccttcattgctgccctcaggacacggtgtgcgacctgatccagtccaagtgcttgtcaaaagagaacgccacaacagatttgctaacgaagttacccgcccacaccgtcggagacgttaaatgcgatatggaagtgagttgtccagatggatacacttgttgcagactccagtcgggcgcctggggatgctgccctttcacccaagcagtgtgttgtgaagaccatattcactgttgccctgccggatttacctgcgatacacaaaaaggtacgtgtgagcaaggcccacaccaagtaccctggatggagaaggcccctgcacacctgagcctgccagacccacaagctctcaaaagggacgtcccatgtgataacgtgtcaagctgtcctagttctgacacctgctgccagctgaccagcggtgaatggggttgttgtcctatcccggaagccgtatgctgcagtgaccaccagcactgttgtccacagggctacacttgcgtagctgaaggacagtgtcagagaggaagcgaaatcgtagccggactggagaaaatgccagcaagacgggcaagcttatcccatcctagagatatcggttgcgatcaacacacatcatgccccgtgggacagacctgctgcccttcacttggcggaagttgggcctgctgccagcttccgcacgccgtatgctgcgaagaccgccaacactgctgtccggccggctacacttgtaacgtgaaggcgagatcctgtgaaaaagaagtggtatcagcccagcccgccacttttttggctaggtcaccacatgtgggagtaaaagacgtggagtgcggagagggccatttctgccatgataaccaaacatgctgccgcgataatagacagggatgggcatgctgcccatacagacagggggtgtgttgcgcagacagaagacattgttgccctgccggctttcgatgcgcagccaggggcacaaaatgcctgcgaagagaagctccccggtgggatgcacctttgcgggacccagctctacgccagctcttatag

SEQ ID NO: 248842 - RNA, 1080 nt, synthetic construct
  misc_feature 1..1080: note = Description of Artificial Sequence: Synthetic coding sequence
  source 1..1080: mol_type = other RNA
atgacgctcgaatctatgatggcctgttgcctgtcagacgaagtgaaggagtccaaacgaattaatgccgagattgagaagcagctaaggcgcgacaagagagacgcacgcagagaactcaaacttttattgctgggaacgggggaatcaggcaagtccaccttcatcaaacagatgcgtattatccacggcgccggttacagcgaggaagacaagagaggattcaccaagttagtatatcagaatatcttcactgcaatgcaggcgatgatccgagcaatggaaactctgaagatcttgtataagtacgaacaaaacaaagccaatgcattactcatccgggaagtagatgttgaaaaagttacaaccttcgagcaccagtacgtcagcgccatcaagacactatgggaggaccctgggatacaggagtgttacgacagacgcagggaatatcaactgtctgatagtgccaagtattatcttaccgacgtcgacagaatcgccacattgggatatctgccaactcaacaggacgtgctcagagtacgggtgcccaccaccgggataattgagtatccattcgacctggagaatatcatttttagaatggtggacgtaggtggccagaggtctgaacggcgcaagtggattcactgttttgaaaatgtcacctctatcatgttccttgttgctttgtccgagtacgaccaagttctggtagaatcagacaacgaaaatagaatggaagaatctaaggccttgtttaggaccatcataacctacccttggttccagaattcctccgtgattctcttcctgaataaaaaggatctcttagaggacaagattttatattctcatttagttgactacttccctgaattcgacgggccccagagagatgcacaggccgccagggaatttatcctgaaaatgttcgtcgatttgaatcctgactccgacaagatcatttattcccactttacttgcgctaccgatacagagaacattaggtttgttttcgccgccgtcaaagatacgatacttcaactgaacctcaaggaatataaccttgtatag

SEQ ID NO: 248843 - RNA, 606 nt, synthetic construct
  misc_feature 1..606: note = Description of Artificial Sequence: Synthetic coding sequence
  source 1..606: mol_type = other RNA
atggggaatgtcatggaaggcaaaagcgtcgaagagttgagtagtacagaatgtcatcagtggtacaagaaatttatgaccgagtgtcctagcggacagttgaccctgtacgagtttcgtcaattttttggactgaaaaacttatcaccctcagcctcacagtacgtggaacagatgttcgaaacattcgacttcaacaaagacgggtatattgatttcatggagtacgtggccgccctgtcactggtattgaaaggaaaggtggagcagaaattgaggtggtactttaagctttatgatgtggacgggaacggatgtattgaccgcgatgaacttttaactataatacaagctatccgagccattaacccatgttctgacacaaccatgacagccgaagagttcactgacacagttttttctaaaattgacgtgaacggagacggcgagctgtctctcgaggagttcattgaaggggtacagaaggaccagatgctcctagacactttgaccagatctcttgacctgacccggattgtgcgtagattacagaatggggagcaagacgaagaaggggccgacgaggccgcagaggctgcaggctag

SEQ ID NO: 248844 - RNA, 1482 nt, synthetic construct
  misc_feature 1..1482: note = Description of Artificial Sequence: Synthetic coding sequence
  source 1..1482: mol_type = other RNA
atgagcaagggtcctgcagtcggcatagacctgggaacaacttattcctgtgtgggtgtgttccagcacggaaaagtcgagattatagcaaatgaccaaggaaaccgaactaccccctcatacgtagcgtttactgatactgaacgactcatcggagatgccgcaaagaatcaagtagctatgaaccccactaatactgtgttcgatgcgaaaaggcttatcggcaggaggttcgacgacgccgtggttcagtctgacatgaagcactggccgttcatggtcgtcaatgacgctggacggcccaaagtgcaggtggagtacaagggcgaaactaaaagcttctatcctgaggaggtttccagcatggtattaacaaagatgaaagagatagccgaagcttatctgggtaagacagtcaccaacgccgtggtcacagtccccgcatattttaacgatagtcagcgtcaggccaccaaagatgcagggacaatcgccggactgaatgttctccggattatcaacgaacccacagcagctgccatagcatacggactggataagaaggtgggggcagagcgtaacgtgttgatcttcgacctgggcggcggcacattcgatgtgagcattctaacgattgaggatggcatcttcgaggttaaatctactgccggtgacacacatcttggcggagaagacttcgataaccgaatggtgaatcacttcatcgccgagttcaaacgcaagcacaagaaagatatctcagagaacaagcgggcagtgagaagactgaggacagcgtgtgaaagagccaaaagaaccctgagcagtagcacacaggcttccatagaaatcgacagtttgtacgagggaattgacttctacaccagcattacacgggcccggttcgaagagctgaatgccgacttgttccggggcaccctcgatccagtcgaaaaggcattacgcgacgcaaaattggataagtcgcaaatccacgacattgttttagtcggcgggagcacacgtattccaaagattcaaaagttgcttcaagatttcttcaacggaaaggaattaaataagagcatcaacccagacgaggccgttgcatatggcgcagcagtgcaggccgccattctgagtggagacaagtccgagaacgtccaagacctgctactccttgatgtcaccccccttagtcttggtattgaaacagctgggggtgttatgaccgtgctgattaagagaaacactaccatcccgaccaagcagactcagactttcaccacatacagcgacaatcaaccaggagtactgatccaagtatacgaaggggaacgcgctatgacaaaagataacaatctgcttggtaagtttgaactcacaggaatgcccggaggtatgcctggcggatttcccggcgggggtgcgccaccttctggaggagcctctagcggtccaacgattgaggaagtagactag

SEQ ID NO: 248845 - RNA, 1884 nt, synthetic construct
  misc_feature 1..1884: note = Description of Artificial Sequence: Synthetic coding sequence
  source 1..1884: mol_type = other RNA
atgtcgaagggcccagcagtgggaatagatcttggaacgacgtactcgtgcgtgggcgtatttcagcatggaaaagtggagattattgcaaatgatcaggggaatagaaccactccttcatacgtagctttcaccgatacagagcgcctgatcggagatgcagcaaagaaccaagttgctatgaacccaactaacacagtgtttgatgctaaaagacttatcgggagaaggttcgacgacgcagtggtgcagtctgatatgaaacattggcccttcatggtggtcaacgatgcaggaagacctaaggtgcaagtggaatataagggcgagaccaagtctttttaccctgaggaagtaagtagcatggttttgacaaagatgaaggaaatagcagaggcttacctggggaaagcaaccaaagacgctggaaccatagccggactgaatgtgttgaggatcataaatgagccaacggcagccgccattgcttatgggttggacaaaaaggttggtgccgagcggaatgttcttatctttgatcttggcgggggtacctttgatgtgtcaatcctgaccattgaagatgggatatttgaggttaagtccacagctggagacactcatttggggggcgaagatttcgataacaggatggtgaaccattttatcgccgagttcaaacgcaaacataaaaaggacatctccgagaacaaaagagctgtcagacgcctacgaaccgcatgcgagcgggctaaaaggacactaagttcttctacccaagcatcaatagagatagatagtctgtacgagggaatcgatttttacacaagcatcacccgggctagattcgaagaactgaatgctgaccttttcagaggcactctggacccagtggaaaaagctctcagagacgcaaaactcgataagtcacagatccatgacatcgtgctggttgggggctctacaaggatccctaagattcaaaaactactccaagacttctttaacggaaaagaactcaataaatccatcaaccctgacgaagccgtggcatatggcgcagcggtgcaagccgccatcctgagtggcgataagtcagagaatgtgcaggacctgttgctgctggatgtgacacctctatctctggggatcgaaacagcgggcggagtgatgacagttttaattaaacgcaatacaacgatcccaacaaagcagacccaaacattcaccacttactccgataatcagccaggcgttctcatacaggtgtacgagggagaacgcgccatgacaaaagacaataatctccttggtaaattcgaacttactggaatccctccggcccctcgcggagtgcctcagattgaggtgacctttgacattgatgccaacggaatattaaatgtctccgccgtagacaaaagcactggcaaggaaaacaaaattaccatcacaaatgacaaagggcgcttgtccaaagaagatatagagagaatggttcaagaagcagaaaagtacaaagccgaagacgaaaaacagcgggataaggtcagcagcaaaaacagtctggagagctacgcattcaatatgaaagccaccgtcgaggacgagaagcttcagggtaaaattaatgatgaagacaaacagaaaatcctggacaaatgcaacgagattataaactggctggataagaaccagaccgctgaaaaagaagagtttgagcatcagcaaaaggaactcgagaaagtgtgtaacccaatcattacaaagttgtaccaaagcgcaggagggatgccgggtgggatgcctggaggatttcctggaggtggggcgccccccagcggcggagcatcaagtgggccgactattgaagaagtggattag

SEQ ID NO: 248846 - RNA, 1941 nt, synthetic construct
  misc_feature 1..1941: note = Description of Artificial Sequence: Synthetic coding sequence
  source 1..1941: mol_type = other RNA
atgagtaagggaccagccgtaggcattgacctgggtaccacttattcatgcgttggtgtgttccagcatgggaaggtggaaataattgctaacgaccaaggtaatcggaccaccccatcatacgtagcttttacagatacagagaggttgatcggtgatgcagccaaaaatcaagtcgcaatgaatcctactaataccgttttcgatgctaagaggctcattggtcggcgattcgacgacgctgtcgtgcagagtgatatgaagcactggccgtttatggtggtgaacgacgcgggacgtcctaaggtgcaggtggaatataagggagagactaaaagcttttatcccgaagaggttagttctatggttcttaccaaaatgaaagaaattgcagaggcctatctgggtaaaacagtcacaaatgcagtagtgaccgtaccagcctatttcaatgacagccaaagacaggccacaaaagatgcaggcactattgcagggctgaacgtgcttagaatcattaacgagcccacagcagcagctatcgcttatggattggacaagaaggtgggagctgagcgcaacgtgctgattttcgatctgggtgggggtacattcgacgtgtccatccttaccatagaagatggcatattcgaggtgaagtctacggcaggcgacacacacttgggcggcgaggatttcgacaatagaatggtcaatcattttatagccgagtttaaaagaaagcacaagaaggatatcagcgagaacaaaagagcagtgagaagacttagaaccgcttgcgaacgggcaaagcgaactttatctagcagcacccaggccagcattgaaatagattccctctatgagggcattgatttttatacatcgatcaccagagcaagattcgaagaattgaacgcagatctgtttcgcgggactctggacccggtcgagaaagcacttcgagatgcaaagttggacaagtcacagatccacgatattgtactggtcgggggaagtacccgcataccgaaaatccagaagttgcttcaggatttttttaatggtaaagaactgaataaatctatcaatcccgatgaggctgtcgcctatggagccgcagtccaagctgccatactgtccggcgataagagtgagaatgtacaagatctcctgctactcgacgtcaccccactatcattagggatcgaaaccgcaggaggcgtgatgaccgtgctgataaaacgtaacactacaatccctaccaagcaaacccaaacatttactacttactcagacaatcagccaggcgtcttgattcaggtctatgagggcgaacgcgctatgaccaaggacaataacttactgggcaaatttgagttgacaggcatcccacccgcgccacggggagttccacagatagaggtgacattcgatatcgatgccaatggaattctcaatgtctctgctgtcgacaaatcaaccggcaaggaaaacaagattactatcactaacgataaggggaggctttcaaaggaagatatagaacgcatggttcaagaggcagagaagtataaggccgaggacgaaaaacagagagacaaggtcagcagcaaaaacagtctggaaagttacgcatttaacatgaaggccacagtcgaggacgagaagctgcaggggaaaataaatgatgaagacaaacagaaaattctggacaagtgcaacgaaataattaactggctagacaagaaccagaccgccgagaaggaggaattcgaacatcagcagaaggaactggaaaaggtgtgcaatcccataattactaaactataccaatcggcaggaggaatgccaggtggtatgcccggaggattcccagggggaggtgcccccccttcaggtggcgcgtcaagtggtcccacaatagaggaggtagattag

SEQ ID NO: 248847 - RNA, 1503 nt, synthetic construct
  misc_feature 1..1503: note = Description of Artificial Sequence: Synthetic coding sequence
  source 1..1503: mol_type = other RNA
atgagcaaggggcctgccgtgggaatcgaccttgggacgacctattcttgtgttggagtgtttcaacatggaaaagtggagattatcgctaacgatcagggcaatagaaccacaccctcttacgtagcctttacagatacagaacgcctaattggtgacgccgcgaagaaccaggtcgctatgaatccaaccaacacagtttttgacgccaagcggctgattggcagacgatttgacgatgctgtagtccaaagcgacatgaagcactggcctttcatggtggttaacgacgcaggacggcccaagcataagaaggacatcagtgaaaataaacgcgcagtcagaaggttaagaaccgcttgtgagagagccaaacgtaccctgtctagttccacgcaggcatctattgaaatcgattcactctatgaggggatcgatttctatacatccattacacgggcaagatttgaagagctgaatgctgatttgttcagaggtacgctagaccccgtggagaaggcgctccgagacgctaaacttgacaagtcacaaatccacgacatagttttggttggaggcagtacaagaatccccaagattcaaaaattgctccaggatttttttaatgggaaggaactgaataagtccattaacccagacgaagccgtggcctatggagctgcagtccaggcagccatcctcagcggcgataaatcagagaatgtccaagatctccttctgctcgatgtcacacctctgagcctaggcatcgagacagccggcggcgtgatgaccgttttaatcaagcgaaacactaccattcccaccaagcaaacccaaacctttacaacttatagcgataaccagcctggggtcctcatccaagtctacgagggcgagcgagctatgactaaggacaataatcttctgggtaaattcgagcttactggcatccccccagcacccagaggtgtgccgcagatcgaggtgactttcgatattgatgctaacggaattctgaacgtctcagcagttgacaagagtactggaaaagagaacaagatcacgataacaaacgataaaggacgactaagcaaagaagacattgaacgtatggtccaagaagcagagaagtacaaggccgaggacgaaaagcaacgcgacaaggtgtccagcaaaaactccctagagtcttacgctttcaatatgaaggccaccgtggaggatgagaagctgcaagggaaaattaacgatgaagataagcaaaaaattctggacaagtgcaatgaaataattaactggctggataagaatcagacagccgagaaagaagagtttgaacaccaacaaaaggagttagaaaaggtttgcaatccaattatcaccaagctgtaccagtctgccggagggatgccagggggaatgccaggtgggttcccaggtggaggcgctccccctagcggaggtgcgagttccgggccaaccatcgaggaagtcgactag

SEQ ID NO: 248848 - RNA, 1233 nt, synthetic construct
  misc_feature 1..1233: note = Description of Artificial Sequence: Synthetic coding sequence
  source 1..1233: mol_type = other RNA
atggtcaaccattttatagccgaattcaaacgaaaacacaaaaaagacatcagcgaaaacaaacgggccgtgagacgcttaaggactgcatgtgaacgggctaaacgcacactgagtagtagtacccaggcctcaatcgaaattgattcactgtatgaaggaatcgatttctatacatctattacacgagctaggttcgaagagttgaatgccgatcttttcagaggtactttggatcccgtggagaaagccctgagggacgccaagctcgacaaaagccaaatacacgatatagtgctggtgggcgggagcacacgaatccccaagatccagaaattgctacaggacttctttaacggaaaggaactgaataaaagcattaatccagacgaagccgtcgcttacggtgccgcagtgcaagcagccatcctctcgggagacaaatctgaaaacgtccaggatctgctcctcttagacgttactcctctatctttaggtattgagaccgcaggcggagttatgaccgtcttaatcaaacggaataccacaatccctaccaaacagactcagacttttaccacttactctgacaaccagccaggagtgttaattcaggtctatgagggtgaaagagccatgactaaagataacaatctattaggcaaattcgagctaacaggtatcccaccagccccacgcggcgtccctcagatcgaggtgactttcgatatcgatgcaaacggaattctgaacgtgtccgcggttgataagtcaacaggcaaagagaataagattacgattacaaatgataaggggcgtttgtcaaaggaagacattgaacgaatggtacaggaagcagagaagtataaagctgaagatgagaagcagcgagataaagtgtcctcaaaaaattctttggaatcctacgctttcaacatgaaagccacagtggaagatgagaaactacaaggaaagatcaacgatgaagacaagcagaagattttggataaatgcaatgagatcatcaactggttagacaaaaaccagactgccgagaaagaagagtttgaacatcagcagaaagagctcgagaaggtctgcaaccccatcatcaccaaactgtaccagtctgccggtggaatgccaggtgggatgccaggaggtttccccggaggaggtgccccaccttcaggaggcgcttcatcaggccccactatcgaagaagtagactag

SEQ ID NO: 248849 - RNA, 1941 nt, synthetic construct
  misc_feature 1..1941: note = Description of Artificial Sequence: Synthetic coding sequence
  source 1..1941: mol_type = other RNA
atgtctaagggacctgccgtcggcatcgacctgggaactacctactcatgcgtcggagtgtttcagcatgggaaagtcgagattatagcaaacgaccaaggcaatcgtaccacacccagctatgtggcatttacggatactgaacgcctcatcggcgacgccgcaaagaatcaggttgcgatgaatcctacaaacacagtgtttgacgcaaaaaggctaatcgggaggagattcgacgatgcagttgtgcaaagtgatatgaagcactggccctttatggtggttaacgatgcgggacgccccaaggttcaggttgaatataagggagaaactaagtctttctaccccgaggaagttagctcaatggtcctaactaaaatgaaagaaatcgcagaggcatatctgggcaagacagtaaccaacgccgtagtaaccgtccccgcttattttaacgattcacagagacaagccaccaaggatgctggaaccattgccggactgaacgttctgcgcataattaacgagcccacagcagccgcaattgcatatggattggataagaaggtaggggcagagcgtaacgtgctgatcttcgatctgggcggaggaaccttcgacgtttccatcctgaccatagaagacggcatctttgaggtcaagtccaccgctggggatacccacctgggaggagaagattttgacaatcgaatggtgaaccatttcattgccgaattcaaacgcaaacataagaaggacatatcagaaaacaaaagagctgtgcgtagacttaggaccgcatgcgagagggccaaaagaacgctgtcaagttctacccaagcttcaatagagattgactcgctatatgaaggaatcgacttctacacatctataacacgtgccaggtttgaagaattaaatgcggatttgtttagaggcactctggaccccgttgagaaggctctgcgcgacgcaaaattagataaatcacagatccatgacattgtgctggtaggcggctccacacgtatccccaagattcaaaaactgcttcaggattttttcaacggcaaagaactgaataaatcgattaacccggatgaggcagtggcatacggtgcagcagtgcaagctgcgatcttgtccggagacaagagcgagaatgtgcaagacctcctacttctcgacgtgacccctctttctctaggcatagaaaccgctggaggcgtaatgaccgtcttgattaagcggaacaccactatccccacaaaacagactcagacctttactacctattccgacaatcagcctggagtactgattcaggtgtacgagggtgagcgcgcaatgaccaaagacaacaacttgcttgggaaatttgaattgaccggaatcccgccagctccaagaggggtcccccagatcgaagtgacgtttgacatagatgcaaatggcatattgaatgtgtcggctgtggataaatcaactggaaaggaaaacaagattaccatcactaatgacaaggggagattatctaaagaagacatagagagaatggtgcaagaggcggaaaagtacaaggctgaagacgagaaacaaagggacaaagtctcaagtaagaactctctggaatcttatgcattcaacatgaaagctacagtcgaagacgagaagctgcagggaaaaataaatgatgaggacaagcagaaaatcctcgacaaatgtaatgaaatcattaactggttggataagaatcagacagctgaaaaggaggaatttgaacatcaacagaaagagctggagaaagtgtgtaacccaattatcactaagttataccaatctgcgggtggtatgccaggcgggatgccagggggcttcccaggcggcggcgctcccccctcaggcggcgcatcctctggacccactattgaagaagtcgactag

SEQ ID NO: 248850 - RNA, 483 nt, synthetic construct
  misc_feature 1..483: note = Description of Artificial Sequence: Synthetic coding sequence
  source 1..483: mol_type = other RNA
atggaaatacctgtacccgtccagccgtcttggttacgtagagcaagtgcccctctgcccggcttgagcgcccctggccgactgttcgatcagcggtttggcgagggcctgctcgaggctgagctcgccgcgctctgccctaccacccttgctccatattatttgcgcgccccttctgtggccttacctgtcgcccaagtcccaaccgatcccggacacttttcagtccttctcgatgtcaagcacttctcacccgaggagattgccgtgaaggtcgtgggagaacacgttgaagtccatgcgagacatgaagaaagacctgatgagcatggcttcgtggccagggagtttcaccggagataccgactgccccccggagtagacccagctgcagtgacatccgctctcagtcctgaaggcgttctatctatccaagccgcgcccgcaagcgcccaggccccccctccagccgcggctaagtag

SEQ ID NO: 248851 - RNA, 570 nt, synthetic construct
  misc_feature 1..570: note = Description of Artificial Sequence: Synthetic coding sequence
  source 1..570: mol_type = other RNA
atgttaggtatgatcaagaattcactctttggatcagtggagacctggccttggcaggtgttgagcaaaggagataaggaggaggttgcctatgaggaaagagcgtgtgagggaggtaaatttgcaaccgttgaagtgaccgacaaacctgtggacgaagctctcagagaggccatgcccaaagtggctaagtacgctgggggtactaatgataagggtatcggaatggggatgaccgtgcctatcagcttcgctgtgttcccaaatgaggatgggtctctccagaagaagcttaaggtgtggttccgaattcccaatcaattccagtccgatcccccagcaccatctgataagagcgtaaagatagaggaacgcgaagggattacagtttactcaatgcagtttggtggatacgcaaaagaagccgactatgttgcacaggctacacggctccgtgctgctctggaggggacagctacgtacaggggggacatctatttttgcacaggttacgacccacccatgaagccatacgggcgcagaaacgagatttggctgctcaaaacctag

SEQ ID NO: 248852 - RNA, 477 nt, synthetic construct
  misc_feature 1..477: note = Description of Artificial Sequence: Synthetic coding sequence
  source 1..477: mol_type = other RNA
atgggaaagggcgatccgaaaaaacctcgcggaaagatgtcaagctacgcgttctttgtgcagacctgtagggaagagcataaaaaaaaacaccccgacgccagtgtgaacttcagcgaattcagcaaaaagtgctctgaacgttggaaaactatgagtgctaaagaaaaggggaagtttgaagacatggcaaaggccgacaaagcaagatatgaaagagagatgaagacctacattccacccaagggagagacaaaaaaaaaattcaaggaccccaatgctcctaagagaccgccaagtgcattcttcctattctgctcggaatatcgacccaaaatcaaaggagaacaccctggtttaagcatcggggatgtggcgaagaagctaggtgagatgtggaacaatacagctgcagatgacaaacagccctacgaaaagaaggccgctaaactcaaagagaaatacgaaaagttctag

SEQ ID NO: 248853 - RNA, 648 nt, synthetic construct
  misc_feature 1..648: note = Description of Artificial Sequence: Synthetic coding sequence
  source 1..648: mol_type = other RNA
atgggaaaaggcgaccctaagaaacctcgcggcaaaatgtcctcatacgcctttttcgttcagacctgtagagaagaacacaaaaaaaagcaccccgatgcttccgtgaacttttccgaattcagtaaaaaatgttcagaacgctggaagaccatgagcgccaaggagaagggaaaattcgaagacatggcgaaggctgacaaagcccggtatgaacgcgaaatgaagacgtatattccgcctaagggcgagaccaagaaaaagtttaaagaccccaatgcaccaaaaagacctccaagtgcatttttcctgttttgctccgaatatcgaccgaagattaagggtgaacatcccggtttatccatcggcgatgtggcgaaaaaactgggagaaatgtggaataataccgccgccgatgacaaacagccctatgaaaagaaagcagcaaagctgaaagagaaatatgaaaaagacatcgcagcttatcgtgccaagggaaagccggacgcagctaagaagggggtggttaaagctgagaaaagtaagaaaaaaaaggaggaagaagaagatgaggaagacgaagaggacgaggaggaggaggaggatgaagaagatgaagacgaagaggaggacgacgatgatgaatag

SEQ ID NO: 248854 - RNA, 648 nt, synthetic construct
  misc_feature 1..648: note = Description of Artificial Sequence: Synthetic coding sequence
  source 1..648: mol_type = other RNA
atgggtaagggtgatcccaaaaagccccgcgggaaaatgagtagctacgctttttttgtgcagacttgtagagaggaacataaaaaaaaacaccctgacgcctcagtaaattttagtgagttttctaaaaagtgcagcgaacgatggaagacgatgagcgccaaggaaaagggaaagtttgaggacatggccaaggctgacaaggctaggtacgagcgggaaatgaagacctatattccaccaaaaggcgagactaagaagaaattcaaggatccaaacgcccccaaaagacctccctcagcttttttcctgttctgtagcgagtacagacccaagataaagggagagcatcccggattgagcataggtgacgtggcaaaaaaactgggggagatgtggaacaacactgcggcggacgataagcaaccctatgaaaaaaaggctgccaagctaaaagagaagtatgaaaaggacattgctgcttacagggccaagggcaaaccagacgcggctaaaaaaggagtggtcaaggccgaaaagtcaaaaaagaagaaagaagaagaagaagacgaggaagacgaggaagatgaagaggaagaagaggatgaggaggacgaagatgaggaagaagatgatgacgacgagtag

SEQ ID NO: 248855 - RNA, 294 nt, synthetic construct; identical to SEQ ID NO: 248249
  misc_feature 1..294: note = Description of Artificial Sequence: Synthetic coding sequence
  source 1..294: mol_type = other RNA

SEQ ID NO: 248856 - RNA, 477 nt, synthetic construct
  misc_feature 1..477: note = Description of Artificial Sequence: Synthetic coding sequence
  source 1..477: mol_type = other RNA
atgggtaaaggcgatcctaaaaaaccacgcggaaagatgagtagctatgccttctttgtgcagacatgccgggaggaacataaaaagaagcatccagacgcaagcgtgaatttttcagagttctccaagaaatgctccgagcgctggaagactatgtcagctaaggagaaaggaaagtttgaagatatggcaaaggccgataaggcgagatatgaacgtgagatgaagacatacatcccacctaagggcgaaacaaaaaagaaattcaaggaccccaatgctccaaagagacccccgagcgcattttttcttttctgttccgaatatagaccaaaaatcaagggagaacatccagggttatctatcggggacgtcgcgaagaagctgggggaaatgtggaacaacaccgccgcggacgataaacaaccctatgagaagaaagccgccaagttgaaagaaaagtacgaaaaattttag

SEQ ID NO: 248857 - RNA, 648 nt, synthetic construct
  misc_feature 1..648: note = Description of Artificial Sequence: Synthetic coding sequence
  source 1..648: mol_type = other RNA
atgggaaagggtgatccaaaaaaacctcgggggaagatgtccagctacgcgttttttgtacagacctgcagggaggagcacaagaagaaacatccagacgcctcagtgaatttcagcgagtttagcaaaaaatgtagcgaacgttggaagacgatgtccgccaaggagaagggtaagtttgaagatatggcaaaggctgacaaagcgagatatgagcgggaaatgaagacttacatcccacccaagggcgaaaccaagaaaaaatttaaggatcctaacgctccaaaaagacctccttccgctttttttctgttttgctccgaatatagacccaaaataaaaggtgaacacccaggcctgtctattggggacgtcgctaaaaaattgggcgagatgtggaataacaccgctgccgatgataaacagccttacgagaaaaaagctgcaaaattgaaagagaagtatgaaaaagacatcgctgcgtaccgcgcaaaagggaagcccgacgcggccaagaagggagtggtaaaggctgagaaatccaaaaagaaaaaggaggaggaggaagatgaggaagacgaggaggatgaggaggaggaagaggacgaggaagacgaagatgaggaggaagatgatgatgatgagtag

SEQ ID NO: 248858 - RNA, 648 nt, synthetic construct
  misc_feature 1..648: note = Description of Artificial Sequence: Synthetic coding sequence
  source 1..648: mol_type = other RNA
atgggaaaaggagaccccaagaaaccaagaggcaagatgagctcctatgcatttttcgtacagacttgcagagaagaacataaaaaaaaacaccccgacgcttccgtgaatttctctgaatttagcaagaaatgtagtgaaagatggaaaaccatgtctgccaaagaaaagggaaagttcgaggacatggctaaggcagacaaggcccgatatgagagggaaatgaaaacctatattccaccaaaaggagaaaccaaaaagaagttcaaagacccaaacgccccaaagagacctcccagtgcctttttcttattttgctctgaatacagaccgaagattaagggtgaacatccaggactgagtattggggatgtagccaaaaagttaggtgagatgtggaataacaccgctgcggatgataagcaaccttacgagaaaaaagccgccaagttgaaagagaagtacgagaaggatatcgctgcttatagggctaagggcaaaccggatgcggcaaagaaaggggttgtgaaggccgagaaatccaagaaaaagaaggaagaggaggaggacgaagaagacgaggaggatgaggaagaagaagaggacgaagaagatgaagacgaagaggaggatgacgatgatgaatag

SEQ ID NO: 248859 - RNA, 489 nt, synthetic construct
  misc_feature 1..489: note = Description of Artificial Sequence: Synthetic coding sequence
  source 1..489: mol_type = other RNA
atggggaaaggagatccaaagaagccgcgcggaaagatgagctcgtacgcctttttcgtccagacctgtagagaagaacataaaaaaaagcatcccgacgcttccgtgaatttctctgagttctctaaaaagtgttcggagcggtggaagaccatgtcagctaaggagaagggcaagttcgaggatatggctaaggcggacaaagcaaggtacgagagggaaatgaagacctatattcccccaaaaggagaaaccaagaagaagtttaaagaccctaatgcacctaaacgtccacccagcgcgttttttttattctgctcagagtaccggccgaaaattaagggcgaacatccgggcttgagcatcggcgatgtcgctaagaaattgggagaaatgtggaacaacactgccgctgacgacaaacaaccttatgaaaagattctcctccacatcgaacttaaagagtcccttatgcaacagaaaagatag

SEQ ID NO: 248860 - RNA, 942 nt, synthetic construct
  misc_feature 1..942: note = Description of Artificial Sequence: Synthetic coding sequence
  source 1..942: mol_type = other RNA
atggacttcgatgaacgcggtccatgttccagcaacatgtacctcccaagttgtacttactatgtgtcaggcccggacttttctagtttgccctccttcctgccccagacacccagcagcagacctatgacctatagctactcatcaaacctcccccaagtgcaacccgtacgcgaggtgaccttcagagaatatgccatcgaacctgccactaaatggcaccctcgcggaaatctggcacactgctattcagccgaagaactagttcacagggattgtctgcaagcaccatctgctgccggtgtccctggcgacgtacttgccaaaagtagtgcaaacgtataccatcatcctactcccgctgtgtcatccaacttttattcaacagtcggccgtaacggcgttttacctcaggccttcgaccagttctttgaaactgcctatggcactcccgagaacctagcaagcagcgattatccaggggacaagagtgccgagaaaggcccccccgcggctaccgcgacttccgccgccgccgctgcagcagctactggagccccagcgacctcctcctctgactcaggtggaggcggcgggtgtagagagacagccgccgcagccgaagagaaagagcgtcgaagaaggccagaatcttcatcctcccctgaatccagcagtggccatactgaagacaaagcaggaggctcatctgggcagagaactaggaagaagagatgtccgtataccaaataccagatccgcgagctcgaacgagagtttttcttctctgtctatatcaacaaagagaaacgcctgcaactttcgcgaatgctgaacctgactgatcgccaggtgaagatctggtttcaaaacagacgtatgaaggagaaaaaaattaatagagaccggctgcaatactactccgctaatcccctattatag

SEQ ID NO: 248861 - RNA, 729 nt, synthetic construct
  misc_feature 1..729: note = Description of Artificial Sequence: Synthetic coding sequence
  source 1..729: mol_type = other RNA
atgagctcatactttgtgaatcctctgttctctaaatataaggctggcgaaagtctggaacccgcatattacgactgccgctttccgcaaagcgtcgggcggagccacgccctagtctatggcccaggtggatcagcccccggctttcagcacgcctctcatcacgtacaagatttcttccatcacgggacaagtgggatcagtaacagtgggtaccagcagaatccgtgttcactcagctgtcacggcgacgcatcgaagttttacggatatgaagccctgccacgacaatccctctacggggcacaacaagaggcaagtgtcgttcagtaccctgattgcaagtcatcagcaaacaccaacagttcagaaggccaggggcatctcaatcagaactcttccccctccctgatgtttccctggatgcgcccccatgcccccggacgcagatcgggcaggcagacctattctcgctatcagactctcgaactggagaaggaatttctcttcaacccatacctcacacggaaacgcagaatagaagtctcccacgccctcgggctgacagaacgccaagtgaaaatttggttccagaatcggcgcatgaaatggaaaaaagaaaataataaggacaaactgcccggggcgagagatgaagagaaggtggaggaggaaggaaatgaggaggaagagaaggaggaagaggaaaaggaggagaacaaggattag

SEQ ID NO: 248862 - RNA, 7341 nt, synthetic construct
  misc_feature 1..7341: note = Description of Artificial Sequence: Synthetic coding sequence
  source 1..7341: mol_type = other RNA
atggataccggcgatacagccctgggccagaaagcaactagccggtccggggagacagataaagctagcggacgatggagacaggaacagtctgctgtgattaaaatgagtaccttcggcagtcatgagggccagaggcaaccacaaattgaaccagagcagattggaaataccgcctccgcccaattgttcggatcaggcaagttggctagtcccagtgaagtagtccagcaggtggcagaaaagcagtatccgcctcaccgaccctccccctattcatgccaacattccctgagctttcctcaacatagtctaccccagggcgttatgcactctacgaaacctcaccagtcgctagaggggcccccatggctgttccccggtccactccccagcgtcgcttcagaggatctgttccccttccctattcacggccatagtgggggataccctagaaaaaaaatatcctccctcaatcccgcttattcccagtatagccagaagtcgattgaacaggcagaggaagcgcataagaaagaacacaaacctaaaaaaccaggaaaatacatttgtccatactgttcaagagcctgcgccaagccatcagtgctgaagaaacacatccgtagccacaccggagagcgcccttacccatgtattccctgcggcttttcgttcaagaccaaatccaatctgtacaaacaccgtaaaagccacgcacacgccattaaggcaggccttgtgcctttcacagaatcagccgtgtcaaagctcgatctagaggccggatttatagatgtggaggcagaaatccatagtgatggcgagcaatccactgacaccgatgaggaatccagtctcttcgccgaagcctccgacaagatgtcccctggtccccctatccctctggatatcgcctcacggggaggttaccatgggtctttagaggaaagtttgggggggcccatgaaggtcccgatactcatcatccccaaaagtggaatccccctgcctaacgagagcagccagtacataggtccagatatgctgccaaatccctctctcaacactaaggcagacgattctcataccgtgaaacaaaagttggcattacgcctcagcgaaaagaagggtcaggacagcgaacccagtctcaatctgttaagtccacatagtaaggggagcactgattccggctacttctctagatccgagtccgcggaacagcagatcagtcctcccaacacaaacgcaaagtcctacgaagagattatattcggaaagtactgtcgactctctcctcggaacgccctgagcgtgactacgacctcccaagagcgggccgccatgggccggaaaggaataatggaacccctacctcatgtgaacaccagactcgatgtaaaaatgttcgaagatcctgtcagccagctcatacctagcaaaggcgatgtcgacccctctcagacttccatgctcaaatctactaagttcaattccgaatcaagacaaccacaaataattccctcatcgatcaggaatgaaggcaaattatatcccgctaactttcagggttccaatcctgtcttattggaggctcccgtggacagttccccacttataagatcgaacagtgtaccaacctccagcgctaccaatctgactataccaccgtcactgcgcggctctcactcgttcgatgagagaatgacaggctcagacgacgtattttaccctggcactgttgggattccgcctcaacggatgctccgcagacaagccgccttcgagctgccttctgttcaggagggacacgtagaggtggagcatcatggccgaatgttgaaaggtatcagctccagttcactgaaggagaaaaaactatctccaggcgacagagtaggatacgattacgatgtgtgtaggaagccctataaaaaatgggaggactccgaaacccctaaacagaactatcgggacattagttgtctgagctcacttaagcacggaggagagtactttatggaccccgtcgttccgctgcagggagtcccctcaatgttcggtacaacatgtgaaaacagaaagagaagaaaggagaagtcagtcggtgacgaagaggacacgccaatgatatgttcatcgatcgtatcgacaccagtgggaataatggcatcagattacgatccgaagctacagatgcaagagggagtccgctctggatttgctatggccggacacgaaaatctctcacacgggcatacagaacgctttgacccctgccggccccaattacagcctggatccccctctttggtcagtgaggaatctccaagcgcaatcgattcagataagatgagcgatctgggcgggcgtaaaccccctggtaatgtgattagcgtaattcaacacacaaattctctgtcccgtcctaacagtttcgaaaggtccgaatcagcagagcttgtagcatgtacccaggacaaagcgccctcaccgtcagaaacttgtgactccgaaatcagcgaagcaccagtgagccccgaatgggcccccccaggggatggagccgagagtggtgggaaaccatccccatcgcaacaggtacagcagcaatcgtaccacacccagccacgacttgtaagacaacacaacattcaggtgccggaaattcgggtgaccgaggagcccgataaaccagagaaagaaaaggaagcccaatcaaaggaaccagagaagcccgtcgaggaattccagtggcctcaaaggtccgagactctctcacaacttcccgccgaaaagctccctccaaaaaagaaaagactaaggctcgctgacatggaacactcttccggcgaaagcagttttgaaagcacaggcaccgggctgtctagatctccatcccaagaaagtaaccttagccacagttcctccttttccatgtctttcgaaagagaggagactagcaaactgtccgccctgccaaaacaggacgaatttggcaaacactccgagttcttaacagtgccagcaggatcctactccctgagtgtgccaggtcaccatcatcagaaagaaatgcggcggtgcagcagcgaacagatgccgtgcccgcatccagccgaggttcccgaggtgcgttctaaatcttttgactacggaaatctcagtcacgcacccgtatccggagcagccgcgtccactgttagccccagcagggaacggaagaagtgctttctagtacgccaggcatccttctccggctcccccgagatctcccagggcgaagtgggaatggatcagagcgtgaagcaggagcaactggagcacctgcatgcagggctcagatccggctggcatcacgggccccccgcagtgcttccacccctgcagcaagaggatcccggcaaacaggtagccggtccatgtccacccctgagtagcggtccacttcatctcgcccagccacagatcatgcacatggactcacaggagagcttacggaatccacttatccaaccaacaagctatatgacttctaaacacttaccagaacaaccacatcttttcccacatcaagaaaccatcccctttagccccattcagaacgctctctttcaattccaatatcccaccgtctgcatggtccacctgcctgcccagcagcccccctggtggcaagctcacttccctcatcctttcgcccagcatccacaaaagtcatatggtaagccctcttttcagacagaaattcattcttcctaccccctcgaacacgtggctgaacacaccggcaaaaaacctgccgagtatgcacataccaaggaacagacctatccttgctactcaggcgcatccggactgcaccctaagaacctactgccaaaattccctagtgaccagagcagtaaaagcaccgaaaccccaagcgaacaggtcctacaggaggatttcgcgtcagcgaacgccggctccctgcaaagcttgcctggtactgtagtgcccgtacggatacaaacgcacgtgccaagctacggctcagttatgtacacctcaatctcacagattctgggacagaactcccccgcgatcgtaatttgtaaagtagacgagaatatgacccaacgaaccttagtgaccaatgcagccatgcaaggaataggctttaatatagcacaggtcctgggccagcatgctggtttggagaagtatcctatctggaaggccccccagacgttgccattaggcctcgagtcctccatcccactgtgcctccctagcacatcagactcagtcgccactttgggaggttccaagcgaatgttatcacctgcaagttccctcgagctgtttatggaaacgaagcaacagaagcgtgtcaaggaagagaagatgtacggacagattgtcgaggaactgtcggccgtggaattaactaatagcgatataaagaaggacctgtcccgaccccaaaagccccaattagtaaggcagggctgcgctagtgaacctaaagatggcctgcagtccggttccagttcattctccagtctgagtcctagttctagccaagattacccttccgtgagcccaagctcccgcgaaccctttttacctagcaaggaaatgctgagtggttctagggcacccctacccggtcaaaagtcaagtggaccatctgagtccaaggagagtagtgacgagttagacatagatgagaccgctagtgatatgagtatgagccctcagagctcctccctgccggccggagacggacagttggaggaggaaggcaaagggcacaaacggcctgtaggaatgctggtaagaatggcaagtgcgccgagcggcaatgtggccgatagcacccttctcctaacagatatggccgatttccagcagattcttcagttccctagcttaagaaccactactactgttagctggtgcttcctcaattacacaaaaccaaactacgtccaacaagcaacttttaagtccagtgtttacgcgtcctggtgcatctctagctgtaatccaaaccccagcggcctgaatactaagaccactctggccctccttcggagtaagcagaagataacagccgagatctataccttggccgctatgcacaggcccgggaccggaaagctgacgagctcctcagcatggaagcaattcacacagatgaagccagatgcctcatttttgtttggcagtaagttggaaaggaagctggtgggaaacatactgaaagaaagagggaagggagatatccatggcgataaggacataggctctaagcagaccgagcctatacgcataaaaatttttgaaggcggttacaaatcaaacgaggactatgtttatgtaagaggaagaggaagggggaaatacatatgtgaagagtgcggcattcgatgcaaaaagccttctatgttaaaaaagcatattcgcacccatacagatgtgcgtccttacgtttgcaagctttgcaacttcgcattcaaaacaaagggaaatctgacaaaacacatgaagtccaaagcccacatgaagaagtgcctggagctaggtgtaagtatgactagcgtggacgatacagagaccgaagaagctgaaaaccttgaggacctccacaaagccgccgaaaaacactctatgagttcaatctctaccgatcatcagttttccgacgcagaagagagcgacggagaggatggggacgataacgatgatgacgacgaggacgaggatgattttgatgaccagggagatctaacgccaaagacacgatcacgcagtacaagcccgcagcctcctagatttagttctctgcctgtaaacgtgggggccgtcccacacggcgtaccctcagactcttcactggggcactcaagcctgatctcttatttggtgaccctgcctagcataagagtgactcaactcatgactcccagtgactcatgcgaagacacccagatgacagaatatcagagactgtttcagtcaaaatccacagactccgagcccgataaggacaggctagatatacccagctgcatggacgaagagtgtatgcttccatccgagccttcaagttcacccagagactttagtccctcttcgcatcactcgagcccggggtacgattcatcaccgtgccgagacaattctcctaagcgatatttgatacccaaaggtgatctgagcccaagaagacacctctcccccagaagagatcttagtccaatgaggcaccttagtcctcgaaaagaagccgccctgagacgggagatgtcacaacgagatgtaagtcctcggaggcacctttccccccgacggcctgtgtcccccggcaaagacattactgctcgacgggatctgtctccccggagagagagaagatacatgaccactatccgagcaccaagcccaagacgcgctctgtaccacaaccccccactcagcatgggacaatacctgcaggccgaacctatcgtgttgggacccccaaacttacggcgcgggctaccacaagtcccgtacttctccttatacggcgatcaggagggcgcatatgagcacccagggtctagcttgttcccggaggggcctaatgactacgtgtttagccacttgcctttacactctcagcaacaggtacgtgcacctataccaatggtgcctgtgggcggaattcaaatggtccattccatgccacccgctctctcaagtttacaccctagcccaacacttcccctgcccatggaggggtttgaagaaaaaaaaggggcctctggggagtcctttagcaaagacccatacgtcctgagtaaacagcacgaaaagagaggacctcacgctctacaatcatccgggcctccaagtactccttccagtcctagacttctcatgaagcaatcaacaagcgaggatagcttaaacgcaacagaacgggaacaggaggaaaatattcagacttgtaccaaagccatcgcctctttgcgcatagcaaccgaggaggctgctctattgggacctgatcaaccagccagagtccaggagccccaccagaatcctctcggaagcgcacatgtgtccatccgccactttagccgcccagagcctggccagccttgtaccagtgccacccacccagatctgcacgacggtgaaaaggacaatttcggcacctctcagacacctctcgcacattcaactttttattctaagtcctgtgtggacgataaacagctggacttccactcttctaaggaactgagcagcagcaccgaagaatctaaagatccctcctcagaaaaaagccaattgcactag

SEQ ID NO: 248863 - RNA, 786 nt, synthetic construct
  misc_feature 1..786: note = Description of Artificial Sequence: Synthetic coding sequence
  source 1..786: mol_type = other RNA
atggccgcagcatgccggagtgtaaaaggtctggtggcagtcatcacaggcggtgctagcgggctgggacttgccaccgctgaacgactagttggacaaggggcctcagcggtcttgttagatctgcccaatagcgggggtgaagcccaggcaaaaaaattaggaaataattgtgtgtttgcccctgcggatgtgacttctgagaaggacgtgcaaaccgctctcgccctggccaaggggaaatttggtagagtcgacgttgccgtcaattgcgcagggatcgccgtcgcctcgaagacctacaatctgaagaagggtcaaactcatacactggaggatttccaacgtgtgctggatgttaacctaatgggcacattcaacgtcatccgattagtagcgggcgaaatgggccagaacgaaccagaccaggggggccagcggggcgtgattataaatacagcatctgttgctgctttcgaaggacaggtgggtcaggcggcatacagtgcaagtaaaggaggtattgtgggtatgacgctccctatcgccagggacctcgctcctattgggattcgtgttatgaccatcgctcctggcttgtttggtaccccacttctcacgtcactgccagaaaaagtctgcaacttccttgcgtctcaagtaccctttcctagtcgtttaggcgatcctgccgagtatgctcacctcgtacaggcaataatcgagaatccttttctgaatggggaagtgattagactggacggagcaatcagaatgcagccctag

SEQ ID NO: 248864 - RNA, 792 nt, synthetic construct
  misc_feature 1..792: note = Description of Artificial Sequence: Synthetic coding sequence
  source 1..792: mol_type = other RNA
atgaaaggagggttcaccggaggagatgaataccagaaacactttctgccaagggattatttagctacgtactactctttcgatggcagtccaagcccagaagctgagatgctgaaattcaatctagaatgtttgcacaagaccttcggccctggaggcctgcagggggataccctaatagatatcgggtctggccccacgatctatcaggttctggccgcttgcgatagtttccaagacatcactcttagcgacttcaccgaccggaacagagaagaactggaaaagtggctgaaaaaggaacctggcgcatacgactggacacccgccgtgaagtttgcttgcgaactcgagggaaattcgggccgatgggaggaaaaagaagagaagttgcgtgccgccgtgaagagagttcttaagtgtgacgttcatctgggaaatcctctcgcacccgccgtcctcccactagcagattgcgttcttaccctacttgccatggagtgcgcatgctgctcccttgacgcttatcgggccgctctttgtaatcttgcttccttgttaaagcctggcggacatctggtaacaaccgtgaccctgcgtctcccttcctacatggttggcaaacgggaattctcatgcgtggcattggagaaggaagaggtagaacaggcagtgctcgacgcaggctttgacatagaacagctgctgcactccccccagagttactccgtgacaaatgctgcaaataatggggtatgctttatcgttgcaagaaagaagcccggaccatag

SEQ ID NO: 248865 - RNA, 1386 nt, synthetic construct
  misc_feature 1..1386: note = Description of Artificial Sequence: Synthetic coding sequence
  source 1..1386: mol_type = other RNA
atgtggcaactgactagtctcctactctttgtggcgacttggggcatttctggcacccctgcccccttagattctgttttcagctcctcagagcgggcccaccaggttctcagaatccgaaaacgcgcaaacagttttctcgaggaattgcgacattcatcattggaacgggagtgcatcgaggaaatctgcgattttgaggaagccaaggaaattttccagaacgtcgacgatacattagcattctggtctaaacacgtggacggcgaccagtgcctagtccttcctctcgagcacccctgtgcttccctgtgttgtggccatggaacatgtatcgacgggattggttctttttcatgcgattgtagatctggatgggaagggcgtttttgccagagagaagtttccttcttgaattgttctcttgataacggtggttgcacccactattgtttggaggaggtcggatggagaagatgcagttgcgcccctgggtacaagctgggagacgacctattacagtgtcaccctgcggtcaagtttccctgcggtcggccatggaagaggatggaaaagaaacgcagccatctcaaacgtgacacagaggaccaagaagatcaggttgaccctaggctaattgacggtaaaatgacgcgccggggagattccccatggcaagtggtgctcctggactcgaagaaaaagttggcctgcggagctgtgcttatccacccttcatgggtcctgacagccgcccattgcatggacgagagcaaaaaactactggtgaggcttggagaatacgatttgaggagatgggagaagtgggaattggatctggacatcaaggaggtcttcgtgcatcctaactacagcaagagcactacggataacgatatagcattactgcacctggcccagcctgccactctatctcaaactatcgtgccaatttgtctccctgactcagggttagcagagagggaactgaatcaagctggacaggagacattagtgactggctggggctaccacagttcaagagaaaaggaagcaaagaggaaccggaccttcgtcctaaattttatcaaaattcccgtggtcccccacaacgagtgctccgaagtcatgtcgaacatggttagcgaaaatatgctgtgcgcaggaattctgggagaccggcaggatgcctgtgagggggactcaggcggacctatggtcgcttctttccacgggacctggtttctggtcggtctggtatcttggggggagggatgcggtctgttacacaattatggagtgtacactaaagttagtcggtatttagattggatacatgggcatatcagagacaaagaggcccctcagaaaagctgggccccttag

SEQ ID NO: 248866 - RNA, 2934 nt, synthetic construct
  misc_feature 1..2934: note = Description of Artificial Sequence: Synthetic coding sequence
  source 1..2934: mol_type = other RNA
atgacggctcgagaacactcccctcggcatggcgccagagcccgcgctatgcagcgtgcttccaccatcgatgtagctgctgacatgttaggcctctcattagcaggaaatatccaggatcccgacgaacctattctggaattttctctagcatgctccgaattgcatacaccaagcctcgaccggaagccaaactcctttgtggccgtttcagttactaccccaccccaggccttttggactaaacatgcacagacggaaatcatcgaaggaactaataacccaatctttctatccagtatcgcattctttcaagattctctcattaaccagatgactcaagttaagctcagtgtgtacgacgtgaaagataggtcacaaggtactatgtatctactaggtagtggtacattcatcgtaaaggacctcctgcaggaccggcatcatagactacacctcaccctccggagcgcggaatccgatcgagttgggaacatcacagtcatcggctggcagatggaggaaaaatctgatcagcgcccaccagtgacccgttcagtggatactgtcaatggacgaatggtcttgccagtagatgagtccttgaccgaagcacttggcattcggagcaaatatgcatctcttagaaaggatacattgctcaagtccgtgtttggaggagccatatgccggatgtaccgctttcctactactgacggaaatcatttgagaattctcgagcaaatggcagaaagcgtgctctcgttgcatgtgccccgacagtttgtgaaactcctgcttgaggaggatgccgcacgggtatgcgaattggaggaacttggcgagctatccccctgttgggaaagcctgagaagacaaattgtgactcagtaccagactatcatccttacgtatcaggagaatttgacagatctacatcagtaccggggaccatccttcaaggcctcttcgcttaaggcggataaaaaactagagttcgtgcccactaatttgcacatccagaggatgcgcgtgcaagatgacggaggatcagatcagaattacgacatcgtcacaatcggtgccccagctgctcattgccagggattcaagtcgggcggcctgagaaagaagctgcacaagttcgaagagaccaaaaaacacttcgaagaatgctgtacgtcttccggatgccagagcatcatttacatcccgcaagatgtcgtcagagcgaaggagataattgcccagattaataccttaaagacacaggtgtcatattatgctgaacgcctctcgcgtgctgctaaagaccgctccgctacaggtctcgaacggacccttgcaatcctcgccgacaaaacaagacagctggtgaccgtatgtgactgtaagctgctcgccaactccattcacggcttgaacgctgctagacccgattatatcgcatccaaagcaagcccaacctctaccgaagaggagcaggtgatgctccgtaacgatcaagacaccctcatggcccgctggacaggccgtaacagtcgcagttctctacaagttgactggcacgaagaggaatgggagaaggtttggttaaacgtggacaaatccttggaatgtatcatccagagagtggacaaattactacaaaaggagagattgcacggggaagggtgcgaggatgtgttcccatgtgccggtagttgtacttctaaaaagggcaatcctgatagccatgcatattggatcagacctgaagacccgttctgcgacgtcccatcatctccctgcccctcaacaatgcctagtactgcgtgtcacccccacctgacgactcattgcagccctcctcctgaagaaagctctcctggcgaatggtcagaggcactctatcccctcttaaccacattgaccgactgcgtagccatgatgagtgacaaggcaaaaaaggcaatggtatttctgctgatgcaggatagtgcacccacgatagccacatacctctcgctgcagtatagaagagacgtggtcttttgtcagacactcacagccctcatatgcgggttcatcatcaaattaagaaattgcctccacgatgatggcttcttgaggcaactgtatactattggtctgctggctcagttcgaatccctgctttctacgtacggtgaggagcttgcaatgttggaggatatgtctctcgggatcatggatttacgcaatgttacgttcaaggttacacaggccacctcgtccgcctccgctgatatgctgcccgtgatcactggaaacagagatggatttaacgtccgcgtgcccctacccgggccactgtttgacgcgctaccaagagagatacagtccgggatgctcctgcgtgtccagcccgtactttttaacgtgggcatcaacgaacagcagactttagccgaacgattcggcgacacatccctgcaggaggtgattaacgtcgagtccctggtacgcttaaactcttactttgagcagttcaaagaagtcctaccagaagattgtctccctcggtcaagatcacagacatgtctccctgaactactacggtttctgggtcagaatgtccacgctcgcaagaacaaaaacgtcgatatcctctggcaggcagccgaaatttgccgacggctaaacggtgtgagattcacttcatgcaagtcagctaaggataggacagcaatgtcggtgacccttgagcaatgcctaattctgcaacacgaacacggtatggcgccacaagtgttcacccaggccctcgagtgcatgaggagtgaaggatgcagaagagagaatacgatgaaaaatgtgggtagcagaaagtacgccttcaattcgctgcagctgaaagctttccctaagcactataggccacccgaagggacctatggtaaagtcgaaacttag

SEQ ID NO: 248867 - RNA, 3201 nt, synthetic construct
  misc_feature 1..3201: note = Description of Artificial Sequence: Synthetic coding sequence
  source 1..3201: mol_type = other RNA
atgggacccggaccttctagagctccccgggcccctcgtctcatgctgtgcgcgttggcgctgatggtcgctgccggaggatgcgtggtctccgcttttaacctggatactcgtttccttgttgtcaaagaagcaggaaaccccggatcattgttcgggtactccgttgcacttcaccggcaaacagaacgacagcaaagatatttgctgctggctggggcaccacgtgagctggcggtccccgatggttatacaaataggactggagctgtctacctatgccccttgacagcccacaaagatgactgcgagcgaatgaacattacagtgaaaaacgatcccggacaccacattattgaagatatgtggctgggcgtgacagtggcatcgcaagggccggctgggcgagtgctggtgtgcgcacacagatatacacaagttctctggtcgggatctgaggaccagcggaggatggtgggaaaatgttatgttcgcggcaatgatctcgaacttgacagttccgacgattggcaaacttatcacaacgaaatgtgtaattccaataccgattacttagagacagggatgtgccaactggggacctctggcgggttcacacagaacacggtttattttggtgctccgggagcatataactggaaggggaactcctatatgattcagcgcaaggagtgggacctgtctgaatattcttataaggatccagaggaccaaggaaatctatacatcggatatacaatgcaagtggggagcttcatccttcacccaaagaacatcacgatagtcacaggcgctccaagacacagacacatgggtgcagttttcctcttgtcccaggaggccgggggcgatctccgacgacgacaggtgctggaaggtagtcaagtaggtgcttattttggatccgcaatcgctctagcagatttgaataatgacgggtggcaggacctgttggtgggtgccccatattacttcgaacgcaaagaggaggttggcggcgctatttatgtatttatgaaccaggcagggacaagcttccccgctcatcccagtctacttctgcacgggccctctggttctgcgtttggactcagcgtcgccagtattggtgatattaatcaggacggatttcaggatattgccgtaggcgcacctttcgagggattggggaaggtttacatctatcattcttcttctaagggacttttacgccagccccaacaagtcatccatggtgaaaagctggggctccccggtctggctactttcggatattcactgagtgggcaaatggacgtcgacgaaaatttctatcctgatctgttggttggtagcctgtctgaccatatcgttctgttaagggccagacctgtaattaatatcgtgcataaaactctggtaccaagaccggcagtgttagaccccgccttgtgcacggcgacttcctgcgtgcaggtagaactgtgtttcgcctacaaccagtctgctggaaacccgaattataggaggaacataactctcgcttatacgttggaagcagatcgtgaccgccgtccgccccggctacgattcgctggctccgagtctgctgttttccacggcttcttttcaatgccagaaatgagatgccagaagctcgaactcctgctgatggacaacctgcgggacaagctgcggccaattattatctccatgaactacagtctaccattacgaatgcctgacagacctagactgggcctgcgtagtctcgacgcgtaccccatattgaaccaagcccaggccctggaaaaccacacagaagtacagttccagaaagagtgtggccccgacaacaaatgtgaatcaaacttgcaaatgagagccgcctttgtatcagagcagcagcaaaagctcagtaggctgcagtactccagagatgtaagaaagttacttctatccatcaatgtaacaaatacccgaaccagcgagaggtctggcgaggacgcccatgaggccctgctcaccctggtagttccccccgcgttgcttttaagtagcgtcagacctcctggtgcatgccaagccaatgagaccatcttttgcgagctcggaaatccatttaaaaggaatcagcgaatggaactgttgattgcgttcgaagtgatcggagttaccctgcacactagagatctccaagttcagctgcaactatccacgagttctcaccaggacaacctgtggcctatgatcctcacacttctcgtggattacaccctgcagacttccctaagtatggttaatcaccggctccagtcctttttcggaggaacagttatgggtgaatctggaatgaaaactgtcgaagacgtgggatcacctttaaagtacgaatttcaggtgggaccgatgggcgaagggctcgtgggattgggcactttagttctcggacttgaatggccttatgaagtgtcgaatggaaaatggcttctatatcccaccgaaatcacagtacacggaaatgggtcctggccatgcaggcctcccggagatctgattaaccccctgaatctcacattaagcgatcctggcgacagacctagctcaccacagcggagacggaggcagctcgatccgggcggcggtcagggacctcctccagtcacgctggcagccgcgaaaaaagccaaatccgaaaccgttttgacatgtgctactggaagggctcactgcgtttggcttgaatgcccaatccctgatgcccctgttgtgacaaacgttacagtgaaagctagggtgtggaattccacttttattgaggattatcgagatttcgaccgcgtgcgagttaacggatgggctaccctcttcctccgaacaagcatcccaacgattaatatggagaacaagacaacatggtttagcgttgatattgattctgagctggtggaggaattgccggctgagattgaactgtggttagtacttgtggccgtcggagccgggcttttactattgggacttattattctccttttgtggaaatgcgatttctttaaacgaactcggtattaccagattatgcctaaatatcacgccgtcagaatacgcgaagaggaaagatacccgccacctggttccaccttacccaccaagaagcactgggtgacgtcctggcagactagagatcagtattattag

SEQ ID NO: 248868 - RNA, 1644 nt, synthetic construct
  misc_feature 1..1644: note = Description of Artificial Sequence: Synthetic coding sequence
  source 1..1644: mol_type = other RNA
atggctacaatggtgccatcggtgttgtggccgcgcgcctgttggacattgttggtgtgctgtttacttacccctggtgtacagggccaagagttcctactgagagttgagcctcaaaatcccgtcttgtctgccggtgggtcactgtttgttaactgctcaactgactgtccctcaagcgaaaaaattgctctagaaacaagcttatctaaagaattagtagcctctggcatgggatgggctgccttcaatctgtccaatgtaaccggtaatagccggatcctttgcagtgtttattgcaatggcagccaaatcactggatcatcaaacatcaccgtataccgcctgcccgaacgcgttgaactggcgcctctccctccttggcagcctgtgggacaaaactttactctgcgctgtcaagtggaggatggatctccccgtacgtcgttaaccgttgtgctgctgcgatgggaggaggaactcagccggcaacccgccgtggaagagcccgccgaggtaaccgccaccgtattagcctcaagggatgatcacggagcgcctttctcatgtaggaccgagctggacatgcaaccacaagggctaggcctgtttgttaatacctccgccccccgacaacttcgaacatttgtgttaccagtgacaccacccaggttggtggccccacggttcttagaagtggaaacctcatggcccgttgattgcacacttgatggtctgttccccgcgagcgaggctcaggtgtatcttgctcttggcgaccagatgcttaacgcaactgtcatgaaccacggagatacccttacagccacggctactgcaacagcccgcgctgaccaggaaggcgctcgcgaaattgtatgtaatgtaacactcggaggtgagaggagagaggcccgcgaaaacctaactgtcttttcatttctgggaccaatcgtaaacttatctgaaccaaccgcacacgagggctccacagtgacagtatcttgtatggccggggctagagtacaagtgaccttggatggcgtgcctgccgccgcgcctgggcagccagcacaattgcagctgaacgctaccgaatctgatgatggccggtccttcttctgctccgccacccttgaagttgacggggagtttttacatcgcaactcttctgtccaattgagagtcctgtatggtcccaaaattgatagagccacttgcccccaacacctgaaatggaaagacaaaacccgacacgtgcttcagtgtcaggccaggggtaatccctatcctgagcttcgatgcctcaaggaaggtagctccagagaggtacctgtaggaatcccgttttttgttaacgtgacccacaatggaacatatcaatgtcaagcgtcatcttctcgcggcaagtacaccctcgtcgtagtgatggatattgaagcgggcagcagccatttcgtccctgtctttgtcgcagtgctgttaacactcggggttgtgacgattgtactcgcactcatgtacgttttccgtgaacaccaacgatccggtagctaccacgttagggaagaaagtacctatttacccctcaccagtatgcaaccaacagaggctatgggggaagagccatcgagagcagaatag

SEQ ID NO: 248869 - RNA, 1356 nt, synthetic construct
  misc_feature 1..1356: note = Description of Artificial Sequence: Synthetic coding sequence
  source 1..1356: mol_type = other RNA
atgccaaaaaataagaagcgtaatacccctcatcgaggcagctctgcaggaggaggaggatccggagcagcagccgctaccgccgcgaccgccggaggtcaacatagaaatgttcaacccttctctgatgaagacgcctctattgagactatgtctcattgtagtggctacagcgacccatccagctttgccgaggacggtcccgaagtgctggacgaagagggcacacaggaagacctggaatacaagcttaagggactcatcgatcttacccttgacaaatccgctaagacccgacaagctgccctggaaggaataaagaatgccctcgcgagcaagatgttgtacgaattcatcctggagaggagaatgaccctgacggattccatcgaacgatgcctgaaaaagggaaagagtgatgagcaaagagctgccgctgccctcgccagtgtcctgtgcatccagttgggacctggaatagaatccgaggaaatacttaaaaccctgggacctatcttaaagaaaattatctgtgacggttctgctagcatgcaggcacgacaaacatgcgctacgtgttttggagtatgctgtttcattgcaaccgatgatatcactgagctttattctactctggaatgcctggaaaacattttcaccaagtcctatctgaaagagaaagacacaaccgtgatttgtagcacccccaacacagtgctccatatctcttccctactggcctggacactgctcttaacgatttgtcctatcaatgaagtaaaaaaaaagctagagatgcatttccacaagctacctagtctgctgtcctgcgatgacgtgaacatgagaatcgccgccggtgagagcctcgcactgctgtttgagctggcaagaggtatcgaatctgactttttctatgaggacatggaatctctgacacagatgttgcgagccttggcaaccgacggaaacaagcaccgagctaaagtggataaacggaagcagaggagcgtgtttcgagacgtgcttcgcgcagtggaagaaagggatttccccacagaaacaattaaattcggaccagaaaggatgtacattgattgctgggtcaaaaaacacacatacgatacattcaaagaagtgctgggctccggaatgcagtatcaccttcagtctaacgagtttcttagaaatgttttcgagcttggcccccccgtgatgctagatgccgcgactctgaagacgatgaagatcagcagatttgaaagacacttgtacaactcagcagctttcaaagcaagaactaaagcacgttccaagtgccgggacaaaagagcagatgtaggcgaattcttctag

SEQ ID NO: 248870 - RNA, 1713 nt, synthetic construct
  misc_feature 1..1713: note = Description of Artificial Sequence: Synthetic coding sequence
  source 1..1713: mol_type = other RNA
atgacgcttctgtggtgtgtggtcagcctgtacttctatggtatcctgcagtctgatgcatcagaacgctgtgacgactggggactggataccatgcgccagatacaggtatttgaagatgaacccgctaggatcaaatgcccattattcgaacactttcttaaatttaattatagcactgctcactcagccggactcactctcatttggtactggacccgacaggatcgcgacctcgaagaaccaataaattttagattgcctgagaacagaatatctaaagagaaggatgtattatggtttcgccctactctcttaaatgataccggaaattacacttgtatgctgagaaacaccacctactgcagcaaagttgccttcccgcttgaggtggtccagaaggatagttgtttcaatagcccgatgaaacttcccgtacacaaattgtacatagagtacggaatacaacgcattacttgcccaaatgtggatggctacttcccttcctctgtcaagcccactatcacatggtacatgggatgttataaaatccagaacttcaataacgtgatccctgagggtatgaatctgagcttcttgatcgcacttatcagcaacaacggcaattatacatgtgtcgtcacctatcccgaaaacggccgaaccttccatctgaccagaacattaaccgtgaaagtcgtgggcagccctaagaacgccgtgcctcctgtaattcatagccctaacgaccacgtagtatacgagaaagaaccaggcgaggaattgctcattccctgtacagtgtacttctccttcctgatggattccaggaacgaagtttggtggactattgacggcaaaaagcctgatgacatcaccattgacgtcacaatcaacgagagcattagccactcccgtacagaggacgaaaccagaacgcaaatactgagcattaaaaaggtcactagtgaagatcttaaaagaagctatgtatgtcacgccaggtccgctaaaggcgaagtggcaaaggcggccaaagtcaaacagaaagtccctgcgcctcgctacaccgttgagttagcatgtgggttcggtgccaccgttctgctggtagtgattctaatcgtcgtgtaccacgtgtactggctagagatggtccttttctacagagcgcacttcgggactgatgagaccatacttgacgggaaagagtacgacatctacgtcagctatgctcgaaatgccgaagaggaagagtttgttttgctgactctccgaggagtgctggaaaacgagtttgggtacaaattatgcattttcgatagagactccttacctggcggaattgtgaccgacgaaactttgtcctttatccagaagtctagacggctgctggttgtgcttagccctaactatgtactgcagggaacccaggccttattagaactgaaagccggtttggagaacatggcaagcagagggaatattaatgtcatattggtccagtataaggcagtcaaggaaacgaaggttaaagagttaaagcgagcaaagacggtgcttacggtgatcaagtggaagggtgagaagtcgaaatatccccaaggtaggttctggaaacagctacaggttgccatgcccgtgaaaaaaagtccacgaaggtcttcctcagatgagcagggtctatcctactccagcctcaagaatgtgtag

SEQ ID NO: 248871 - RNA, 987 nt, synthetic construct
  misc_feature 1..987: note = Description of Artificial Sequence: Synthetic coding sequence
  source 1..987: mol_type = other RNA
atgggcttctggatcctcgccatcctgactatcctcatgtactcaacagccgcaaaatttagtaagcaaagctggggattggagaatgaggcattgattgtacgctgcccacgacaaggaaaaccctcttacacggtggactggtactattcacagacaaataaatctatccctactcaagagcgcaacagggtgtttgccagtggccagttattgaagtttctgcccgcggccgtggccgattctggtatctacacatgcatcgtgagatccccaacattcaaccgcaccggatacgctaatgtgacaatctataagaaacaaagtgattgcaacgttcccgattatctgatgtatagcactgtctcaggttccgagaaaaactccaaaatatactgtccgaccattgatctctacaactggaccgccccactggaatggttcaaaaactgtcaggctctgcaaggctcacgttatcgagctcataagtcctttctggtaatcgacaacgttatgacagaagacgccggtgattacacgtgcaagtttatccacaatgagaatggtgctaactactccgtaaccgctacaagatccttcacagtaaaagacgaacagggattctcactgtttcctgtcattggcgcacccgcgcaaaatgagatcaaagaagtagaaatcggaaagaacgcaaatctcacctgtagcgcatgcttcggtaaaggcacccagttccttgcagccgttctgtggcagttaaacggcactaagataacagacttcggagaacctagaatacaacaggaagaggggcaaaaccaaagctttagcaacgggctcgcgtgtctcgacatggtgctgcgcattgcagacgtgaaagaggaagatttactgctacagtatgactgcctcgctctaaacttgcacggattgagaaggcacactgtgcgcttatcaaggaagaatcccagcaaagaatgcttttag

SEQ ID NO: 248872 - RNA, 780 nt, synthetic construct
  misc_feature 1..780: note = Description of Artificial Sequence: Synthetic coding sequence
  source 1..780: mol_type = other RNA
atgggcttttggattttggccatactcacaattcttatgtatagcacggccgccaagttctctaagcaaagctggggattggaaaacgaagctctcattgtccgatgcccacgtcagggcaagccctcttacacagtggactggtattattctcagacaaataagtccatccctacgcaagagcgaaatagagtctttgcctccggtcaacttctaaaattcctgccagctgccgtcgccgatagcggaatatacacatgtattgtcaggagccctacatttaaccgtactgggtatgccaacgtcacaatttacaaaaaacagtccgattgcaatgtcccagattaccttatgtactctactgtttcggggagtgaaaaaaactctaaaatttactgtccaaccatagatctgtacaattggacggcgcctctagaatggttcaaaaactgccaagcattacagggatcccgttacagagctcacaagtcctttttggtaattgataatgttatgactgaggacgcaggcgattacacatgcaagttcatacacaacgagaatggagcgaactactccgtgaccgctacccgaagtttcactgtcaaggtatggtgccagagcttttgcaaactaaaaaaatcccttattttttccaatacacactggatccagtcccttatgagaggattcgttatggtgtactacggtgtgcacaaatgttgtagagtagtgtttaacttatgtctccagtatttccagcatcatcaatggccttag

SEQ ID NO: 248873 - RNA, 636 nt, synthetic construct
  misc_feature 1..636: note = Description of Artificial Sequence: Synthetic coding sequence
  source 1..636: mol_type = other RNA
atgtactctactgtgagcggatctgaaaaaaattccaaaatctattgcccgactattgatctgtataattggaccgctccactggaatggtttaaaaactgtcaggcactgcaaggctcacgctatagggctcacaaaagctttctggtaatagataatgtaatgacagaggatgcgggggattatacatgcaagttcatacacaacgaaaacggtgcaaattactccgtcaccgccacacgaagtttcaccgtaaaggacgagcaaggctttagcttattccctgtgattggagcacctgcacaaaatgaaattaaggaagtagaaattggtaaaaatgcaaatctgacctgctccgcttgcttcggcaaaggaacccagtttctggcggcagtgctctggcaactcaacggaacaaaaataaccgactttggcgaaccccgcattcaacaagaggaagggcagaaccagtctttctctaatgggttagcctgtctggatatggtgcttagaattgcagacgtgaaagaagaagatctgctcctccagtatgattgcttagcgctcaatcttcacggactcagaagacacaccgtgagactgtcaagaaaaaaccctagcaaagaatgtttttag

SEQ ID NO: 248874 - RNA, 945 nt, synthetic construct
  misc_feature 1..945: note = Description of Artificial Sequence: Synthetic coding sequence
  source 1..945: mol_type = other RNA
atggggttttggatccttgccatcttgacaattcttatgtatagcaccgctgctaaattcagcaaacagtcatggggtttagagaatgaagcactaattgttagatgccctcggcagggcaaaccttcgtatactgtggattggtattactcccagaccaataaatccatccctactcaagagagaaacagagtgttcgcctctggtcagctccttaaattcctcccagctgcagtggccgattctgggatatatacatgtattgttcgttcaccaactttcaatcgaacaggatacgctaatgtgaccatctataaaaaacagtctgactgcaacgtcccagattatctgatgtattctactgtttcaggaagcgaaaaaaattctaagatttactgcccaacgattgatctttataactggacggcaccgctggagtggttcaagaattgccaggccctgcaaggtagccgatacagagcccacaaatcctttcttgtgatcgacaatgtgatgaccgaagacgctggggactatacgtgcaaattcattcataatgaaaacggggcgaattacagcgttactgctacccgatcttttacagttaaggacgaacagggattcagcctctttcctgtgatcggcgcacctgcccagaacgaaatcaaggaagttgaaattggcacgcagtttctagccgctgttctttggcaattgaacggcacaaagataacagacttcggtgaacctcggatacaacaggaagaaggacaaaaccaatctttctctaatggcctggcttgtttagacatggtgctgcgcatcgccgacgttaaagaagaggatctactccttcaatatgattgcctggcactcaatcttcacgggcttcggcggcataccgtcagactgtcacgtaaaaatccaagcaaagagtgtttttag

SEQ ID NO: 248875 - RNA, 117 nt, synthetic construct; identical to SEQ ID NO: 248269
  misc_feature 1..117: note = Description of Artificial Sequence: Synthetic coding sequence
  source 1..117: mol_type = other RNA

SEQ ID NO: 248876 - RNA, 300 nt, synthetic construct; identical to SEQ ID NO: 248270
  misc_feature 1..300: note = Description of Artificial Sequence: Synthetic coding sequence
  source 1..300: mol_type = other RNA

SEQ ID NO: 248877 - RNA, 1671 nt, synthetic construct
  misc_feature 1..1671: note = Description of Artificial Sequence: Synthetic coding sequence
  source 1..1671: mol_type = other RNA
atgggcttttggatcctcgccatcctgaccatcctcatgtactcaactgccgcaaagttctcaaaacagtcctggggactggaaaacgaagcccttatcgtcaggtgcccacgacagggtaagccgtcatatacagtggattggtactattcccagacaaacaaaagtattcccacccaagagagaaacagggtgtttgcctccggtcaactcttgaaattcctacctgctgccgtagctgattccggcatctacacgtgcatcgtacgcagcccgacctttaatcgaaccggctatgccaacgtgacaatttacaaaaaacagagtgactgcaatgtacccgactatctgatgtattcaactgtctctgggtctgaaaaaaactcaaagatctattgcccgacgatcgatttgtataactggacggcaccgctggaatggttcaagaactgtcaagccctgcaagggagccggtatagggctcacaaatcctttcttgtaatcgataatgtaatgaccgaggatgctggcgattatacttgtaaatttattcataatgagaacggtgcgaattactcagtgacagcaaccagatcctttacggttaaggatgagcagggcttttctttatttccagtgataggcgcccccgcacagaatgagatcaaggaagtggaaataggcaagaacgcgaacttgacctgcagcgcatgttttggtaaaggaactcagtttctggcggcagtgctttggcagttgaatggtacgaagattacagacttcggcgagcctaggatccaacaggaggaaggacagaaccagtcattctcaaatggtctcgcttgtctggacatggttttgcgaattgccgacgttaaagaggaagatttactattgcaatacgattgccttgcattaaacctccacggcttaagaagacacaccgtgcggctgagccgcaagaatcctatcgaccatcactctatttattgtatcatcgccgtctgctctgtgttcttaatgctgatcaacgttctagtaatcatactgaagatgttttggattgaggctaccttgttgtggagggacattgccaaaccttacaaaacaagaaatgatggaaagctctacgatgcatatgtggtctacccccgcaattacaaatcaagcaccgacggcgcctcaagggttgagcactttgtgcaccagatattgcctgacgtgctcgagaacaaatgcggttatactttgtgcatctatggcagagatatgctcccaggggaagatgtcgtcaccgcggtggagaccaacattcgaaaatcccggagacacatattcatacttactccacaaataacacacaataaggaattcgcttacgagcaggaggtggcattgcactgtgctctgatccaaaatgacgctaaagtgattctcatcgagatggaagctctgtctgaattagatatgctccaggctgaagccttacaggactctctgcaacatctgatgaaagttcagggcacaattaaatggcgagaggatcacatagctaacaagcgaagccttaactcaaagttctggaaacatgtcagataccagatgcctgtcccctccaagattccgcgcaaggcctcaagtctaaccccactcgctgctcaaaaacagtag

SEQ ID NO: 248878 - RNA, 741 nt, synthetic construct
  misc_feature 1..741: note = Description of Artificial Sequence: Synthetic coding sequence
  source 1..741: mol_type = other RNA
atgctgtggcggcagttaatctattggcagttactggcactgttctttctgcctttctgtctgtgccaggacgaatacatggagtccccccaaaccggagggctaccccctgattgttcgaagtgctgccacggtgactactcattcagaggctaccagggacctcctggcccaccaggacctccaggtatccctgggaatcatggaaacaatggtaacaatggcgctactggtcacgagggtgcaaagggtgaaaaaggcgataaaggtgatctcggaccccgcggagagagagggcaacatggccccaaaggcgagaagggatatccaggaatccctccggaactgcagattgctttcatggcctcactggccacacacttttctaaccaaaacagtggcattattttctccagtgtggaaacaaacatcggcaatttttttgatgtcatgacagggcggttcggcgctcccgtgtccggcgtgtattttttcaccttttctatgatgaagcacgaggatgttgaggaggtatacgtgtatttgatgcataatggtaacacagtattcagtatgtactcttacgaaatgaagggaaagtccgatacctcatcaaatcatgctgtcctaaaactggccaaaggcgacgaggtttggctcaggatgggaaacggtgccctgcacggcgatcaccagcgtttctcaacattcgcaggcttccttttgttcgaaacaaaatag

SEQ ID NO: 248879 - RNA, 666 nt, synthetic construct
  misc_feature 1..666: note = Description of Artificial Sequence: Synthetic coding sequence
  source 1..666: mol_type = other RNA
atggcagccgctagaccatccttaggtcgagtgctccctggctcatccgtcctttttttgtgtgacatgcaggagaaattccgccataatatagcctactttccacagattgtgtccgtggcagctcgcatgctcaaggtcgctcgactgctagaagtccccgtgatgctgactgagcagtatccccaaggtcttgggcccacggtgccagagctgggaaccgaaggcttacgccctctggctaaaacgtgcttctccatggtgccggcacttcagcaagaactggacagcagacctcagttgaggtcggtcctgctctgtggaattgaagcccaagcctgcattttagacccccgttcttaccctgggctcgccctcactagtttatatccccagaataccaccctcgatttactggatcgcggcttgcaggtgcatgtcgtagtggatgcgtgtagctctcggagccaggtggaccggctcgttgccttagcgcggatgagacagagcggagcttttctcagtacatcagaaggtctgatactacaacttgtcggtgatgctgtgcatccgcagtttaaagaaatccagaagcttatcaaagaacccgcgcctgattctggactcttaggattgttccaaggtcaaaactccctcctccactag

SEQ ID NO: 248880 - RNA, 834 nt, synthetic construct
  misc_feature 1..834: note = Description of Artificial Sequence: Synthetic coding sequence
  source 1..834: mol_type = other RNA
atgtggcccttggcactggttattgcttcactgacgctggccctcagtggaggcgtgtcccaggaatcaagcaaagtcctgaatactaatggcacgagtggctttcttccaggcggctatacgtgttttccccattcccagccttggcaagccgccctgttggttcaaggccggctgctgtgcggtggcgttctggttcatcctaagtgggttttgactgctgcccattgtcttaaagagggattaaaggtatacttgggaaaacatgctttgggcagagttgaggctggcgagcaggtcagagaagttgtgcactccatcccacaccccgaataccgtaggagtccaacgcacctgaatcatgatcatgatatcatgctgctcgagcttcaatcaccagtacagttgaccggctacattcagactctccccctctcccacaataaccgcctgactcccggaaccacttgccgggtttccggttggggtacgacaacatcgccacaggtcaattatccaaaaaccctgcagtgcgccaatattcagctccgttccgacgaagaatgcagacaggtctaccccggtaaaatcacggataacatgttatgcgctggaactaaggaggggggcaaggactcttgcgagggagactctgggggcccactggtgtgtaatcggactctttacggtattgtttcttggggcgatttcccttgtggccaacctgaccggccaggtgtctatacaagagtttcccgatatgtgctttggattagagagactatcagaaaatacgagactcagcagcagaaatggctgaagggcccacagtag

SEQ ID NO: 248881 - RNA, 804 nt, synthetic construct
  misc_feature 1..804: note = Description of Artificial Sequence: Synthetic coding sequence
  source 1..804: mol_type = other RNA
atgagcctgcgtgtgctcggcagtggaacctggccatcggcacctaagatgtttctgctgttgactgccctgcaagtactggctattgctatgacacagtcccaggaggacgagaacaagattatagggggacacacttgtacacgctcatcccagccgtggcaagccgccctccttgctggccccagaagacggtttctgtgtggaggggctttattatcgggtcaatgggttatcaccgctgcccactgtggccgacctatcctacaggttgccctcggcaagcacaacctgagaagatgggaagcaacacaacaggttctgcgcgtggtccgacaagtgacccacccaaattacaattcccgcacccatgacaacgacctcatgctcttacagttgcaacagcctgcccgcatcggccgagcagtccgccccattgaggtcacccaggcttgtgcttcccccggaacatcctgtcgggtcagcggatggggtacaatctcttcaccaattgcccggtacccagcctccctacaatgcgttaacataaacatcagcccagatgaagtttgccaaaaagcctatccacgcaccataaccccgggaatggtctgcgccggcgtgccacagggaggaaaggatagctgccagggtgactctggaggacctctggtctgtagaggccagctgcagggtttggtaagttgggggatggaaagatgcgccctaccggggtatccgggagtgtatactaatctatgtaagtacaggtcctggatcgaggagacaatgcgagacaaatag

SEQ ID NO: 248882 - RNA, 804 nt, synthetic construct
  misc_feature 1..804: note = Description of Artificial Sequence: Synthetic coding sequence
  source 1..804: mol_type = other RNA
atgtccctgcgtgtgttaggttccggtacatggccgtcagctcccaagatgttcctcttacttacagccctgcaggttctcgccattgccatgacacagtcccaggaagatgagaacaagattatcggagggcacacctgcacccgctcctcacaaccatggcaggctgccttactggccggacctcgccgaaggtttctgtgcgggggtgctcttctatccggtcaatgggttatcacagcagcacattgcggccggccaattcttcaagtcgcactggggaaacacaatctgcgcaggtgggaagctacccaacaagtgctcagagtggtgcgtcaggttacacacccaaattataattcaaggacacacgacaacgatctaatgttgctgcaactacagcagcccgcgaggataggaagagcggtgcggcccatagaagtgactcaggcatgcgcatcacccggaacctcgtgcagggtgagcgggtggggaaccatctctagtccgatagcccgatatccagcgagtttacagtgcgtcaacatcaatatttcacctgatgaagtttgccagaaagcatacccccgaaccattacccccgggatggtctgtgccggagtacctcaaggcggcaaagactcgtgccagggggattctggaggcccccttgtgtgtagaggccaactgcagggattagtgagctggggcatggaaagatgcgcactgcccggctacccaggagtgtacaccaacttgtgtaaataccgcagctggatcgaagaaaccatgcgcgacaagtag

SEQ ID NO: 248883 - RNA, 804 nt, synthetic construct
  misc_feature 1..804: note = Description of Artificial Sequence: Synthetic coding sequence
  source 1..804: mol_type = other RNA
atgtcgctgagagttctaggatccggtacgtggccatccgcccctaagatgttcctcctgttgactgccttacaggtactcgccatcgccatgacacagagccaggaagatgagaataagattattggtgggcatacctgcactagaagtagccagccctggcaagccgccctgctcgccggcccaagacgacgcttcttgtgtggaggggccctgctttccgggcagtgggtcattaccgccgctcattgcggccgcccgatactacaggtggctctgggtaagcacaatctgcgcaggtgggaggctacacagcaagttttgcgggttgtgaggcaagtcactcatccaaactacaacagtcggactcacgataatgaccttatgttgctgcagctgcaacagccagcccgcatcggtcgggcggtaagacccattgaagtaacacaagcttgtgcaagccccggtaccagttgccgcgtctctggttgggggaccatctcatcacctatcgccaggtatcctgccagtctccagtgtgtaaatataaatatctcaccagacgaagtctgtcagaaggcttatcctagaacgattactccgggaatggtttgcgccggcgtgccacaaggggggaaagatagttgtcagggcgattccggcggtccacttgtgtgtagaggccagttacaaggactagtatcctggggtatggaaagatgcgctctgcctggttaccctggtgtatatactaacctctgcaaataccggagttggatagaggagacaatgcgggacaaatag

SEQ ID NO: 248884 - RNA, 1068 nt, synthetic construct
  misc_feature 1..1068: note = Description of Artificial Sequence: Synthetic coding sequence
  source 1..1068: mol_type = other RNA
atgagtctgcgactgcaatcttctagcgcgtcttacggtggcggcttcggcgggggtagctgtcagctaggtggaggtagaggtgtgagcacttgctctaccaggtttgtgagcggcggatcagcaggcgggtatggaggtggggtgtcatgcggatttggcggtggagcaggctcagggtttgggggaggactggggggaggtttcggaggaggctttgccggaggctttgtggactttggagcgtgtgacggtggcttgctgacagggaatgaaaaaatcacaatgcaaaatttaaatgatcgcctggcatcatacctggagaaagtccgggcccttgaggaagccaacgccgatttggaagtcaagatacgtgactggcacttgaaacagtcccccgcctccccagagcgagactattcaccttactataaaacgattgaggagttgagagataaaatactgacagccaccatagagaataatcgcgtgatcctggagatcgataacgctaggctggctgctgacgactttagactgaaatacgaaaatgagcttgcactgagacaaagcgttgaggccgacataaacggactgcgtagagtcctggatgagttgaccctgagcaaaaccgatcttgaaatgcagattgaatctttgaatgaggagctcgcgtatatgaaaaagaatcatgaagaagagatgaaggaatttagcaatcaggtggtgggacaagtgaacgttgaaatggatgccaccccgggaatcgacttgactcgcgtgctcgcagagatgcgagagcagtatgaagcaatggcagaacgcaataggagggacgcggaggaatggttccataccaagagcgccgaactgaacaaggaggttagcaccaataccgcaatgatacaaacgagtaagaccgagatcaccgaactaagacgaacacttcaagggcttgaaatcgaactgcagtctcagctgtctatgaaagcaggattagaaaacaccgcggctgacccaggcacccaccagcagcaccggggcccggctgaaagagctcctcagtag

SEQ ID NO: 248885 - RNA, 1275 nt, synthetic construct
  misc_feature 1..1275: note = Description of Artificial Sequence: Synthetic coding sequence
  source 1..1275: mol_type = other RNA
atggattttagccgcaggagcttccataggagcctgtcatccagcctacaggcacccgtggtaagtacagtgggaatgcagcgtctaggtacaaccccatcagtgtatggcggagcaggtggaagggggatccgcatctcaaattcacggcatacagtcaattacggcagtgacctgacgggcggaggggatctatttgtcggaaatgagaaaatggctatgcaaaacttgaacgaccggctggcatcttaccttgaaaaagtccgaactctggagcagtccaattccaagctggaggtgcagattaaacagtggtacgaaacaaacgctccacgtgccggaagagactactccgcttactatcgccagattgaagagctgaggtcgcagattaaagacgcccagttgcaaaatgctcgctgtgtgctccaaatagacaatgccaagctcgctgccgaggacttcaggcttaaatatgagactgagcgcgggatcaggttaactgtcgaggccgatctgcagggactgaataaggtgttcgacgaccttactttgcacaagactgatttggaaattcagatcgaagagttaaacaaagatcttgctttactaaagaaagaacaccaggaggaggtggacggcctgcacaaacacctggggaataccgtcaatgtagaagtggacgcagctcctggactgaatctgggggtgattatgaacgaaatgagacaaaagtacgaagtaatggcacaaaagaatctgcaagaagcaaaggaacaatttgaaagacaaacagcggtactccaacagcaggtgactgtgaacaccgaggagttgaaaggcacggaagtgcaactgactgaactgaggaggacgtcccagtctttggagattgaactccagagccatttatctatgaaggagagcttagaacacaccttggaagaaaccaaagctcgatactcgtcacagttagccaacctacagtctttattatcatctctcgaggctcagctcatgcagattaggtctaacatggagcgacagaataatgaatatcacatcctgctcgatattaagactcgcttggagcaagagattgccacctatcggcgcctgctcgagggagaagatgtcaaaaccactgaatatcaactctccactcttgaggaacgggacattaagaaaacaagaaaaatcaagacggtggtgcaagaggtggtggacggaaaggttgtgagtagtgaagtgaaagaagttgaagagaatatttag

SEQ ID NO: 248886 - RNA, 1215 nt, synthetic construct
  misc_feature 1..1215: note = Description of Artificial Sequence: Synthetic coding sequence
  source 1..1215: mol_type = other RNA
atgagttactcatgcggactgccctctttgtcctgtcgaacaagctgttcatccaggccatgcgtgcccccatcttgccacggctgcactttaccaggtgcgtgtaatatcccagcaaatgtctctaattgcaattggttctgcgaaggatcattcaatggctctgagaaggaaactatgcagttcctcaatgacaggttggcctcctatcttgaaaaggtcagacagctggaacgcgacaatgccgagctggaaaatttaatccgagagaggtctcaacaacaggagccattggtttgtgccagctaccagtcttacttcaagacaatcgaagaattacaacagaagatcctgtgcagcaaatccgaaaatgctaggctggtggtgcagattgataacgccaagctcgccagtgacgatttccggactaagtatgaaacagaactctcgttaagacagctggttgagtccgatataaatggcctgagaagaatactggatgaactaaccctgtgcagaagtgacctggaagcacaggtggagtccctcaaggaagaactcctgtgtctgaagcagaatcatgagcaggaagtgaatacactgcggtgccagttgggggatagactgaatgtagaagtggacgccgctccaaccgtggatctgaatcaagtgttaaatgagacaagaagccaatacgaggcactggtcgaaaccaatcggagggaagtggaacagtggtttgcgacacagacggaggagttgaataagcaggtagttagctcctcagagcagctccagagctatcaggctgagatcatagaactgcggaggaccgtgaatgccctggaaatcgaactacaagcgcaacacaacctgagagattccctggagaataccctaaccgagagcgaggcgagatactcctcccaattgtcacaggtgcagagactgataaccaacgtcgagtcccagttggcggaaattaggtctgatttagagagacagaatcaggaataccaggtgctattggatgtgcgagcccgactggaatgcgaaatcaacacatacaggagtctgctcgaaagcgaggattgtaagctgccctcaaacccctgcgccactactaatgcatgtgataagagtactggaccttgtatatccaacccttgcggtctaagagcgagatgcgggccatgtaatacctttggttactag

SEQ ID NO: 248887 - RNA, 738 nt, synthetic construct
  misc_feature 1..738: note = Description of Artificial Sequence: Synthetic coding sequence
  source 1..738: mol_type = other RNA
atggcagttattatcggcgtcgcagtaggtgccggagtcgcatttctcgtgctgatggctactatcgtcgcgttctgttgtgcaaggtctcagcggaacctcaagggcgtggtgtctgctaagaacgacataagagttgaaatcgtgcataaggaacctgcatctggtcgtgaaggcgaggaacacagcaccatcaagcaactcatgatggataggggagagtttcagcaggattcagtactgaagcagctggaggtgttgaaagaggaggaaaaggaatttcagaacttgaaggatccaaccaatggctactattctgtaaatacattcaaagaacatcatagtacacctactatttccttatcatcttgtcaacccgacttgagacctgcaggtaagcagcgggtgccaactggcatgtcttttaccaacatctacagtacactgtccggacaaggtagactttatgattacggccagagatttgttctggggatgggatcctcttccatcgaactatgcgaacgcgaatttcaacgagggtctctgagcgatagcagtagctttctagacacacagtgcgattcctcggtgagttcctcaggaaaacaagacggatacgtgcaatttgataaagcaagcaaggccagtgcgtcgagcagtcaccactcacaatccagcagccagaatagcgacccctccaggcccctccagagacgaatgcagacccatgtttag

SEQ ID NO: 248888 - RNA, 2337 nt, synthetic construct
  misc_feature 1..2337: note = Description of Artificial Sequence: Synthetic coding sequence
  source 1..2337: mol_type = other RNA
atgaagccgtttcagcttgatctacttttcgtttgtttctttctgttctcccaggagctagggctccagaaaagagggtgttgcctagtccttggatacatggctaaagataaatttcgcagaatgaacgaaggacaggtgtattccttctcccaacaaccacaggaccaggtcgtggtgtctggacagcctgtgactctgctgtgcgccattcccgaatacgatggatttgtgctctggattaaagatggtctggccttaggcgtcggtcgggatctaagcagctacccacagtatctcgtggtcgggaatcacttatcgggtgaacaccacttaaagatcctgagagcagagttacaagacgacgccgtgtacgaatgccaagctattcaggcagccattcgttccagacctgcacgcctgaccgtgctggtacctcctgatgaccctgtgatactcggcggacctgttatttccttgcgcgccggggatccactgaatctaacatgccacgctgacaatgcgaagcccgctgcgagcatcatctggttaagaaaaggcgaggtaatcaacggagccacatacagcaaaactttactacgtgatggaaagcgtgaaagtattgtcagtactctattcattagcccaggagacgtggaaaacggccaaagtatcgtctgtagagccacaaataaagctatcccaggaggtaaggaaactagcgtcacgatcgacatccagcatccgccactggtgaacctgtcagttgagcctcagcccgttcttgaggataacgtagtaacattccattgctccgctaaagccaatccggcagttacacagtaccgttgggcaaaaaggggtcaaatcatcaaggaggcttcgggcgaggtgtatcgcacaaccgttgactacacttatttctcggaacccgtaagctgtgaagtcaccaacgccctgggaagtaccaacctttctagaaccgttgacgtatatttcggaccgagaatgaccaccgaaccacagtcccttctggtggacctcggtagcgacgctattttttcttgcgcttggacgggcaatccatctctgaccattgtgtggatgaaacgaggttcgggtgtcgtgctgagtaacgaaaagacacttacactaaaaagcgttaggcaggaagatgctggtaagtacgtttgcagagctgtcgtccctcgagtgggcgccggagaacgggaagttaccctgacggttaacggaccccccatcatatccagcacacaaactcagcatgcccttcatggagaaaaaggacagatcaagtgcttcattcgctccactccacctcctgatcgcatcgcctggtcatggaaagagaacgtcctcgaatctggaacgtccgggcgctacacagttgagacgatctctacagaagaaggagttatatctaccctcaccatcagtaacattgtgcgagcagattttcagaccatttataactgtacggcctggaattcttttggttccgacactgagataattcggttgaaagagcagggcagcgagatgaagtccggggcagggcttgaagccgaatcagtccctatggcagttataataggagtggcggttggagccggcgtggccttcctggtgctaatggcgactattgttgcattttgctgcgcaagatcccagagaaaccttaaaggcgtggtctccgctaagaacgatataagggtcgagattgtccacaaagaacccgcgagcggccgcgaaggggaggagcatagcacaattaagcagctaatgatggatagaggcgagttccagcaagattccgttctcaaacagttggaagtcttgaaggaggaggagaaagaatttcaaaacctaaaggatcccaccaacggatactacagcgtgaacacctttaaagagcaccactccacccccacaatcagtttaagcagttgtcagccggaccttaggcctgctggtaaacagcgagtcccaacaggaatgtcattcactaatatctactccacattgagcggtcagggcagattgtacgactacggacagcgctttgtgcttggcatggggtcctcctcaatcgaactgtgtgagcgcgaatttcaaaggggctcactttccgactcttcatcatttctcgacacgcagtgtgactcaagcgtttcttcgtccggcaaacaggatgggtacgttcaattcgacaaagctagtaaagcaagtgccagttctagccaccacagccagtcatcctcacaaaattctgatccttctcgcccattacagcggagaatgcaaactcacgtgtag

SEQ ID NO: 248889 - RNA, 1803 nt, synthetic construct
  misc_feature 1..1803: note = Description of Artificial Sequence: Synthetic coding sequence
  source 1..1803: mol_type = other RNA
atgaagccctttcaactggatcttttgttcgtctgcttctttctgttcagccaagagctgggtttgcaaaagcggggctgttgtctggtgctgggatatatggccaaggataaatttcgaagaatgaatgaaggacaagtctactccttctcccaacagccccaggatcaagtggtggtatccggccagcccgtaacgctattatgtgcaattcctgagtacgatggatttgtcctctggatcaaggatggtctcgctttgggtgtgggtagagacctgagtagttatccccaatacttggtggtcggaaatcacctgtctggagaacatcacctaaagattctgcgggctgaactccaggacgacgcagtctatgagtgtcaagccatccaggccgctattcgtagccgaccagcacgcttaactgtgttagtgccccctgatgaccccgtaattctgggaggaccggtcatttccttacgtgctggggaccctttgaatctcacatgtcatgctgataacgcaaaacctgccgcttccattatctggctgaggaagggagaagttatcaatggagcaacatatagcaagacgctcctgagagatggtaaaagggagagcatcgtaagtacattgtttatctctccaggggacgtggaaaatggccaaagcatcgtatgtcgtgccactaataaagcaatacccggcggtaaagagacatcagtaacaatcgatatccagcacccacctctcgtcaacctctcagtggaacctcagcctgtcctggaggataacgttgtgacatttcactgttcagcaaaggccaatcctgccgtgactcaatacagatgggcgaagagggggcaaattattaaagaggcgtctggggaggtgtatagaacaactgtcgactacacttatttctctgagcctgtgtcatgtgaagtgaccaacgccctcggaagtacaaatctttccaggactgtcgatgtatactttggacctaggatgaccactgaaccacagtcgctgctggtcgacttgggaagcgatgctatcttttcatgtgcctggaccggaaatcctagcctgaccattgtttggatgaaaaggggtagcggagtcgtgttgagtaacgagaaaactctgacactgaaatctgtaagacaggaagacgccggaaagtatgtgtgccgggctgttgttccccgcgttggagcaggtgagcgcgaggttaccctcacagtgaacggaccgcctatcatctcctctactcagacacagcatgcacttcatggtgagaaagggcaaataaagtgcttcattcggtcaacacccccacccgaccgtatcgcttggagctggaaggagaatgtgctcgagagtgggacttcagggaggtacacagtggagaccatttctaccgaagagggagttataagcacactgacaatttctaacatagtaagggcagattttcaaactatctacaattgtacagcatggaattcatttggctctgataccgagatcatcagactgaaagagcagggatcagaaatgaaaagcggcgcaggccttgaggcagagtccgtgcccatggcggtgatcattggggtggccgtaggagctggggttgcctttctcgttctgatggcgacaatagtagctttttgttgtgctcgatctcaacgaagcacaggtggcagaagcgggattagtggacgaggaacagagaaaaaagcccgcctgcgattgcctcgaagggcatctaaacaggagtgcaacgagcaggggagttag

SEQ ID NO: 248890 - RNA, 2301 nt, synthetic construct
  misc_feature 1..2301: note = Description of Artificial Sequence: Synthetic coding sequence
  source 1..2301: mol_type = other RNA
atgaaaccttttcagctggacctactcttcgtttgtttcttcctcttctcgcaggaactaggactccagaagcggggttgttgtctcgtgctggggtacatggccaaggataagttccggagaatgaatgaaggtcaggtttactctttttcccaacaacctcaggatcaggttgtggtttccggacagcccgtgaccctgctttgcgccatacccgaatatgacggcttcgtattatggataaaagatggactggctctcggcgtggggagagacttaagttcatatccacagtacctcgtggttggaaaccatttgagcggagagcaccatttgaagattttacgcgccgagctgcaagacgacgctgtgtacgaatgtcaggcgatacaggccgctattcggtctagacccgcccgactgacagttctggtcccccctgacgatcccgtgatactgggcggccctgtcatttccttgcgagcaggagatccgctaaatctcacgtgccacgccgacaacgcaaagcctgccgcctcaattatttggttaaggaaaggcgaagtgattaatggagcaacatattcaaagaccttgctgcgcgatggtaagcgcgagagcatagtatcaaccctattcatctcacccggagacgtcgagaatggacagagcatcgtgtgtagggcaacaaataaagccatcccgggcggaaaagagacatctgttacaatcgacattcagcaccccccgcttgtgaacctctctgtcgagccccagcccgtgctagaagacaatgtcgtgactttccactgttctgctaaagcgaaccccgcagtgactcagtatcgatgggccaaacgcggtcaaatcattaaggaagcaagcggcgaagtgtaccgcacaaccgtcgactacacatatttctcggaacccgtgagttgcgaagttaccaacgctttaggatcaacaaacctctctcggacagtggatgtgtactttgggccaaggatgacaactgagccacagtccctgcttgtagacctgggatcagatgctatattcagttgtgcgtggacgggaaatccttctttgactatcgtgtggatgaagagagggtctggcgtcgtgctgtcaaacgagaaaacactaacgcttaagtctgttagacaagaggacgccggcaaatacgtgtgcagagcagtagttcctagagtcggtgcaggcgagcgcgaggtcacactaaccgttaacggaccccctatcatctcatccacccagacacagcatgcgctgcacggggaaaaaggtcaaattaaatgctttattagatcgacaccaccacccgacagaatcgcttggagctggaaagagaatgtcttggagagcgggactagcgggagatacactgtggagacaatctcaaccgaggaaggcgtgatatcaacactgactatttcaaatattgtgagggccgacttccaaactatatataactgcaccgcttggaacagtttcggttcggacactgaaataattcggttgaaagaacaagaaagtgtaccaatggcagtgattatcggtgttgcagtgggagctggcgtggccttcttagtgctgatggcaaccattgtcgctttttgctgtgcgcgctcgcaacgaaacttgaagggtgttgtctcagcgaaaaacgatatacgagtcgaaatagtgcacaaggagccagccagtgggagggaaggagaagagcatagtacgattaaacagctgatgatggatcgcggggagtttcagcaggattccgtgcttaagcaactggaagtgttaaaagaagaggagaaagagttccagaatttgaaagacccgactaacggctattattctgtaaacaccttcaaggaacaccattcgacacctacgatctctctgagtagctgtcagccagatctgaggccggctggaaagcagcgagtgccaacgggaatgtccttcaccaatatctacagtacactgtccgggcaaggtagactctatgactatgggcaaagattcgtgcttggcatgggcagttcatctattgagttatgcgaacgcgagttccagaggggctccctgagcgattcctcaagctttttagatacacagtgcgattcatccgtctctagttctggaaagcaggacggatatgttcaatttgataaagccagtaaggcatcagcaagtagtagtcaccattcccaaagcagctctcagaattcagatccatcccgacccttacaacgacgcatgcagactcacgtctag

SEQ ID NO: 248891 - RNA, 1998 nt, synthetic construct
  misc_feature 1..1998: note = Description of Artificial Sequence: Synthetic coding sequence
  source 1..1998: mol_type = other RNA
atggccgctggaggatctacacagcaacgacgacgtgagatggccgccgccagtgcagctgcaatatccggcgccgggcgctgtcgactttccaagataggagccactcggaggcctccacccgccagggtcagagtggccgtgagactcaggcccttcgtcgacggaacggcaggtgctagcgacccaccttgcgtccggggtatggactcttgtagtttggaaattgcgaattggaggaaccatcaagagacactcaaataccagtttgacgctttctacggcgaacgaagcacgcagcaagatatctatgccggctcggtccagcctattctacgtcaccttcttgaaggacagaatgcctccgtgctcgcatacgggccaacgggcgccgggaaaacacacacaatgctggggagtcccgaacagccaggcgtcataccccgcgccctaatggatcttctccagcttacacgagaggaaggcgccgaaggaagaccttgggccttgagtgtcaccatgtcatacttggagatttaccaagagaaggtgctcgatttgttagaccctgcctctggagatctggtgattagagaggattgtcgggggaacattttaatccctggactatcccagaaacctatctcaagtttcgctgatttcgagagacactttctgcctgcgtctaggaatcgcaccgtgggcgctacacggctcaatcaacggagttctagaagtcacgccgtgctgcttgtgaaagttgatcagagagaacgccttgcgcccttcagacaacgcgagggaaagctctatttgattgacctagctggaagcgaagacaatcggaggaccggaaataagggcctgagacttaaagaaagcggagccatcaatacaagtctgtttgtgcttggtaaagttgtcgatgcgctgaatcaaggacttcccagggtgccataccgcgattcaaaactaacacggctgctacaggatagcctcggcggaagtgcccactctatcttaatagcgaatatcgctccagagcggagattctacctcgataccgtgtcagcactcaatttcgcagcccgctccaaagaggtaatcaatcgtcctttcaccaatgagtcgttacagccacacgccctgggtcctgttaagctgtcccagaaagaactcctcggcccccctgaagcgaagcgcgcacggggcccagaagaggaagagatcggttccccagagcctatggccgcacctgcaagtgcttcacaaaaattgtcccctcttcagaaattaagttctatggatcctgcaatgctggaacgattgctgagcctggaccgactgctcgcttcccaaggcagccagggcgcccccttactctccacccccaagcgcgagagaatggtgctgatgaagacagttgaggagaaagaccttgaaattgaaaggctgaaaacaaagcagaaggagctcgaagctaagatgctggcccagaaggctgaggagaaggaaaatcattgccccacgatgttgaggccgctatctcaccgaacagtgacaggtgctaagcctctgaaaaaagccgtggtcatgcccttacagttgatccaggaacaagccgccagtcccaacgccgaaatccacatcctcaagaacaaaggacgcaaacgcaaactggagtcactggacgctctagaacccgaagagaaggctgaggattgttgggagttacagatctcgcctgagttgctggctcacgggaggcagaagatcttagacttacttaacgaaggcagcgcccgcgatctgcgctccttgcagcgaatcggaccaaaaaaagcccagctcatcgtgggttggagagagcttcatgggcccttctcccaggttgaggacttagaaagagtggaaggaattacaggaaaacagatggagtcctttctgaaagctaacattcttggactagcagctggacagagatgtggggcgtcctag

SEQ ID NO: 248892 - RNA, 1065 nt, synthetic construct
  misc_feature 1..1065: note = Description of Artificial Sequence: Synthetic coding sequence
  source 1..1065: mol_type = other RNA
atgcaaggtctattattctctaccctactgctggcaggattagcacagttttgttgccgtgtgcaggggacaggacctctcgacaccacaccagaaggacgtccaggagaggtgagcgatgcgccccagagaaaacaattctgccactggccatgtaaatgtccgcagcagaaaccacggtgccctccaggtgtcagtctggttagagatgggtgtggatgctgtaaaatctgtgccaagcagccaggcgagatttgcaacgaagccgatttatgcgatccacacaaagggctgtattgtgactattctgttgatagaccaagatacgagaccggggtgtgcgcttatttggtcgccgttggatgcgagtttaaccaggttcactatcacaatggccaggtcttccagcccaaccctctgtttagctgcctgtgcgtcagtggtgcaattggatgtactcctctctttattcccaaacttgcaggctcacattgcagcggggctaaaggcggaaaaaaaagcgatcagagcaattgctctttggaaccgctcctgcagcagctctctacctcctataaaacgatgcccgcatacagaaatctacccttgatctggaagaagaagtgcctggtgcaggccacgaagtggaccccgtgtagccggacctgtggcatgggaatttccaatcgtgtgaccaacgaaaattctaactgcgagatgagaaaagaaaaacgcctttgttatatccagccctgtgacagcaacatcttaaaaacaatcaaaataccaaaaggcaaaacctgtcagcccacctttcagctcagcaaggccgaaaagtttgtgttcagcggatgttcctccacccaatcctataagcccaccttctgcggtatctgcctcgacaaacgttgctgcatccccaacaagagcaagatgatcacaattcaattcgactgcccgaacgagggctcatttaaatggaaaatgctgtggataacctcgtgtgtgtgtcagagaaattgtcgcgaacctggggacatcttttccgaactcaagatcctttag

SEQ ID NO: 248893 - RNA, 267 nt, synthetic construct; identical to SEQ ID NO: 248287
  misc_feature 1..267: note = Description of Artificial Sequence: Synthetic coding sequence
  source 1..267: mol_type = other RNA

SEQ ID NO: 248894 - RNA, 363 nt, synthetic construct
  misc_feature 1..363: note = Description of Artificial Sequence: Synthetic coding sequence
  source 1..363: mol_type = other RNA
atggctctatcgtcagcttggagatccgtccttcccctatggctcttgtggtccgcagcatgttcacgcgccgcttcaggcgacgacaacgcctttccttttgacattgagggatcgagtgccgttggccggcaggacccccctgagacatctgaaccacgtgtagccctgggtagattaccccccgccgccgaagtccagtgcccctgccactgccaccccgctggggcaccagcaccccctcgggcagtcccccactcttctttctccttatcaccacccctttccagcccgcaatgtttagaatctttcacatgggccagatcagttcggaaactggaaataaagagctttccattgtag

SEQ ID NO: 248895 - RNA, 549 nt, synthetic construct
  misc_feature 1..549: note = Description of Artificial Sequence: Synthetic coding sequence
  source 1..549: mol_type = other RNA
atggccttgtcctccgcctggagatccgtgctccctctctggctcctttggagtgctgcttgcagccgcgctgcgtctggagacgataacgcttttcccttcgacatagagggatcttctgctgtcgggcgacaagatcctcccgaaacatccgagcctcgcgtcgcactgggtcgtcttcctcctgccgccgagaaatgtaacgccggcttctttcacaccttgtccggggagtgtgtgccatgtgactgcaacgggaatagcaatgaatgcctagatggctcagggtattgtgttcattgtcagcgtaataccaccggggagcattgcgaaaagtgcttggatggctatatcggagactctattagaggagctccccagttctgtcaaccttgtccatgccctcttccacatctggccaatttcgcggaatcgtgctaccgaaagaatggagctgtgaggtgtatctgtaatgagaactatgctggacctaactgcgagagacccagtccacagtctacacgaggattcccactgaatgattcatag

SEQ ID NO: 248896 - RNA, 537 nt, synthetic construct
  misc_feature 1..537: note = Description of Artificial Sequence: Synthetic coding sequence
  source 1..537: mol_type = other RNA
tgaattttcgaggactgtgacgaagtaacgggccaatgccgtaactgcctacggaacactactggatttaaatgcgaaaggtgtgctcctggttattatggcgatgcgaggatcgctaagaactgcgcggtctgcaattgtggtggagggccttgcgatagcgttactggcgagtgtttggaagaaggcttcgaacctccgaccggcatggattgccctaccatttcctgcgacaaatgtgtgtgggaccttaccgatgcactgagactggcggcactatctattgaagaggggaaatcaggagttctctcggtgtcctccggggccgcggcgcacaggcatgtgaacgagatcaacgccactatctatctccttaagaccaaactcagcgaaagagagaaccagtacgcacttagaaaaattcagattaacaatgccgaaaacacaatgaaatccctgctgagtgacgtagaagaactcgttgaaaaacattggaacaagcctagacgcagattagaactgcaagaaggtgtttag

SEQ ID NO: 248897 - RNA, 5451 nt, synthetic construct
  misc_feature 1..5451: note = Description of Artificial Sequence: Synthetic coding sequence
  source 1..5451: mol_type = other RNA
atggccttgtccagcgcctggcggtctgtgctaccactgtggctgctgtggtccgcagcttgctctcgcgctgcgtccggggacgacaacgcttttccctttgacattgagggctcttccgccgtgggacgacaagatcctcccgagacgtcagaacctagagtggcgctgggacgcttaccacctgctgcagaaaaatgcaatgccggtttctttcatacgctgtcaggagagtgtgtcccctgtgactgtaatggaaattccaacgaatgtctcgacggttccggttactgcgttcactgccaaagaaataccaccggcgaacattgcgagaaatgcctggatggatacattggcgactccatccgcggcgccccccaattctgccagccgtgcccatgcccactccctcacttggccaacttcgcagaaagctgttatcgcaagaatggagctgttagatgtatttgcaatgaaaattacgctgggcccaactgtgagcgatgcgccccaggatattacggaaatcccctcctgattggaagtacttgcaaaaagtgtgactgctccggcaactctgacccgaatctgatatttgaggattgtgacgaagtaactggccagtgccgtaactgtctcagaaatacaacagggttcaagtgtgagagatgcgccccaggttattacggagatgcaagaatagccaagaattgtgctgtttgcaactgtgggggtgggccctgcgattctgtgactggcgagtgtctggaggaagggtttgaaccgccgaccggctgcgataagtgtgtgtgggatcttaccgatgccctgcggcttgctgccttgtccattgaagaagggaagagtggcgtgttaagtgtgagttctggggccgcggcacaccgccacgtgaacgaaataaacgctacaatctacttgctcaaaaccaaactgtctgaaagagagaaccagtatgccctccggaaaatccagattaacaatgcggaaaatacaatgaagtctttgcttagtgatgttgaggaactcgttgagaaagagaaccaggcatcaaggaaaggtcaactcgtgcagaaggagagtatggatacaataaatcatgcatcccagctcgttgaacaggcacatgacatgagagacaaaattcaggagatcaataataagatgttatattacggagaggagcatgaattgtcacccaaagagatatcagaaaaactcgtgctggctcagaaaatgctggaggagattcggtcaagacagcctttctttacccagcgggagcttgtagatgaggaggccgatgaagcctatgaactgttgtcccaagcggaatcctggcagaggctgcacaatgagactcgcacacttttccccgtggtactggagcagctggacgactataacgcaaaacttagtgatctgcaggaggccctagaccaggctttaaattacgtgcgggacgccgaagatatgaatagggctactgcggccaggcagcgggaccatgagaagcagcaagaaagagttcgtgagcagatggaagtcgtcaacatgtcgttatccacaagcgctgacagcttgacaacgcctagactgaccctcagcgagctcgatgacattattaagaatgcctccggaatctatgcagaaatcgacggggcgaaatcagagttgcaagtcaaactcagcaatttaagcaacctttctcacgatttagtccaggaagccattgaccacgcgcaggacctccaacaggaagctaatgagctgtcaagaaagcttcattcatctgatatgaatggcctcgtacaaaaggccctggatgcaagtaacgtatacgaaaatattgtgaactatgtttccgaggccaatgaaacagccgaattcgccctgaacacgactgacagaatatatgatgccgtcagcggaatagatacacagataatctatcacaaagacgagagcgagaacctcctgaaccaagctagggaattacaggcaaaagcagagtcctcctccgatgaggctgtggcggacactagtcggcgggttggaggagccttggccagaaagtcagcccttaaaacacggttatctgacgctgttaaacagttacaagcagcggaaagaggtgacgcacaacagcgactcggacaatcaaggcttattacagaagaggcgaacagaaccactatggaagtgcagcaagcaacagcaccgatggctaacaatctcacaaactggtcacagaacctgcaacattttgattcatccgcttacaatactgccgtgaactccgctcgcgacgccgtgagaaatctaacggaagtcgtgccgcagctgctggaccagcttcgaactgttgagcagaaacggcctgcaagcaatgtgagtgccagcattcaacggatccgagaactgatcgcacagacaagaagtgtggcatccaaaattcaagtcagtatgatgtttgatggacagagcgcagttgaagtgcattcaagaacgagtatggatgacttgaaagcctttacatctctctcgctgtacatgaaaccacctgtgaaacgtccagagcttaccgagactgccgaccagtttatcctgtacttggggtcaaaaaacgctaaaaaagagtatatgggtctcgcgataaagaacgacaacctagtgtacgtctataacttaggaaccaaggacgtcgaaatccctctagacagtaagcccgtgtccagttggcctgcttacttctcgatcgtgaaaatcgagcgcgtgggaaagcacggaaaagtgttcttaacagtgccgtctctaagctccaccgccgaagaaaaattcatcaagaaaggcgaatttagcggagacgatagtctgttggatctggaccccgaggacaccgtcttctacgtgggtggcgtcccatctaattttaaattgccaacatcattgaacctgccaggattcgtaggatgtctcgagttagcaaccctgaacaacgacgtgatatcactctacaatttcaaacacatctacaatatggatccctctacctccgttccatgcgcccgagataaattagcctttacacagtcgcgggcagcttcctatttttttgacggatcagggtatgccgtggttagagatattacgcggcgcggtaagttcggccaggtgaccaggtttgatattgaagtaagaacccctgcagacaacggcctgatcctcctgatggttaatggaagtatgttcttcagacttgagatgagaaacgggtacctgcatgtgttctatgactttggattctctggaggaccagtgcacctggaggacactctgaagaaagctcaaataaacgacgctaaatatcatgaaatatccatcatctatcataacgacaagaaaatgattctggtggtcgatagaagacacgtgaaatccatggataatgaaaaaatgaaaatccccttcaccgacatttacatcggcggagctcctcccgagatcctgcagtcacgtgcattgcgggctcacttgccacttgacattaattttcggggttgtatgaaaggcttccaattccagaaaaaagattttaatttactggaacaaactgagacgcttggagtgggttacggatgccccgaagacagcctcatctcccggagggcttattttaatggacaaagcttcatcgcttctattcagaagatttcattctttgacggcttcgaggggggcttcaactttagaactctgcagccaaatgggctattattttactacgctagtggcagcgacgttttctcaatcagcctcgataacgggaccgtaatcatggacgttaagggtataaaagtgcagagcgtggacaaacagtataacgacggcctcagccatttcgtgatctcatcggtgagccccacaagatatgaactgatcgttgacaaatcaagagtcggatccaagaacccaaccaagggcaaaatagaacaaacacaagcttcagagaaaaagttttattttggtggcagtcctatctcggcccaatacgctaacttcacaggatgtatcagtaacgcttattttacccgggtagacagagatgtagaggttgaagatttccaacgatacaccgagaaggtacatacaagtctgtacgagtgcccgatagaatccagccctttattcctcctgcacaaaaagggcaagaacttgagtaagccgaaggcatcacaaaacaagaaaggaggaaaaagtaaagatgcccccagctgggaccccgttgccctgaagctgcctgaacgaaataccccccggaactcacattgccacctcagtaactcccccagagccattgaacatgcctaccaatatggaggtaccgctaacagtagacaggaatttgagcatttgaaaggagattttggtgctaagtctcagttctctattagacttcgaaccagaagctctcacggtatgattttctacgttagtgatcaggaggagaatgacttcatgaccttgttcctggctcacggtcgcttagtctacatgtttaatgtgggtcacaagaaattaaagattaggtcacaggagaagtacaacgacggattatggcacgacgttatcttcattagagagagatcatcaggcagacttgttattgacggtttgagagtactcgaggaaagcctaccgccaaccgaggcaacctggaagattaaagggcctatctatttaggtggagtggctccaggaaaagctgtgaaaaacgttcagatcaattccatttacagcttttcagggtgtctgagcaaccttcagcttaacggcgcatctatcacaagtgcatctcaaacattttctgtgaccccctgttttgaaggccctatggaaactggcacctatttttcaaccgagggtggttacgtggtcctggatgagtcattcaacatcggcttgaagttcgaaatagcctttgaagtaagacccagatctagcagcggaaccttagtgcacggacatagcgtgaacggtgagtatctcaatgttcacatgaagaacggacaggtgatcgtgaaggttaataacggaattcgagacttttctacctccgttacccctaaacaaagcttatgtgacgggcgctggcacaggattaccgtgattagagactcaaacgtagtgcagctcgatgtggacagtgaggttaaccatgtcgttgggccccttaaccccaagccaatcgatcaccgtgaacccgttttcgtggggggggtccctgagtccctgctgaccccaagattagctccttccaagcccttcaccggttgtatcagacacttcgtgatcgacgggcatccagtttctttctccaaagctgctttagtatccggtgccgtctctattaattcctgccccgctgcttag

SEQ ID NO: 248898 - RNA, 5451 nt, synthetic construct
  misc_feature 1..5451: note = Description of Artificial Sequence: Synthetic coding sequence
  source 1..5451: mol_type = other RNA
atggccctgagttcagcttggcggtctgtgttacccctgtggttgttgtggagcgccgcctgttcccgcgctgcttcgggtgacgataatgcttttccttttgatattgagggctcttccgccgtgggtcgccaagatcctcccgagacctctgagcctcgcgttgccctggggcgccttcccccggctgcagagaagtgtaacgcaggttttttccacaccttaagcggtgaatgcgtgccatgtgattgtaatggaaattcaaacgaatgtctggatgggagtggatactgtgttcactgtcaacgtaatacgaccggcgagcattgcgaaaagtgcctcgatgggtacatcggagattctatccgaggcgcacctcaattttgccaaccttgtccctgcccattacctcacctggctaactttgccgaatcatgttatagaaagaatggggccgtgcgctgtatatgtaacgagaattacgccggcccaaattgcgagagatgcgcgcccggttactatggcaaccccctgctgattggatcaacgtgtaaaaaatgcgactgctctggaaattccgaccccaacttaatcttcgaagactgtgacgaggtgaccgggcaatgccgaaattgcttgaggaatactactggcttcaaatgtgagcgatgtgcccccggatactatggcgatgctaggatagctaaaaattgcgctgtatgtaactgcggaggcgggccatgcgactccgtcacaggcgagtgtctggaggaaggatttgaacccccaaccggctgcgacaaatgcgtgtgggacctgactgatgccctgaggctggctgcgttgtctattgaggaaggtaagtctggcgtgctgagtgtttccagtggtgccgctgcacaccggcacgtgaacgagatcaatgccacgatctacctcctgaaaactaagctttctgagcgagagaaccaatacgccctccggaagattcaaatcaataacgccgagaatacaatgaagagcctcctgagcgatgtcgaagagttagtagaaaaagaaaaccaagcaagtcggaaaggccagctcgtgcagaaagaaagcatggacactatcaatcatgcctctcaactggttgagcaggcccacgacatgagagacaaaatccaagagataaataataaaatgctctactatggggaagagcatgagctcagccctaaggagataagcgaaaagctggtcctggctcagaaaatgttggaggaaattagatccagacagccattctttacacagcgagaacttgtggacgaagaagccgatgaggcgtatgaactattgtcacaagccgaatcctggcagagattgcacaatgagacccggactcttttcccagtcgtgctcgaacaacttgacgactacaatgccaagctatcagatctgcaggaagctcttgaccaggcgctgaattacgttcgtgacgctgaagatatgaacagagccacggctgcgcgccaaagagaccatgagaagcagcaggagcgagtaagggaacaaatggaagtcgtgaatatgagcctctcaacatccgctgattctctcaccacaccacgattgacgcttagtgaactggatgacataattaagaatgcctccggaatctacgcagaaattgatggcgcaaaaagtgaactgcaggtaaaactgtctaacctttcaaacctcagccatgacttagttcaggaggctattgatcatgcccaggatctgcaacaagaagcaaacgaactttcacgcaagctgcattcatccgatatgaatggcctcgtgcagaaagcactcgacgcgtcaaacgtgtatgaaaacattgtgaattatgtgtctgaagctaatgagaccgctgaattcgccttgaacactactgataggatctatgatgcagtttccggaatcgatacccagatcatctaccacaaggacgaatcagagaacctactgaaccaggctcgggaactccaagcaaaagctgaatcctctagtgacgaagcagtcgctgacacctcacggcgggtgggaggcgcactcgcgaggaagtctgccctaaaaactaggctttcggacgccgtcaaacaattgcaagcagccgagagaggtgacgcgcagcagagactcggccagtcaaggctgattactgaagaggctaatagaactacaatggaggtgcaacaggccaccgccccaatggccaacaatctaacaaactggagccagaacctgcaacattttgactctagcgcgtacaatacagccgtgaactcagccagggacgccgtgcgaaatctgaccgaagtggttccccagctcctcgaccaactgcgcacagtggaacaaaaacggccagcctctaatgtctctgcatcaatacaaaggattcgggaactgatagcacagacaagatccgtcgcctcaaaaatccaagttagcatgatgtttgacgggcaatccgccgtcgaagtgcattcgcgaacctctatggatgacctgaaagcatttacatcactgagtctgtatatgaagccccccgttaagcgacccgagctcaccgagacagctgaccaattcatcctttatctggggtccaagaacgctaaaaaggaatacatggggctggcaataaaaaacgacaatcttgtgtacgtctataacttagggactaaagacgtggagatccctctagacagtaaacccgtgtcgtcttggcctgcatatttctcaattgtcaaaatcgaaagagttggcaaacacgggaaagtttttttgaccgttccctcattaagcagcactgccgaggagaaatttattaaaaagggcgaattttctggtgacgattccctactggatcttgaccctgaagacacagtattttacgttggtggcgttccttctaacttcaaactgcccacctctctgaacctgcctggatttgttggctgtctcgaactggcaaccctgaataacgatgtaatatcactatacaacttcaagcatatttataatatggacccaagcaccagtgtcccatgcgcccgagataagctggcctttacccagtctagagcagccagctacttttttgacggctcaggctacgctgtagtaagagacataacccgcagaggaaagttcggacaagttacgagattcgatatcgaggtaagaactcctgcagacaatgggttaatcctcctgatggttaacggatctatgttcttcagactggagatgaggaacggatatctgcatgtattctacgacttcggcttcagcgggggaccggtccacctcgaagacacacttaaaaaggcacaaataaacgatgcgaagtaccacgaaataagcatcatttatcacaacgacaagaagatgatcctggtggtggatcgacggcacgtcaagagtatggacaatgaaaagatgaaaatccctttcacggatatctacatcggcggcgcaccccccgaaatcctccaatcgcgagcacttagagcacatcttccactggatatcaactttagaggatgtatgaaggggttccaattccagaaaaaagactttaacctgcttgaacaaactgaaaccctcggtgttggttacggatgtcccgaagattccttaatttcccgtagagcatacttcaacggccaaagtttcattgcatccatccagaaaatcagcttctttgacgggttcgaaggggggtttaactttagaacactgcagcctaatggactactcttttactacgcgagcggctcggatgtgtttagcatatcactcgacaacgggactgtcatcatggacgttaagggcataaaggtgcagtccgttgataaacagtacaatgatggcctgtcacactttgtaatctcttcagtctctcccactcggtacgagctaatcgttgataaatccagggttggaagcaagaaccccacaaaaggcaaaattgagcagactcaagcctccgaaaaaaaattttactttggcgggtctccaatctccgcacagtacgcaaactttacagggtgcatatcgaatgcatactttacgagagtcgacagggatgtcgaggtcgaagatttccagagatacacagaaaaggtccacacttcattgtatgagtgccctatagaatcttctcccctttttctgctgcacaaaaaaggcaaaaacctcagcaagcctaaagcaagccaaaacaagaaaggcgggaagagcaaagacgccccgagctgggatcctgtggctctgaagctgcccgagagaaatacacccaggaatagtcattgtcacctatccaactcgcccagggctattgagcacgcctatcaatacggaggaacggcaaactctcgtcaagaatttgagcatctcaaaggagattttggagccaaaagccagtttagcataaggctacgaacacgctcatcacatggaatgattttctacgtctcagatcaagaagagaatgactttatgactttgttcctggctcacggaagattggtgtatatgttcaacgtgggtcacaagaagctaaagattcggtcacaagaaaaatacaatgatggtctatggcatgatgttatcttcatacgtgaacggtcaagtggacgcctcgttattgatggcctgagagtacttgaggagtccttacctcctaccgaagctacatggaagatcaaaggccctatctatctgggcggggtcgctcccggaaaagccgtgaaaaacgtgcagatcaattctatctattctttttcaggatgccttagtaacctgcagttaaatggagcctctataactagcgcaagccagactttttcagtcactccatgcttcgaggggcctatggaaaccggcacgtacttttccacagagggcggctacgtagtgttggatgagtccttcaatatcggcctcaagtttgaaattgcattcgaagtccgacccaggtcatcttcaggaactctagtgcatggccattctgtcaatggcgaatatctcaacgtccacatgaagaacggccaggtaatagtgaaagttaataacggtattagggatttcagcacttccgtaacacctaagcagtccctgtgcgacggaagatggcaccgaatcaccgtgattcgtgacagtaatgttgtccagctcgacgtagacagcgaggtgaaccatgtagtaggtccattaaaccctaaacccatcgatcatcgcgagccagtctttgtcggcggtgtgcctgaatccctgctcacaccccgccttgctccctccaaaccttttaccggctgtattcgccactttgtgatcgacggtcaccctgtctccttctctaaagcagcccttgttagcggagccgtgtctatcaattcatgtccagcagcctag

SEQ ID NO: 248899 - RNA, 390 nt, synthetic construct
  misc_feature 1..390: note = Description of Artificial Sequence: Synthetic coding sequence
  source 1..390: mol_type = other RNA
atggccttaagtagtgcctggcggtcggtcttaccactctggcttttgtggagtgctgcgtgttcacgggctgcctccggcgacgataacgcttttccctttgatatcgaaggctcatctgcagtcgggcgacaggatcccccagaaacaagtgaacctagagtggccttggggcggctaccccccgcagcagaaaaatgtaacgccggattcttccatacactctcaggggaatgcgtcccgtgtgactgcaatggcaatagtaatgaatgccttgacggtagtggctattgtgtaactaccgatggcgaagaccccgggttctcagcctcagcgttgtcattcattctttcctctcaaggcgctcgcgaagccagggctccaacctag

SEQ ID NO: 248900 - RNA, 363 nt, synthetic construct
  misc_feature 1..363: note = Description of Artificial Sequence: Synthetic coding sequence
  source 1..363: mol_type = other RNA
atggccttatctagtgcttggcgttcggttctgcccctgtggctactgtggtccgcagcatgttctcgggccgcatcaggtgatgacaatgcctttccatttgacatcgagggttcctccgctgttggcaggcaagatcctcctgaaacttcagaaccacgggtggccttgggcaggctcccaccagccgcagaggtacagtgtccctgccattgccaccccgccggagctcccgctcccccccgtgccgtgccccattctagtttttctctaagtccacccctcagctcaccacagtgtttggaatcattcacctgggctcgctccgtacgaaaacttgaaattaagtccttcccactctag

SEQ ID NO: 248901 - RNA, 1125 nt, synthetic construct
  misc_feature 1..1125: note = Description of Artificial Sequence: Synthetic coding sequence
  source 1..1125: mol_type = other RNA
atggctctgagctctgcctggcgatctgtacttcccctgtggcttctctggtctgctgcctgttcacgcgctgcaagcggcgatgataacgcctttccctttgatattgaaggaagttctgccgttggtagacaggacccgcccgaaaccagtgaacctcgcgtggcgctgggccgactcccacctgcagctgagaaatgtaatgctggatttttccacacccttagcggtgaatgtgtcccgtgcgactgtaatggtaacagcaatgagtgtttagacggttctggctattgcgtgcattgccaaaggaatacgactggcgaacattgcgaaaaatgtctggacggatatataggagatagcattcgcggcgccccccagttctgccagccttgcccatgccctttaccccaccttgctaactttgctgagtcctgctaccggaaaaatggagctgtgagatgcatttgtaatgagaattacgcgggccccaactgcgagcggtgcgcaccaggttattatggtaatcccttactcattgggtctacatgcaagaaatgcgactgctcggggaactctgaccccaacttaatcttcgaggactgcgatgaagttaccggtcagtgtcgaaattgcctccgaaacactacaggcttcaaatgtgagcgatgcgcccctggatactatggagatgcacgaattgcgaagaactgcgccgtatgcaactgtggcggcgggccctgcgatagtgtcacaggcgagtgtcttgaagaggggtttgaacctcctaccggaatggattgtcccacaatctcttgcgacaaatgcgtctgggacctgaccgacgccttgcgactggccgctttatcaattgaagagggaaagagcggtgtactgagcgtgtcatccggagctgctgctcaccgccacgttaacgaaataaatgccactatctaccttcttaagactaaactatcagaacgagagaaccaatacgctctgagaaagatccagataaacaatgccgagaacaccatgaaaagtttgctgagtgatgtcgaggaacttgtcgagaaacactggaacaaacctagacggagactggagctccaggagggtgtctag

SEQ ID NO: 248902 - RNA, 363 nt, synthetic construct
  misc_feature 1..363: note = Description of Artificial Sequence: Synthetic coding sequence
  source 1..363: mol_type = other RNA
atggctttgagctcagcttggcggtcagtactgcccttatggctactttggtccgccgcttgctcacgggccgcctcaggagacgacaatgcctttccttttgatatagagggttcctcagccgtaggcaggcaagatccacctgaaacctccgaaccccgcgtggctctgggaagactgccgcccgctgctgaagttcagtgtccttgccactgccatcctgctggcgcccctgcccccccacgcgctgtgccacattcatctttctccttaagtccaccgctctccagcccccagtgtctggaatccttcacgtgggcccgatccgtcagaaaactcgagattaagtcattccccctgtag

SEQ ID NO: 248903 - RNA, 324 nt, synthetic construct
  misc_feature 1..324: note = Description of Artificial Sequence: Synthetic coding sequence
  source 1..324: mol_type = other RNA
atggccctgtccagcgcatggcggtctgtgttgccgctctggcttctctggagcgccgcgtgttctcgcgccgctagcggtgatgacaatgcctttcccttcgatatcgagggaagctcagcagtggggcgccaagacccccccgagacttcagaaccccgtgtcgccctcggacgattgcctccagcagctgagaagtgcaatgccggctttttccataccctgtccggtgagtgtgttccttgtgattgtaacggaaacagcaatgaatgcctcgacggctctggctactgtgtgcactgtcagcgaaatacaaccggatag

SEQ ID NO: 248904 - RNA, 996 nt, synthetic construct
  misc_feature 1..996: note = Description of Artificial Sequence: Synthetic coding sequence
  source 1..996: mol_type = other RNA
atggcactgtcctccgcgtggcgctccgtcctcccattatggctactgtggtccgcagcgtgtagcagagcagcaagtggtgatgacaatgcttttccattcgatatcgaggggtcatctgcagtgggtcgacaggatcctccagaaacctctgaacctcgggtagcccttggccgcctgccccccgctgctgagaagtgtaacgccggcttcttccacaccctgagcggtgagtgcgttccttgtgattgtaatggtaactccaacgaatgcttggatgggagcgggtactgcgtgcactgtcaacgaaacacgacaggcgaacactgcgaaaagtgccttgatggatacattggagactcaatccggggcgcgccacagttctgtcagccctgtccctgtccgctgcctcatctggctaacttcgctgagtcatgctatcggaaaaatggcgccgtacgatgcatttgcaacgaaaactacgctggacctaattgtgagagatgtgcgcctggctactatggaaatcccttgctcattggctcaacctgtaagaaatgtgattgctctggtaactctgaccccaacctcatctttgaggactgtgacgaagtgacaggacaatgtagaaactgcctccgcaacacaactgggttcaaatgtgagcggtgtgctcctggctattacggcgacgcaagaatcgcaaaaaactgtgcagtatgtaattgtggaggagggccctgcgatagcgtgaccggcgaatgtttggaagaggggtttgaacctcctaccggtatggactgccctaccatatcatgtgataagtgcgtgtgggaccttaccgatgccctgagactggcagcactatccatcgaggaaggtaaaagcggcgtgctctcagtatcctccggtgccgcggcccacagacacgtcaacgaaattaacgcaaccatctatctcttgaagaccaaactcagcgagcgtgagaatcaatag

SEQ ID NO: 248905 - RNA, 246 nt, synthetic construct; identical to SEQ ID NO: 248299
  misc_feature 1..246: note = Description of Artificial Sequence: Synthetic coding sequence
  source 1..246: mol_type = other RNA

SEQ ID NO: 248906 - RNA, 5451 nt, synthetic construct
  misc_feature 1..5451: note = Description of Artificial Sequence: Synthetic coding sequence
  source 1..5451: mol_type = other RNA
atggccctgagttcagcttggcgaagtgttctcccactgtggcttttatggtctgcggcatgctcccgcgctgcctcaggagacgataatgcatttccttttgatatcgagggctcatctgccgtgggccggcaggacccccccgaaacttccgagcctcgcgtggcacttggtcgccttccccctgccgctgaaaagtgtaatgctggattcttccatactctgtctggtgaatgtgtgccttgcgactgtaatggaaattctaacgaatgtctcgatgggtcaggttattgtgtacactgccaacgaaacactacgggagagcactgcgaaaagtgcctggacggatatatcggtgattctatcaggggagcccctcaattttgccagccgtgcccatgtccactgccacatttagctaatttcgccgaatcatgttatagaaaaaacggagccgtccgctgcatttgtaatgagaactatgccggccctaactgtgaacgatgtgcccctggttactatggaaaccccctgttaattggttctacttgcaagaaatgtgattgcagtgggaactccgatcccaatctcattttcgaagactgtgacgaagtaacagggcaatgtagaaattgtctgagaaataccactgggtttaaatgtgaaagatgcgccccgggatactatggagatgcgagaatcgcgaagaattgtgcagtctgtaattgtggtggtggtccatgtgactcagtcactggtgaatgtctcgaagagggttttgaaccccctaccggatgcgataaatgcgtctgggatttgactgacgctctgcgactggccgctctgagcattgaggagggcaaaagcggagtactttctgtgagcagtggggcggctgcgcatagacacgtaaacgagatcaacgcgaccatatatctcctgaagaccaagctttccgagcgtgagaaccagtatgctttaaggaaaatacagataaataatgccgaaaacacaatgaagtccctgctctccgacgtggaagaacttgtcgagaaagaaaaccaagctagcagaaagggccaacttgtccagaaagagtctatggacacaattaaccacgcgtcccaattagttgaacaggctcatgatatgcgagataagatacaggaaattaataacaagatgctgtactacggcgaagaacacgaactaagcccgaaggaaatctcggagaaacttgtacttgcccagaagatgttggaagagattcggagcaggcaaccattttttacacaaagagaactcgtcgacgaggaggcagacgaagcttatgagctgctttcccaggctgagagctggcagcgcctgcacaatgagactagaactctgttccctgtggtgctcgaacagctggacgattataacgcaaaactctcagatctccaggaggcgctggatcaggctctgaactatgtgagggatgctgaggatatgaatcgcgccaccgccgcacgccaaagagaccacgagaaacaacaggaacgggtaagagagcagatggaggtggtgaacatgtcactgagcacttcagccgacagcttgacaacccccaggctcacactgagtgaattggacgatataattaaaaacgctagcggtatatatgctgaaattgatggagcaaagtctgaacttcaagtaaagctgtccaatctttccaatttaagccacgaccttgtgcaagaagccattgatcacgctcaggatctgcagcaggaagccaacgagctgagccgtaagctgcactcatcagatatgaacggactggttcagaaagcccttgatgcctcaaatgtgtacgagaacatagttaactacgtctctgaggcaaacgagacagctgagtttgctctcaataccaccgaccggatatacgatgctgtgagcggaatcgacacacagatcatctatcacaaggatgaatcggaaaacttactcaatcaggcaagagaactacaagccaaagccgaaagctcctctgacgaagcagtggccgatacttcgagacgggtgggcggcgccctcgcacggaaatcagcgctaaaaacgcgactgtcagacgccgtcaagcaactgcaggctgctgagcgaggagatgctcaacaacgcctaggacaaagcagattgatcacagaagaagctaacagaacaacaatggaagtgcaacaggctacagcaccaatggcaaacaatctgaccaactggagccagaacctgcaacatttcgattcatccgcctataacacggcagtcaacagcgcacgggatgccgttcgaaatctgaccgaagtggtccctcaattattagatcagttaaggaccgtggaacagaaaaggcccgcaagcaacgtctccgcatccatccagagaataagagaactaatcgcgcaaacacggtctgttgcaagcaaaatccaggtgtcaatgatgtttgacggccaatccgctgtcgaagtgcacagtcgaaccagcatggacgatttgaaagctttcacatcgctgagtttgtacatgaaacctcctgtaaaacgtcctgagctcacagaaacagccgaccaatttatcctgtacctcggctcgaagaatgctaagaaggaatacatggggctcgccatcaagaacgataatctcgtctacgtgtacaatctgggcaccaaagacgtagaaatccccctggactcaaaacctgtaagcagctggcccgcttacttcagcattgtgaagatcgaacgcgtaggaaaacacggaaaagtgttcttgactgtcccttcactttcttccactgccgaagaaaaatttatcaagaaaggtgaattctcaggagatgactcgttactcgaccttgaccccgaagacactgtcttttatgttggcggcgtgcccagcaattttaaactccccacaagcttaaatctgcctggattcgtcgggtgtctggagctcgccacactaaacaacgacgtgatctccctctacaactttaagcacatctacaacatggacccctccacctcagtgccatgtgcgcgggataaattggccttcacacagagtagggcggcctcttacttcttcgacggatctggctatgctgttgtccgagacataacacgcagaggtaagtttggacaggttactagattcgacattgaggttagaactcctgcagacaacggcttgatccttcttatggtaaatggcagtatgttcttcagactggaaatgcggaacggatacctccatgtgttttatgattttgggttcagtggaggccccgttcacttggaagatacacttaaaaaagcacaaataaacgacgctaaataccatgaaatctctatcatataccataacgataagaagatgatcttggtcgtggatcgcagacacgttaaatcgatggacaacgaaaagatgaagatcccatttaccgacatctacattggcggagccccgcctgaaatcctgcagtcccgggcccttcgcgcgcatttaccccttgacattaattttagaggctgtatgaaaggattccagttccagaaaaaggacttcaacctgctcgaacaaacagaaacactgggggtgggttatgggtgccccgaagattctctgattagccgccgggcgtacttcaacggccagtctttcattgccagcatccagaaaattagcttctttgatggcttcgagggcgggttcaacttccggacacttcaacctaatggtttgctgttttactacgcctctggatccgacgtattctctatctcactggataatggaactgttattatggacgtcaaaggcattaaggtacagtcagtagacaaacagtacaacgacggtctgagccacttcgtgatttcctccgtgagcccaactagatacgaattgatcgtagacaagagccgcgttggttcgaagaatcctactaaaggtaagatagaacaaacacaggcctccgagaaaaagttctacttcggcggatcaccaatctctgctcagtacgccaactttaccgggtgcatctcgaatgcctactttaccagagtggatcgcgatgtcgaagttgaggattttcaaaggtataccgaaaaggtacacacatctctgtacgaatgtccgatcgaaagtagccctctgtttctgttgcataagaagggaaagaacctctcaaaacctaaagcttcgcaaaacaagaagggaggaaagagcaaggacgccccctcatgggacccagtggccctgaaattacccgaacggaatacacccaggaactcgcattgccacttgtctaactccccccgcgccatcgaacacgcttaccagtatgggggcacagccaattctagacaagagttcgagcatttaaagggagactttggagcgaaaagccaattttctattagactaagaacaaggagctcccacggcatgatcttttacgtctccgatcaggaggagaacgactttatgacgttatttctcgctcatggacgcctcgtgtacatgttcaatgttgggcataagaagttaaagatcagaagccaggagaaatacaacgatgggctgtggcacgacgtgatctttatcagagagaggagctccggtaggctggtcatcgacggactgcgtgtcttagaagagtctttacctcccacagaggccacatggaaaataaaaggcccaatctatctgggtggcgtggcccccggcaaagcagtaaaaaatgttcagattaacagcatttactccttctccggatgtttgtcgaacctccagctcaatggagcgagtatcacctccgccagtcagaccttttcagtgactccttgcttcgaaggcccgatggagaccggcacctatttttcaacagaaggcggttacgtggtcttggatgaaagcttcaacataggcctcaagttcgaaattgcattcgaggtaagacctagaagtagctcggggacactcgtgcacggccacagtgtgaatggagagtacttaaatgtgcatatgaagaacggtcaagtcattgtgaaagtgaacaatggcattagagatttctctaccagcgtgaccccaaaacagtccttatgcgacgggcgatggcaccgaataacagtcatccgggactcaaacgtagtccagctggatgtagactctgaagtgaaccacgtcgttggcccactgaatcctaaaccaatcgaccaccgtgaacctgtctttgtcggaggcgtgcctgaatctctgttaacaccacgtctggcaccttcgaaacccttcacaggttgtattaggcatttcgttattgatggacaccctgtctcttttagcaaagctgccttggtctctggcgctgtttccatcaattcttgtcccgccgcttag

SEQ ID NO: 248907 - RNA, 975 nt, synthetic construct
  misc_feature 1..975: note = Description of Artificial Sequence: Synthetic coding sequence
  source 1..975: mol_type = other RNA
atggcgctgagttcagcttggcgatccgtgctgccgttatggctactgtggtcagcagcatgcagtcgtgcagcgagtggggacgacaacgcatttccattcgacatagagggatcaagtgcagtaggcagacaggatccccccgagacctccgaaccacgggttgctcttggacgccttccccctgctgctgagaagtgcaatgccggtttttttcatacactgagcggagagtgtgtaccttgcgactgtaatggaaacagcaatgaatgccttgatggaagtggctattgtgtacactgccaacggaatactaccggagaacattgcgagaaatgtttggatggatatatcggcgatagtattcgcggcgccccacagttctgccagccgtgcccctgccctctgccgcatttggctaacttcgccgagtcatgttacaggaaaaacggagccgtacgctgcatatgcaatgaaaattacgctggccccaattgcgaacgttgcgctccaggctattatggcaatcctctcttgatcggctctacgtgtaagaagtgcgactgttcaggtaactccgatcctaacttgatctttgaagattgtgatgaggtgacaggccaatgccgtaactgtctaagaaacaccacaggctttaagtgcgaaagatgcgccccgggctattatggagatgctcgtattgctaagaactgtgccgtctgcaactgtggagggggaccatgtgattccgtgacaggcgagtgtcttgaggaagggtttgagccacctactggatgcgacaagtgcgtgtgggacctgaccgatgctctccggctggccgctctctcaattgaagaaggcaaatcaggggttctatcagtgagctccggcgcggctgcccaccgacacgtcaatgaaattaacgccacaatttatcttctcaaaaaaactaaacagaaaaacaacaagaagtag

SEQ ID NO: 248908 - RNA, 276 nt, synthetic construct; identical to SEQ ID NO: 248302
  misc_feature 1..276: note = Description of Artificial Sequence: Synthetic coding sequence
  source 1..276: mol_type = other RNA

SEQ ID NO: 248909 - RNA, 2553 nt, synthetic construct
  misc_feature 1..2553: note = Description of Artificial Sequence: Synthetic coding sequence
  source 1..2553: mol_type = other RNA
atgggactgctacaactgctagccttttctttcctggccctatgtcgggcccgtgtcagagcgcaggaaccggaattttcctatgggtgcgccgaagggagctgttacccagcaaccggagatttactgatcggccgggcacagaaactcagcgtcactagcacctgcggtctccataagcctgagccatactgtatagtatctcatctgcaagaagacaagaagtgcttcatctgcaattcccaggatccctatcacgagacactcaatcctgacagccatctcatcgaaaacgttgttacgacattcgctccaaaccgactgaaaatctggtggcagtctgaaaatggcgttgagaacgtgaccatccaactggatctggaagctgaattccatttcacacaccttatcatgacgtttaaaacattccggccagccgctatgctgatagaacggtcctcagatttcggcaagacatggggggtctataggtactttgcttacgattgcgaggcatcctttcccggaatatccactggcccaatgaagaaggtcgacgatattatttgcgactcaagatacagtgatattgaacccagtaccgaaggcgaggttattttccgtgcattggatccagcgtttaagatagaggacccgtactcacctagaatccaaaatctgttaaaaattaccaatttgcgtatcaaattcgttaagctgcacactttgggagataatctcctcgatagtaggatggagatcagagaaaaatattattatgcggtatacgatatggtcgtccgaggaaattgtttctgctatggtcacgcttccgaatgcgctccagtcgacggctttaacgaggaggttgaaggtatggtccatggacactgtatgtgtaggcacaatacaaaaggtctgaactgcgagctctgtatggacttctaccacgatttaccttggagacctgctgaaggcagaaatagtaacgcatgtaagaagtgcaactgtaatgaacattcaatctcttgtcactttgatatggccgtctatttagctaccgggaatgtgtcaggcggcgtgtgcgacgattgtcagcacaataccatgggccggaattgcgagcagtgcaagcccttctactatcagcacccagagagggatatccgcgatcctaacttctgcgagcgatgcacctgcgaccccgccggaagccagaacgagggcatctgcgattcctatactgatttctcaactggactgatagccgggcaatgtagatgtaaactgaatgttgagggcgaacattgcgatgtgtgtaaagaaggtttctatgatctatcaagtgaggacccattcgggtgtaagtcttgcgcctgcaaccctctgggtaccattcctgggggcaacccctgtgactctgaaaccggccactgttattgcaaacgactagtaaccggccagcattgcgaccagtgtctgccagaacactggggcctgtccaatgatttagacggatgtcggccttgcgattgcgatctgggcggcgcactcaataacagttgtttcgccgaatctggccagtgttcttgcagacctcacatgatcggcagacagtgtaatgaggttgaaccaggctattacttcgccactctggaccactacctatacgaggccgaagaagcaaatctgggaccgggggtctcaattgtggagcgacagtacattcaggaccggatcccatcgtggacgggcgcagggtttgtgagagtcccagagggggcttatctagagttcttcatagataacataccctacagtatggaatacgacattctgattcgatacgagcctcagctgcctgaccactgggagaaagcagttataaccgttcaaaggcccggtagaattcccactagttccaggtgcggtaacacaattccagatgatgacaatcaggtggtttcacttagccccggttctcgttatgtggtcctaccacgccccgtatgcttcgagaagggcactaactatacggtgcgtttagagctccctcaatacactagcagcgactctgatgtggaatccccctacaccctgatcgattccctggttctcatgccgtattgcaaaagcctggatatttttaccgtaggaggctccggtgacggtgtcgtcacgaacagtgcgtgggagaccttccagagatatagatgtctcgagaactctagatcagtagtaaagacccccatgaccgatgtctgccgaaacattatattcagcatcagtgcacttctgcaccagaccggactagcttgtgaatgcgatccccaaggatcactcagcagtgtctgtgaccctaatggcggccaatgccagtgtcggcccaacgtcgtaggtcgaacttgcaaccgttgtgcgccgggaacatttggatttggaccttccggttgtaaaaggagattcctgaaatccatcgtcatgcactctttcagactgacacaaccattgtggcaaggatccattgctgctgaacccatgctgccttcatag

SEQ ID NO: 248910 - RNA, 3912 nt, synthetic construct
  misc_feature 1..3912: note = Description of Artificial Sequence: Synthetic coding sequence
  source 1..3912: mol_type = other RNA
atgcccggtccacgcggggccgccgggggattagcccctgagatgagaggtgccggtgcggccgggcttctcgcactgctgctactactgctactgctgcttcttggactgggcgggagggtggagggtggaccagccggcgaaagaggtgcaggaggtggtggggctctggcaagggaacggtttaaggtcgtgttcgctccagtgatatgcaaacgaacttgtctcaagggacaatgccgcgactcatgccaacaaggcagtaacatgactcttattggggaaaatggacactctaccgacaccttgacaggttccggctttcgcgtcgtggtgtgtcccctgccttgtatgaacggcggacagtgctcctcacgcaaccaatgtttgtgccctccagattttacagggagattctgtcaggtgcctgcaggtggggctggtggtggaaccggcgggagtgggcccggtttaagccgcactggggctttatctacaggagcgttgccacccctggcgcctgagggagactctgtggcctctaagcatgccatctacgctgttcaagttattgccgacccccccggcccaggtgaaggtccacccgcccagcacgctgctttccttgttccccttggacccggacagatttccgcagaagtgcaagcacctcctccagtggtgaatgtgcgagtgcaccatccacctgaggcttctgtgcaagttcaccggattgaatcctcgaatgctgaatctgcagctcctagccaacaccttctgcctcaccctaaacctagccatccccggcccccaactcagaaacctctgggcagatgtttccaagatacactaccgaaacaaccttgcggcagtaacccattgccaggtctcacgaaacaggaggattgttgtggttccatcggaacggcgtggggccagagcaaatgccacaaatgtcctcaattacagtacactggagtccagaagcccgggcctgtgcgaggcgaggtgggagctgactgcccccaaggatataagaggcttaatagtactcactgtcaagacattaatgaatgcgccatgcccggggtgtgccgtcatggagattgtctcaacaacccaggcagttacaggtgcgtatgcccaccagggcactctctaggaccttcacgcacacagtgcattgcagacaaaccagaagagaaatctctgtgcttccgcctagtgtcgccggaacatcaatgccaacatcccttgaccacacgattaactcgtcagctgtgttgttgttcagttgggaaggcctggggcgcccgctgtcagcgatgtcctaccgatggcacagccgccttcaaagaaatttgccccgcaggcaaagggtatcatatcctcacgtcgcaccaaacattgacaatccagggagagtccgactttagcttgtttctgcatcccgacggaccaccaaaaccacagcagctccccgaatcccctagtcaagcgcccccaccagaggacaccgaggaagagcgcggtgtgactaccgactccccagtatctgaggaaaggtccgtgcaacagtcccacccgacggcaaccacaacaccagcaagaccatacccagaactgatatctagaccttcaccgccaacaatgcgctggttcctacccgatctacccccttcgagatctgcagtcgaaatagcaccaactcaagtaacagagaccgacgaatgcaggctaaatcagaatatctgtggacatggcgaatgtgtgccaggcccacccgattactcttgccactgcaatcccggttataggtcccacccccaacaccgctattgcgtcgacgtgaatgaatgcgaagccgaaccttgcgggccaggtagaggaatttgcatgaacacaggaggctcgtacaactgccactgtaatagaggctaccggcttcatgtgggcgcaggcggaagatcctgtgtcgatcttaatgagtgcgctaagccccacctgtgtggtgatggaggattctgcatcaatttccccggtcattacaagtgtaattgctaccctggatacaggctcaaagcatctcgcccccccgtctgtgaagacatagatgagtgtcgcgatccctcctcatgcccagacggtaaatgtgagaacaagccaggatcctttaaatgtatcgcatgtcagcccggttaccgctctcaaggcggaggtgcctgccgagacgtgaacgaatgtgctgaagggtcaccctgctcacctggatggtgtgaaaacctacctggttcgttcaggtgcacctgcgctcaaggctatgccccagctcctgacgggaggtcttgcttggacgtcgatgagtgcgaggcaggagacgtctgtgacaatggaatttgtagcaacacaccaggttcctttcaatgccagtgcctgtccggatatcatctttcacgtgacagatcacactgcgaagacatagacgaatgtgactttccggcagcctgtatcggtggcgactgtataaacaccaatggatcctatagatgtctgtgtccgcagggccacaggttggtgggcggccgcaaatgtcaggacatcgatgagtgttcccaagacccatccctttgccttcctcacggagcctgtaagaatctgcagggatcatatgtctgcgtttgcgatgagggatttactcccacccaggatcaacacggatgcgaagaagtagaacagcctcatcacaagaaggaatgctatctcaactttgacgacaccgttttttgtgacagtgtcctcgccacaaatgtgacgcagcaggaatgttgctgctcgcttggagccggctggggtgatcattgcgagatttatccatgccccgtttattcatcagccgagtttcacagcctctgtccggacggcaagggctacacccaggataataatatcgttaattacggaattccagcgcatagagatattgacgagtgcatgttattcggatccgaaatctgcaaagagggaaagtgtgtgaacactcagcctggatatgaatgctactgcaaacaaggcttctattacgatggaaacctactcgaatgcgtagacgtggacgagtgcctggatgaatcaaactgtcgaaatggcgtctgcgaaaacaccagaggcggctacagatgcgcttgcacccctcccgctgaatactccccagcacaaagacaatgtctgagccccgaagaaatggatgtcgacgagtgtcaagacccagccgcatgcagaccaggacggtgtgttaacctgcctggttcttaccgctgcgagtgcagacccccttgggtgcccggcccctccggccgcgattgccagttgcctgaaagccctgccgagcgggcaccagaacggcgggatgtgtgttggtcccaaagaggagaagacggtatgtgcgctggccccctggctggccccgcgctaacatttgacgattgctgttgcaggcaaggcagaggctggggtgctcagtgccggccatgcccaccgagaggtgccgggagtcactgtccaacaagccagagcgaatcaaactcattttgggatacatcgcctctcctgctcggcaagcctccaagagatgaagattctagtgaagaagactctgacgaatgtaggtgtgtttctggcagatgcgtcccaaggccaggaggggcggtgtgtgaatgtcctggagggttccagttggacgcctcacgagctaggtgcgtggacatcgacgagtgccgagaattgaaccagaggggattactgtgcaaatccgaacgttgtgtgaatacctcagggtctttccgctgtgtgtgtaaagctggcttcgcacgctcccgtccccacggtgcgtgcgtgccgcagaggcgtagatag

SEQ ID NO: 248911 - RNA, 792 nt, synthetic construct
  misc_feature 1..792: note = Description of Artificial Sequence: Synthetic coding sequence
  source 1..792: mol_type = other RNA
atgctgttcggaagtgaaatttgcaaggaaggaaagtgtgtgaatacccaacccggctacgagtgctattgtaaacaagggttctattatgacggcaatctcctcgagtgtgtggatgtggacgaatgtctagatgagagtaactgccggaatggggtgtgcgagaataccaggggtggctatagatgcgcttgtactccacccgccgaatactcacctgcccaacgccagtgtctctcccccgaggaaatggatgtggacgaatgccaagaccctgctgcttgccggccaggccgatgcgtcaatctgcctggctcatatcgctgtgaatgccggccgccctgggtccctggaccatcaggccgtgattgccaactgccggaatcccccgccgagagagcccctgagcgaagggacgtctgttggtcccaacggggcgaagacgggatgtgcgccggtcctctggcagggcctgccctcacttttgacgactgctgctgtagacaaggccgtggttggggcgcccaatgtagaccgtgtccaccacgaggggcaggaagccattgtccaacaagtcaaagtgaatctaattctttctgggacacatcacctctcttgcttggcaaaccccccagggacgaggacagctctgaggaggatagcgacgagtgcagatgtgtttctgctgctgcatgccgcggacgagctgccccttgcgcatcagttcctgccgcctcctcttcgactccccccgcaccagccgcgtggatttctacaagcgccgaatcttag

SEQ ID NO: 248912 - RNA, 3771 nt, synthetic construct
  misc_feature 1..3771: note = Description of Artificial Sequence: Synthetic coding sequence
  source 1..3771: mol_type = other RNA
atgcctggcccgcggggagctgccggaggactggctccagagatgcgcggcgccggcgccgccggcctgcttgccttgctgctgctgctgcttctgcttctcctaggcctcggcggtagagtcgaaggcgggcccgctggtgagagaggcgcgggcggagggggagcactcgctcgggagaggtttaaggtcgtattcgcgcccgtcatatgcaagcgcacctgcctgaagggacagtgtagagatagttgccaacaaggatcaaacatgacgttgataggagaaaatggacacagtacagacaccctgacggggagtggctttagagtagtcgtttgcccccttccctgcatgaacggaggccagtgcagttctagaaaccagtgtctgtgtcccccagatttcactggaagattctgtcaggttccagccggcggtgccggaggcgggaccggcggctctggcccgggcctgtccaggaccggtgctttatctactggagctctccctcctctcgcccctgaaggtgactccgttgcgtccaagcacgctatttacgctgtccaggtcattgccgaccccccaggaccaggggaaggccccccggcccagcacgcggcttttctggtaccactgggccccggccagatctccgcagaggtccaagctcccccccccgttgtaaacgtccgtgtacatcatccccccgaggcaagcgttcaggtccatcgcattgaatccagcaacgccgagtcagcagccccctctcagcaccttctgccccaccccaagccctctcatccccgtccccctacacaaaaaccccttggccgctgcttccaagataccttaccaaagcagccgtgtggatccaaccctctgcccggcctaacgaagcaagaagactgttgtggtagtataggtacagcttggggccaaagcaaatgccacaagtgcccacagctgcagtacaccggcgtccagaagccaggcccagttcgaggagaagttggagcagattgcccccaaggatataaaagactcaactcgacacattgccaagatatcaatgagtgcgctatgcctggtgtgtgtaggcatggcgactgtctgaacaatcccggttcatataggtgtgtgtgcccaccaggccacagcttgggcccgtccagaacacaatgcatcgcggataagccagaggaaaagtcactttgcttccgtttggtttcccctgagcaccagtgccaacacccgctgacaacccgcctaacacgccaattatgttgctgctccgtggggaaggcgtggggcgcaaggtgccaaagatgtcccacagatggtacggccgctttcaaagaaatctgcccagcgggaaaggggtatcacatcctgacttcccaccagaccttgacgatccagggagaatctgattttagcttattcctgcatcctgacggcccccctaaaccgcaacagctgccagaatcaccgtctcaagctcccccacctgaagacactgaggaagaacggggcgtgacaaccgactctccagtgtcagaggagcgaagtgtccagcagtcgcaccctacagccactactactccagcacgtccataccctgaacttataagcagaccttccccaccgaccatgcggtggtttctccctgatctacctcctagccgcagcgcggtagaaattgccccaactcaagtcaccgagactgatgagtgccgacttaatcaaaacatttgtggtcacggcgaatgtgtacccggtccccctgactactcctgccattgcaaccctggataccgaagccatcctcaacaccggtactgtgtagatgtgaacgagtgcgaggcagaaccttgcggacctggcagaggtatatgcatgaatactggaggatcctataactgtcattgcaaccgaggataccgactgcacgtgggtgctggaggtcggagctgcgtggatctaaatgagtgcgcaaaaccgcacctgtgtggagacggggggttctgcataaatttccctggccattacaagtgcaattgctatcctggatatcgtctaaaggcatcacgacccccagtctgcgaggatattgatgagtgcagagatccctcgagttgcccagatggtaagtgtgagaataagcccggctcctttaaatgtattgcgtgccagccaggctatagatcccagggcggcggagcctgcagagacgtaaacgagtgcgcagaaggtagcccttgcagccctggatggtgcgaaaaccttcctggatcattccgctgtacgtgcgcccagggatacgcacctgctccagacgggaggagttgtttagacgtggacgaatgcgaggctggcgacgtgtgtgacaatggcatatgtagtaacacccccggctccttccagtgccaatgtttatctggttatcatctctcccgagacagatctcattgtgaggatatcgacgagtgtgatttccctgctgcctgtataggcggagactgcatcaatacaaacggctcctatcgctgcctatgtccccagggccaccgcctagtgggggggagaaagtgtcaagatattgatgaatgtagccaggacccttccctttgtctaccacacggcgcttgcaaaaatttgcagggatcttatgtttgcgtgtgtgatgagggattcactcccacccaggatcaacatggctgtgaggaagtggaacagcctcaccataagaaagaatgctatctcaatttcgatgacactgttttttgcgatagcgtgcttgctaccaatgttactcagcaagagtgttgctgcagcctaggagctggctggggagaccactgcgaaatctacccctgccctgtgtactcttctgccgaattccattctctctgcccagatggaaaaggatatactcaggataacaacatcgttaattatggaatcccggcccatcgcgatatagatgaatgcatgctgtttggatccgagatctgtaaggagggaaaatgcgtgaacactcagcccggatacgagtgttattgtaaacagggattctactacgatggcaatctgctagaatgtgttgacgtggatgaatgtctggatgagtcaaattgtaggaatggcgtttgtgagaatactagaggcggatataggtgtgcttgtacccccccagccgaatattcgcccgcgcagcggcagtgtctgagccctgaagaaatggaaagagcgcccgagcgacgtgacgtgtgttggtcccagagaggtgaggacggaatgtgtgccggccccttggctggacctgcgttaacgttcgatgattgctgttgccgccagggccgtgggtggggcgcccagtgcagaccatgtccaccacgcggcgccgggtcacactgtcctacaagccagtccgagtctaacagcttctgggatacttcccctctgctattaggaaagcctcccagagatgaggacagcagtgaggaggattcagatgagtgcagatgcgtgtccggccgctgtgtgcctagacccggcggagccgtgtgcgagtgcccagggggatttcaattagatgcctctcgggcacgttgcgtggacatagacgaatgcagagagctcaaccagcggggactattatgtaaatccgagagatgcgtaaacactagcggtagcttcagatgcgtatgtaaggcagggtttgcaaggagtagaccacatggcgcctgcgtcccccagcggcgaaggtag

SEQ ID NO: 248913 - RNA, 921 nt, synthetic construct
  misc_feature 1..921: note = Description of Artificial Sequence: Synthetic coding sequence
  source 1..921: mol_type = other RNA
atgctctttggttcggaaatctgtaaggaaggaaagtgcgtaaacacccagccagggtatgaatgctactgtaagcaagggttctactatgatggaaatcttttagagtgtgtcgatgtagacgaatgcttagacgagtcgaattgtaggaatggtgtctgtgagaacacccgtggtggctatagatgcgcttgtacccccccagccgaatactcccccgcccagcgacagtgtctgtcacctgaagagatggacgtggatgaatgccaggaccccgctgcctgtcgacccggtcgttgcgtcaatctgcccggatcttatagatgcgagtgccggccaccttgggtccccggcccttctggacgtgattgtcagctgcctgagtcccccgcagagcgtgctcctgaaaggcgcgacgtttgctggtcccagcgaggcgaggacggaatgtgtgcgggccctctggccggccctgcattgacatttgatgactgttgctgtcgccaaggaagaggttggggcgctcagtgcaggccctgcccccctagaggcgccggaagtcattgccccaccagtcagtcagagtcaaactcattttgggacacctcacctttactgttgggcaagccccctagagatgaggacagcagcgaagaagacagtgacgaatgcagatgtgtctctggaagatgtgtgcctaggcctggtggcgccgtttgtgaatgtccaggaggttttcagctggacgcctcgagagctcgttgtgtggatatcgacgagtgcagggagttaaatcagagagggctattatgcaaaagtgaaaggtgcgtgaatacctccggatctttcaggtgtgtatgtaaagccgggtttgctcgatcccggccccatggcgcctgcgtacctcaacgtcgccgctag

SEQ ID NO: 248914 - RNA, 3414 nt, synthetic construct
  misc_feature 1..3414: note = Description of Artificial Sequence: Synthetic coding sequence
  source 1..3414: mol_type = other RNA
atgacgttgattggagaaaacggtcattccacggataccctcaccggttcaggttttagagtcgtagtatgcccattgccttgtatgaatgggggccaatgtagctctcggaaccaatgtctatgtcccccggattttacaggtcgcttctgtcaggttcccgcaggtggagccgggggcggcacagggggatctggtcccggactgtccagaacgggtgccctctccaccggtgccctccccccactggccccagaaggggacagcgtcgcctctaaacatgcaatctatgcagtgcaggtaatcgctgaccctccaggtcctggagaaggaccaccagcacaacacgctgctttccttgtgcctcttgggcccggccagatctccgctgaagtgcaggccccgccgcctgtggttaatgttagggttcaccatccacccgaggcctctgtccaggtacaccgcatcgagtcatctaacgcagagtcagctgcccctagtcagcacttactgcctcatcccaagcctagccatcccagaccaccaacgcaaaagcctttagggcgatgtttccaagacacacttcctaaacaaccctgtggctctaacccattaccaggcctaaccaaacaggaagattgttgtggctccatcggaactgcctggggtcagtccaagtgtcacaaatgccctcagctacagtataccggagtccagaaaccaggtcctgtgcgcggtgaagtgggcgcagactgccctcaaggctacaaacgtctgaattctacccactgtcaggacattaatgaatgtgccatgcctggagtatgtcgtcatggcgactgtttaaacaaccccggctcatatcgttgtgtatgtccgccgggtcactccctcgggccgtccaggactcagtgtatagccgacaaaccagaagagaaaagcctctgcttccgactcgtgagccctgaacaccagtgccaacatcccctgaccacaagactaaccagacaactatgttgctgcagcgtcggcaaggcatggggagctcgatgccagcggtgcccaactgatggaactgccgccttcaaagagatttgccctgcaggaaagggatatcacatcctcactagccaccaaactttgactattcaaggtgagagtgatttttcattgtttttgcacccggacggtccccctaagccacagcagttaccggagtccccgtctcaagcacctccccccgaagacacagaagaagagcgaggggttactacagactcccccgtcagcgaagaacgatcagtgcagcaaagtcaccccacagccaccacaactcctgcacgcccctatcctgaactgattagccgaccatcccccccgacgatgagatggtttctgccagatcttcctcctagtcgcagtgccgttgagatcgcaccaactcaggttacagaaaccgatgaatgcagactcaaccagaatatctgcggccatggcgagtgtgtgcctggcccccctgactacagctgtcactgcaaccccggatacagaagccacccccagcaccgatactgcgttgatgtgaatgagtgtgaggccgaaccttgtgggccaggtcgaggaatctgcatgaacacaggagggtcctataactgtcactgcaaccgggggtatagattgcacgtgggtgccggagggagaagttgtgtagacttaaacgaatgcgccaaaccccacctttgtggagacggcggattctgtattaattttccgggtcactacaaatgtaattgctaccctggctatagactgaaggctagcagaccaccagtctgtgaggatatcgatgagtgcagagacccaagtagttgccccgatggaaagtgtgaaaacaaaccaggctcttttaagtgcattgcatgccaaccaggctacagatcccagggcggcggcgcttgtcgtgacgtcaatgaatgtgctgaaggctctccctgttcccccggctggtgtgaaaatcttcccggcagttttagatgcacctgtgctcaagggtatgctcccgctcccgatggacgttcatgtctggacgtggacgagtgtgaggcgggcgatgtttgtgataatggaatctgtagtaatacccctggatcctttcagtgtcagtgcctcagcggataccatctgtcaagagataggagccactgtgaagacattgatgagtgtgacttcccagccgcctgtatcggtggcgattgcatcaataccaacggttcttaccggtgtctctgtccccagggccacagacttgtgggcggccgaaaatgtcaagatatcgacgagtgtagccaagacccctctctctgtctcccgcacggcgcatgtaaaaatctgcaaggatcctacgtgtgtgtgtgtgacgaaggatttacacccacccaggatcaacatggctgcgaggaggtggaacagccccaccataagaaggaatgttacctcaactttgatgacaccgtgttctgcgactccgttttggcaaccaatgtgacacaacaagaatgctgctgttctctgggcgccggctggggtgaccattgcgaaatttatccatgcccagtgtattcttccgccgaatttcactccctctgccctgacgggaaaggctatacgcaggataacaacatcgttaattacggaatcccggcccacagagacatcgatgagtgcatgctgttcggatctgaaatttgcaaagaagggaagtgtgtgaatacgcagcctggctatgagtgctattgtaaacaaggcttttactacgatggaaacttgctagagtgtgttgatgtcgacgagtgcttggacgagtcaaactgccgtaacggcgtgtgcgaaaacactagaggaggctacagatgtgcctgtacccccccagctgaatatagtccggcccagaggcaatgcctgtcacctgaagagatggacgtggacgagtgtcaggatccagctgcttgtcgtcccgggagatgtgtgaatctgcccgggtcttatcgctgcgaatgcaggcccccttgggttcccggcccttctggtcgcgactgccaactgcctgaatctccagcagaacgagcccccgaaagacgtgatgtgtgttggagccagaggggtgaggacggcatgtgcgccggcccccttgctggaccagcactcacctttgacgattgctgttgtagacagggccgtggatggggcgcacaatgtagaccatgtccccctagaggcgctgggtctcactgtcctacaagccagtctgaaagtaatagtttctgggacaccagccccttactattaggaaagccgccacgagatgaggattctagcgaagaggactctgatgaatgtaggtgcgtttctggctag

SEQ ID NO: 248915 - RNA, 2202 nt, synthetic construct
  misc_feature 1..2202: note = Description of Artificial Sequence: Synthetic coding sequence
  source 1..2202: mol_type = other RNA
atgcctgccgaaactgatgagtgccggttgaaccagaacatttgcggccacggagagtgtgtacctggcccgccagactacagctgtcactgtaatccaggatacaggtctcacccacagcatcgctattgcgtggatgtcaatgagtgtgaagcagaaccttgcggtcccggacgcggtatatgtatgaacaccggcgggagctataactgccactgtaatagagggtacagattacacgttggagcgggcgggagatcatgcgtggacctaaacgagtgtgctaagcctcacctctgcggcgatggaggcttttgcattaattttcccggacactacaagtgtaattgctacccaggttacagactcaaggcgtccagacccccagtgtgtgaagatatcgatgagtgtagagatccgtcttcctgcccggatgggaagtgcgaaaataagccaggtagttttaagtgtatcgcttgccaacctggatatagatctcagggcggtggtgcgtgtagagacgtcaacgaatgcgcggaagggtctccttgctcaccaggttggtgtgagaacctgcctggaagcttccgctgtacgtgcgcccaggggtatgctcccgcacctgatggaagatcatgcctcgatgttgatgagtgcgaggccggagatgtgtgtgacaacggaatttgcagcaacacaccagggtcgtttcagtgccagtgtctctctgggtatcatctaagtagagataggtctcactgcgaagatatcgacgagtgcgatttccctgccgcttgtatcggcggagactgtatcaatacaaacgggagctataggtgcctctgcccccagggacacaggctagtcggcggccgtaaatgtcaagacatcgatgagtgttcccaggatccctcgctttgtcttccgcacggtgcttgcaagaacctacagggatcatacgtctgcgtttgcgacgaaggctttactcccacacaagaccagcacggttgtgaggaggtggaacagccacaccacaagaaagagtgctacctcaattttgacgataccgtattttgtgacagtgtgctcgcaacaaatgttacacaacaggaatgttgttgctctcttggcgccggatggggagatcactgtgaaatttacccctgccccgtctattcatccgctgaatttcattcattatgtcccgacggtaaaggctacactcaggataacaatatcgtgaattatggaattccggcccaccgcgatatagatgagtgtatgctgtttggttccgagatctgtaaggagggcaaatgcgttaacacccagccaggatacgaatgttattgcaaacagggtttttactatgatggcaacctactagagtgtgtggatgttgatgaatgtctggacgagtccaattgcaggaacggagtctgtgagaacacaagagggggttaccgatgcgcttgcactccccctgctgaatattcccctgctcagagacaatgcctcagtccagaggaaatggatgtcgacgagtgccaggaccccgctgcatgcaggcctgggagatgtgtgaatctccctgggtcatatcgctgtgaatgcagaccaccgtgggtccccggaccatcaggtcgagattgtcagctacccgaatctcctgctgaaagagccccagaacgaagggatgtctgctggtcgcagaggggtgaagatggtatgtgcgcagggcctttagccggacccgcactgactttcgacgattgttgctgccggcaaggtaggggttggggagcccagtgccgaccctgcccgcctcgcggtgccggcagccactgcccaacatcacagtccgagtctaactctttctgggacacttcccccctgcttttaggaaaacccccccgcgatgaagattcttccgaagaggactcagatgagtgtagatgcgttagcggacgatgcgtgccaagacccggcggagctgtttgcgaatgtcccgggggattccaactggacgcgtccagggcgaggtgcgtggatatcgatgaatgccgagagctgaaccagcggggacttttatgtaagtcggaaaggtgtgtgaatacctctggttcattccgctgcgtgtgcaaagccggattcgcccgcagtagaccccacggagcctgcgtaccacagagaaggcgatag

SEQ ID NO: 248916 - RNA, 2649 nt, synthetic construct
  misc_feature 1..2649: note = Description of Artificial Sequence: Synthetic coding sequence
  source 1..2649: mol_type = other RNA
atgaccctcataggagagaatggacactctactgacactctgacagggagcggcttccgggttgccgacaagccggaggaaaaatcactctgtttcagactcgtgtcccccgagcaccaatgccagcacccactaactaccagattgaccagacagttgtgttgctgctcagttggcaaagcatggggcgcaagatgccaaaggtgtcctactgatggaaccgctgcttttaaagagatatgtcctgcaggaaaaggctaccacatcctcacctcccaccaaacgctcactattcagggggagtcagatttttctttgtttctccaccctgatggccctccaaaaccccagcagctgcctgagtctccgtctcaagctccccctcccgaagacacagaggaggaaagaggagtgactactgattcacccgtatccgaagaacgcagcgttcagcagtctcatcccaccgccacaactactcccgcacgcccatacccagagctcatctccaggccctccccccctactatgaggtggtttttaccagacctgccaccctcaagaagcgcagttgaaattgcacctacgcaggtaacagagacggacgagtgtcgacttaatcagaacatctgcggccatggagagtgtgttcccggacccccagattacagctgtcattgtaacccaggttatcgttcacaccctcagcatcgatattgtgtagacgtgaatgaatgtgaagcagaaccttgtggccccggaagaggaatctgtatgaacaccggaggctcctataattgtcattgtaaccgcggctacaggttacacgtaggtgccggcggacgctcctgtgtagaccttaatgagtgtgccaagcctcacctgtgtggcgacggagggttctgtatcaatttccccggccattacaagtgtaactgctaccccgggtatagattgaaggcctcacgtccacccgtctgcgaagatatagatgagtgtcgcgacccatccagctgccccgatggcaagtgtgagaataaacccggctcctttaaatgcatcgcgtgccaacccgggtatcgctcccaaggggggggggcatgtcgcgacgtgaacgaatgcgcagaaggatctccatgtagccccggctggtgtgaaaaccttccaggttcctttcgttgtacctgtgcacaaggatatgccccagccccagacgggagatcatgcttggatgtggacgaatgtgaggcaggcgacgtatgtgataacgggatttgttcaaatactccagggagctttcaatgtcagtgcctttctgggtaccacttgtcccgcgatcggagccactgtgaagatatcgacgaatgcgactttcccgcagcatgcatcggaggagattgtattaacactaacgggagttacagatgtttatgccctcagggacacagactggtgggtgggcgtaaatgccaggacatcgatgagtgtagccaggatccatctctctgtttacctcacggggcatgcaagaatcttcaaggatcttatgtttgtgtttgcgatgagggtttcacaccaacacaggaccaacacgggtgcgaggaggttgaacagccacaccataaaaaagaatgctatctgaacttcgacgacactgtattctgtgactctgtgctcgccactaacgttactcagcaagaatgttgttgttccctcggagccggatggggcgaccactgtgaaatctacccgtgtccggtatactcttctgccgagttccattccttgtgtcccgatggcaagggctacacccaggataacaatatcgtaaactacggcatcccagcccacagggatatcgacgaatgcatgctcttcggatctgagatatgcaaagagggaaagtgcgtgaatacccagcctggctacgaatgttattgcaaacaggggttttactatgatgggaacttgctcgaatgtgtagacgtggatgaatgtctggatgaaagtaactgtagaaacggagtgtgcgagaatacacggggaggctacaggtgtgcttgcaccccgccagccgaatatagtccagcacagaggcaatgcctgagccctgaggagatggaacgagcacctgagagacgtgatgtgtgctggtcacagagaggagaggatggcatgtgcgccgggcccctcgctggcccggccctgacatttgacgactgctgctgccgacagggtaggggatggggtgctcagtgccgcccttgcccaccccggggtgcgggctctcattgtcctacctcccagagtgaaagtaactctttctgggacacgtcgccactactgttggggaagccaccgcgtgacgaggatagctcagaagaagacagcgacgagtgcagatgcgtgtccggcagatgcgtccccagaccgggcggtgcggtatgcgaatgcccaggaggattccagttagacgcttcacgagcccgttgtgtggatatcgatgagtgcagggagctgaaccagagaggattgctgtgtaaatcggagaggtgtgtaaatacttctggaagcttcagatgcgtgtgtaaagctggatttgcacgatctcggccacacggtgcttgtgtaccacaaagaagacgttag

SEQ ID NO: 248917 - RNA, 2127 nt, synthetic construct
  misc_feature 1..2127: note = Description of Artificial Sequence: Synthetic coding sequence
  source 1..2127: mol_type = other RNA
atgcgggaacgaatatgggccccacccctgttgcttttgcttcctcttcttctgccacctcctttatggggaggcccccctgattcaccgaggagagaactcgaactggaaccaggtcctctgcaaccttttgatcttctgtatgcatcaggcgctgctgcttactactcaggcgactacgagagagctgtgcgcgacttagaggcagccctccgtagccatcgccgacttcgcgagatccgaacccggtgcgcaagacattgtgccgcaagacaccccctccctcccccaccccctggagaaggtccaggtgccgaactgccactcttcaggtcgctcttaggacgagccagatgctaccggagctgcgagactcagcgattgggagggccagccagcaggcaccgcgtgtcagaagacgtgcgaagtgattttcagcgtagagtgccatataactatctgcaaagagcatacattaagctgaaccaactagagaaggccgtggaagcagctcacacattctttgtcgctaacccagaacatatggagatgcaacagaacatcgagaactatcgcgcaactgcaggcgttgaggccttacagttagttgaccgagaggctaaacctcatatggaatcatataacgccggtgtgaagcactatgaagcagacgacttcgagatggcaatcaggcactttgagcaagcactgagagagtacttcgtggaagacacagaatgtagaaccctgtgtgagggacctcaacgattcgaagagtatgaatacctggggtacaaagcagggctctatgaagccattgctgatcattacatgcaggtccttgtgtgtcagcatgaatgtgtgcgtgagctagctacgagaccaggaaggcttagcccaatagaaaacttcctgccgttgcactacgattatcttcagtttgcctactatagagtgggtgagtatgtaaaggctcttgaatgcgctaaagcctacctcctttgccacccagatgacgaagatgtgcttgataatgtcgattactacgagtccctgctggacgatagcattgacccagccagcatcgaagcaagagaggaccttacgatgttcgtcaaacgccataaactcgagagcgaactcattaagtctgcagctgagggcttaggcttttcttataccgaaccaaactactggattaggtacggtggccgacaagacgagaaccgggttcctagcggggtgaacgtggaaggtgctgaagtgcacgggttttcaatgggcaaaaagctgagtcctaaaatagaccgagacctaagagaggggggcccactgctatatgaaaatattacgttcgtctataactctgagcaactcaacggcactcaacgggttctactagacaatgtgctatccgaggaacaatgtagagaacttcactctgtggcctctggtattatgcttgtgggcgatgggtatcggggaaaaacgtctcctcacacaccaaatgaaaaattcgaaggtgccactgtactgaaagctctgaaatctggctacgagggcagggttcccctcaagtccgccagattattttacgatatctctgagaaagcccgcagaatcgttgaaagctatttcatgttaaactccaccctgtacttctcctatacgcacatggtctgtcgtaccgcactgagcggtcagcaggaccggcgcaacgatctcagccaccctattcacgccgataactgtttactcgaccccgaggccaacgagtgctggaaagaacccccagcatatacattccgagattatagtgctttgctatacatgaacgatgactttgagggtggcgagtttatattcacagagatggacgcaaagaccgtgacagcgagtattaaacccaaatgtggccggatgatctcattcagttcaggcggggagaacccccacggcgtcaaagccgtgacaaagggaaaaagatgtgcagtcgccctgtggtttacactggaccctctctatcgggaactggaaagaattcaggcagatgaagtcattgccatcttagaccaggagcaacaaggcaagcatgagctgaacataaaccctaaagatgagctgtag

SEQ ID NO: 248918 - RNA, 1584 nt, synthetic construct
  misc_feature 1..1584: note = Description of Artificial Sequence: Synthetic coding sequence
  source 1..1584: mol_type = other RNA
atggagatgcagcagaacatagagaactatcgcgctaccgcgggcgttgaggccctgcagcttgttgatcgagaagccaagccacatatggaaagctataacgcaggagttaaacactacgaagcagatgattttgaaatggcgattagacactttgagcaggcactgagagagtattttgtagaggatactgaatgcaggacattgtgcgagggcccacagcgtttcgaggaatacgagtacctgggttacaaggcggggctgtacgaggccattgctgatcattacatgcaggtgttagtgtgccaacatgaatgcgttcgagaactcgccactaggcccggacgtttaagtcctattgagaactttttgccgctgcactatgactacttgcaattcgcctattatcgggttggtgaatacgtgaaggcgctggaatgtgcaaaggcctacctgctgtgccaccccgacgacgaggacgttttggataacgttgattattacgaatcccttctagacgactcaattgatcccgctagtatcgaggcccgcgaagacctgacaatgttcgtcaagaggcataagttggaatcagagctcatcaagtccgccgcggaaggcttaggtttctcatatactgaacccaattactggattagatacggtgggagacaagatgagaacagagtccccagcggagtcaacgtggagggcgccgaagtgcacggatttagtatgggaaagaagctgtcaccaaaaatcgatcgagatctgagggaaggagggcctcttctgtatgagaacatcaccttcgtgtataacagcgaacaactaaatggaacacagcgcgtactgctggacaacgtcttgagcgaggaacagtgcagagaactacactccgtggcaagcgggattatgctggttggggacggctacagagggaaaacaagtccgcacactccaaatgagaagtttgaaggagccactgttctcaaagcgctgaaatctggctacgagggacgtgtacccctgaaatccgcacgccttttttacgatattagcgaaaaggcacgcagaattgttgagagttactttatgctgaacagcacattatactttagctacacgcacatggtatgtcgcaccgcgttatctggacaacaagaccgacgaaacgatctctcccacccgattcatgccgataactgcttgttagatcccgaagccaacgaatgttggaaggagcccccagcatatacctttagagactatagcgccctgctgtatatgaacgacgattttgagggaggggaattcatatttactgaaatggacgctaagaccgtgaccgctagtattaagccgaagtgtggacggatgataagcttctctagtgggggagagaatcctcacggggtaaaggccgtgacaaaaggcaaacgatgcgcagtggccctgtggttcactctggatccattatatcgagagctggagcggatacaggccgatgaagtcattgcgattttagaccaagagcagcaaggtaagcacgaactaaacatcaaccctaaagacgaactctag

SEQ ID NO: 248919 - RNA, 4614 nt, synthetic construct
  misc_feature 1..4614: note = Description of Artificial Sequence: Synthetic coding sequence
  source 1..4614: mol_type = other RNA
atgaccaccaagagaaagataattggtagactggtgccttgcagatgcttcagaggcgaagaagagatcatttcagttctggactattctcattgttcactgcaacaagtacccaaggaggtgttcaattttgagcggacactcgaggagctctatcttgacgctaaccagatcgaagagttgccaaaacagttattcaattgccaggcgctccgcaagttatccatccctgataacgatcttagcaacctgcctactactattgcctcacttgttaacctgaaagagctcgacataagcaaaaatggggttcaagagttccctgaaaacatcaaatgctgcaaatgcttgaccattattgaagcctccgtgaatccaatctcaaaactgccagatggctttacccagttactcaatctgacccagctgtacctcaacgacgctttcctcgaattccttcccgccaatttcggcaggttggtgaagctgagaatcttggagttgagggagaatcatctaaagacattgcctaagagtatgcataagcttgcccaactggaacgactcgacctaggaaacaatgaatttggagagttaccggaggtcctcgaccagatccaaaaccttcgggaactgtggatggacaataacgccttgcaggtcttgccaggatcgatcggcaaactgaaaatgctcgtatatttggatatgtcaaagaatagaatcgagacagttgatatggacatcagcggctgtgaggctcttgaagatctgctgctctcatcgaacatgctccagcagctaccagacagcatcggcctcctgaaaaagcttactaccttgaaagttgacgataaccagctcacgatgttgcccaataccattggtaatctttcactgctagaagaatttgattgcagttgcaacgagttggaatccctcccatcaactatcggctacctgcactccctacgtaccctggcagttgatgagaactttttgccagagctcccccgcgagatcggctcttgtaagaatgttacagtgatgagtctcagatctaataagttagagtttctcccagaagagatcggtcagatgcagaaattgcgggttcttaatctatccgataacagacttaaaaatttgcccttttcatttacaaagctcaaagagcttgccgctttatggctgtccgacaaccagtctaaagctctgattcccctgcagactgaagctcaccccgagactaaacaaagagtgctgacaaattatatgtttccgcaacaacctagaggcgatgaggattttcagagcgattcggactcatttaatccaacactttgggaggaacaaaggcagcagaggatgacagtcgcttttgagtttgaagacaagaaagaagacgatgaaaacgcaggtaaagtcaaggacctgagttgtcaagcaccctgggagcgtggccaacggggaatcaccctgcaacctgcaagactgtcaggagattgttgcactccttgggccagatgcgatcagcagatacaggatatgccggtcccccaaaatgatcctcagttggcatggggttgtatttccggattgcagcaagagagatccatgtgcactccactgcccgtcgccgctcagagcaccaccctgccctccctcagtggccggcaagttgaaataaaccttaaacgatatcctactccatacccagaggatctgaagaacatggtaaaaagcgtacagaatcttgtgggcaagccttcccatggtgtgagagtcgagaattctaacccgactgcaaataccgaacaaactgtgaaggaaaaatacgaacacaagtggccagttgctccaaaagagattactgtggaggactcttttgtacatcctgctaacgagatgcgaatcggtgagttgcatccctccttagcggagacccctctttaccctcccaaactcgtcctgctcggcaaagacaaaaaggaatccactgatgagtcggaagtggacaagacacactgcctgaataacagcgtcagctctggaacatacagcgactattccccatcccaggcctcttcaggaagctctaatacccgagtcaaggttggatcactgcagactactgcaaaggatgccgtgcacaactcattgtggggcaacaggatcgctccaagcttcccacagcctctggactccaagccacttcttagccaacgtgaagccgtcccaccaggtaacatccctcaacgccctgaccgtttgcccatgagcgacacctttactgacaactggacagatgggagtcactacgataacacagggttcgtggccgaggagacaaccgccgaaaatgcgaacagcaaccccttactctcttccaaaagtcgcagtacaagctcgcatggacgcagacccctaattcggcaagatcgtatcgtaggcgtacctttagaactcgagcaaagcacccacagacacacgcccgaaaccgaagtccccccttctaatccttggcagaactggacgcggactcccagtccattcgaggacagaacggccttccccagcaagctagagacaacaccaacaacttcccctctgcccgagcgaaaagaacatattaaggagagcacggaaatcccatcgcctttcagtccaggcgtcccttgggaatatcacgattcaaaccccaaccgcagcctttcaaatgtgttctcgcagatacattgcagacctgagtcttcaaagggtgtcatctcaatctcgaaatcaacagaacggttatctcctttaatgaaggacatcaaatcaaataagttcaaaaagtcccagtccatcgacgaaatcgacatcggcacttacaaggtttacaacattcccctagagaactacgcatcaggatctgaccacttaggtagtcacgagcgtcctgacaagatgctgggtcctgaacacgggatgtcaagcatgtcaagaagccagtcagtgcccatgttggacgacgagatgcttacatacggaagcagtaaaggcccccaacagcagaaagcctccatgactaagaaggtttatcagtttgaccagtcatttaaccctcagggatccgttgaagttaaagcagagaaaagaattcccccgcccttccaacataaccccgaatatgtccagcaggcctccaagaatatcgcaaaggatttgatttcccctagagcatacagaggctatcccccaatggagcagatgttttccttctcccagcccagtgtcaatgaggatgccgtagttaatgctcagtttgcctcacagggagctcgtgccggctttctgcgtcgcgcagacagtctggtctccgcaaccgagatggcaatgttcagaagagtcaatgagccccatgaattgcctccaaccgaccgatatggcaggcccccgtatcgaggcggattggaccgccaaagtagtgtgaccgttaccgaatcacagtttctgaaacggaatggccgatacgaggatgaacacccctcctaccaggaagtgaaagctcaggcaggctccttccccgtgaagaacctcacccagagacggcccttatcagccagatcttactcaaccgaaagctacggagcaagccagacacggccagtgtcagctagacccacaatggccgccttactcgagaagatcccatctgactacaacttaggtaactatggcgataagccttccgacaactctgacctgaaaacacgccccacacctgtgaaaggagaagagagctgcggcaagatgcccgccgattggcgtcagcagctccttaggcacatcgaagctcgaagacttgatcgcaatgcagcctataagcacaacaccgtgaatctcggaatgctcccttatggaggcatctccgcgatgcacgctggccgcagcatgactctcaatcttcagactaagagcaaatttgatcaccaggagcttcctctgcagaaaaccccaagccagcaatcaaacattctggataacggccaagaagatgtgtcccccagcggtcaatggaacccttacccactgggaagaagagatgtgccccctgatacaatcactaagaaagctggaagtcacatacagaccctgatgggaagtcagtctttacaacatcgcagcagagagcagcaaccttacgaagggaatataaacaaggttacaatccaacagttccaatctcctttacctatacagatcccatcctctcaggctacgcgcggcccccagcccggacggtgtctaatccagacaaaaggacagaggtccatggacggctacccggaacaattctgcgtgcgcattgaaaaaaacccaggcctcggtttctctatttcaggcggcatctctggacagggcaacccttttaaaccttccgacaaaggaatttttgtaacgagagtgcagccagacgggcctgcctcaaacctcttgcagcctggcgacaagattctccaggccaatgggcattcattcgtgcacatggaacatgaaaaagctgtacttctattgaaatcattccaaaatactgtagacctcgtcattcagagggaactcaccgtctag

SEQ ID NO: 248920 - RNA, 1320 nt, synthetic construct
  misc_feature 1..1320: note = Description of Artificial Sequence: Synthetic coding sequence
  source 1..1320: mol_type = other RNA
atgactcctattctgacagtgctgatatgtctcggactatcacttgacccccgaacccacgtccaagcaggccccttgccaaagccaacattgtgggcagaacctggatcagtgataactcaaggatctccggtgacattgagatgccaagggtccctagagacacaagaatatcacctgtatcgggagaaaaaaaccgcgctttggattacccgaatccctcaagagctggtcaaaaaggggcagtttccgattctgagcatcacatgggaacatgccgggagatactgttgcatttacggctctcacacagctgggctcagtgaaagctctgacccactggaactcgtagtgacaggcgcatattcaaagcccaccctgtcagccctcccttccccagtagtgacctccggcggcaacgtgaccatccagtgtgactctcaagtggcctttgacgggtttattctctgtaaagaaggtgaggatgagcacccccagtgccttaatagccactcccacgctagaggcagctccagggcgatcttttctgtagggcccgtgtcaccaagtagaaggtggtcatatcggtgctatggctacgacagccgcgcaccttacgtttggtccctccccagcgatctgctaggactcttggtgccgggcgtttccaagaagccatccctatcagtgcaacccggacctgtggtcgcccctggagaaaagcttacgtttcagtgcgggagtgacgccggatacgatagattcgtcctttataaagagtggggaagggactttctgcagcgacctgggcgtcagccacaggctggcctgtcacaggcaaactttacattaggtcccgtcagtcgatcctatggtgggcagtatacatgctctggtgcttataacctgagctcagaatggtcagccccctctgaccccttggatattttgataaccggacagatccgcgcgcgcccctttctttccgtaagaccgggcccaacagtagccagtggcgaaaatgtgaccttgctgtgtcagagtcagggcgggatgcacaccttcttgttaacaaaggagggagcggccgatagccccctccgtcttaaatcaaagcgacaatctcacaagtaccaggcagaatttcccatgtcacctgttacaagcgctcatgctgggacctaccgctgttatgggtctctcagctcgaatccttacttgttaacccacccatctgacccactggaactcgtagtgtccggcgccgctgaaactctaagtcccccccagaacaaatcagatagcaaagctggagaatag

SEQ ID NO: 248921 - RNA, 1371 nt, synthetic construct
  misc_feature 1..1371: note = Description of Artificial Sequence: Synthetic coding sequence
  source 1..1371: mol_type = other RNA
atgcaccgaggattaatccaccctcaatcaagcgcagtcggcggagatgcgatgacacccattctcacagtccttatttgtctgggcctgtcactggacccccgcacacatgtgcaagccgggcctctgccgaaacctactctgtgggccgagccaggatctgtcatcacacagggctcccccgtgaccctaaggtgccaaggctccctggagacgcaggaatatcacctttatagagagaagaagaccgctttgtggatcacgcgaatcccccaggaacttgtcaagaaaggccagttcccgattttgtccatcacttgggaacacgccggccgctactgttgcatctatggatcacacaccgcaggcctctccgaatcttccgacccccttgaacttgtggtcactggggcatactcaaaaccaaccctgtccgctttaccgtcacccgtggtaacatcaggaggcaacgtcaccatccaatgcgactcacaggtggctttcgacggcttcatcttgtgcaaagaaggggaagacgaacaccctcaatgtctgaattcacactcacacgcacgcggtagcagccgagccatttttagcgtgggccccgtgtcacctagccgccgatggagttatcgctgctatggctacgattcccgggcaccatatgtctggtccttgccttccgatctacttggtctcctggtccccggtgtcagtaaaaagccgagtttatctgtccagccaggtccagtcgtggcaccgggtgagaaattgaccttccagtgcggttccgatgcgggctatgacagatttgtgttatataaagaatggggaagggatttcctgcaaagaccaggcagacagccacaggccgggctttctcaggccaatttcactcttggaccagtgtcaaggagctacggggggcaatatacatgtagcggagcttacaatctcagcagcgaatggagtgctccctctgaccctcttgatatactgatcacggggcagatccgggctagacccttcctcagcgtgcggccaggtcccacagtggctagcggcgagaatgtgacccttctgtgtcaaagtcagggcggcatgcatacctttctcctcacaaaggaaggagccgctgactcacctcttaggctcaagtcaaaaagacagtcacacaagtaccaggcagaatttcccatgagccctgtgacctctgcacacgctggaacataccgctgctatggctcactgagttccaacccctacctcctcactcacccctccgaccctttagagctcgtcgtcagtggcgctgccgagaccctttcccccccccaaaacaaatcagatagcaaggcaggtgaatag

SEQ ID NO: 248922 - RNA, 1098 nt, synthetic construct
  misc_feature 1..1098: note = Description of Artificial Sequence: Synthetic coding sequence
  source 1..1098: mol_type = other RNA
atggctaaggtcgccaaggatctgaatcccggagttaaaaaaatgagtctagggcagttgcagagtgctagaggcgttgcgtgtttgggatgcaagggaacctgcagtggatttgaacctcacagttggcgcaaaatttgtaaaagttgtaagtgtagccaagaagaccactgtctcacgtctgaccttgaggacgaccgtaagattggtaggctgttgatggattctaagtatagtacccttaccgcacgtgtgaaggggggagacggaatcagaatatataagcgcaatagaatgatcatgacgaatccgatcgctaccggcaaggacccaacatttgacactatcacatacgagtgggctcctcccggcgtgactcagaagctcgggttacagtatatggaacttattccaaaagaaaagcaaccggtgactggaactgagggagccttctacaggaggagacaactgatgcatcagctgcctatttacgaccaagacccaagccgatgcagaggcctgctggagaatgaactgaagcttatggaagaattcgtgaaacagtataaatccgaggccttaggagttggagaggtggccctccccggtcagggaggtctgccaaaggaggagggaaaacaacaggagaagcccgaaggagccgagaccaccgccgctaccaccaacggcagtttatccgatcctagcaaggaagttgaatatgtttgcgaactgtgtaaaggcgctgcaccacctgactcacctgtggtttactccgatcgtgcgggttataacaagcagtggcaccccacttgtttcgtctgcgcaaagtgctctgagccgctggtggatctgatttacttctggaaggatggtgctccttggtgtggtcgtcactattgcgagagcttgagacctagatgctccggatgtgatgaaatcatttttgcagaagactatcagcgcgtggaagatctcgcttggcatcggaaacattttgtttgcgaaggatgcgagcagctacttagtggcagagcatacatcgtgaccaaagggcagttactgtgccctacttgttctaagagtaaaagaagttag

SEQ ID NO: 248923 - RNA, 1602 nt, synthetic construct
  misc_feature 1..1602: note = Description of Artificial Sequence: Synthetic coding sequence
  source 1..1602: mol_type = other RNA
atggctttgaggaatgtaccttttcgcagcgaggtcctggggtgggatcccgattcactagccgattatttcaagaagcttaattataaagattgcgagaaggcagtgaagaagtatcatatcgacggagcacggtttctcaatctaacagaaaatgatatccagaagttcccaaagcttagagtcccaatcttatccaagctctcccaagagatcaacaagaacgaagaacgtcgcagcatattcacccgtaaacctcaggttcccagattccccgaggaaaccgagtcacatgaggaggacaacggcggttggagcagttttgaggaagatgattacgaaagccctaacgatgaccaggatggggaggacgatggcgactacgaatcccccaatgaggaagaagaagccccagttgaagacgatgccgactacgaacccccgccttctaacgacgaggaagctctgcagaatagcatactcccagcaaagccattcccgaactccaattcaatgtatatagatagacctccatctggcaagacacctcagcagccccccgtccccccccaacgccccatggctgcactaccaccaccacctgcaggcagaaatcattcacctttgccccccccacagaccaatcatgaggaacctagtaggtcacgcaatcacaaaaccgccaagctgccggccccttccattgaccgttcaaccaaacctcctttagaccgctccctcgctccatttgatcgtgagccttttacactcggcaagaagccaccatttagcgacaaaccctcaataccagccggacgcagtcttggagagcacctccccaaaatccagaagccccccctgccccccaccaccgagagacatgagcgatccagtcccctcccaggaaaaaaaccgcccgttccaaaacacggatggggtccagacagacgcgagaacgacgaagacgatgtgcatcagagaccactgccccagcccgccctcctgcccatgtcttctaatacttttccttccaggtcaactaaaccctcacccatgaatccactgccctcctctcatatgcctggggctttttcagaatccaactctagctttcctcagagcgccagtctcccaccatatttttctcagggtccctctaatagacccccaattcgcgcggaaggccgcaacttccctctcccgctgccgaataaacctagaccccctagtcctgccgaggaggagaattcgctgaacgaagaatggtacgtgtcttacatcacccgacccgaagctgaggctgccctgcggaagatcaatcaggatgggacatttctagttagggacagcagcaagaagacaaccaccaacccttatgtactgatggtattgtacaaagataaagtttacaatattcagattagatatcaaaaagagtcacaagtttatctgctcggaaccgggttgcgcggaaaagaagatttcctatctgtgtccgacataattgactatttccgtaaaatgccgcttctgctcattgacgggaaaaatagaggctcccgctaccaatgcacccttactcatgctgctggctacccatag

SEQ ID NO: 248924 - RNA, 1356 nt, synthetic construct
  misc_feature 1..1356: note = Description of Artificial Sequence: Synthetic coding sequence
  source 1..1356: mol_type = other RNA
atggaacaatgggatcacttccataaccagcaggaggataccgattcatgttcagagtcagtgaagttcgacgccagatccatgaccgcattgctaccacccaatcccaaaaattcgcccagcctccaggagaaactaaaatcttttaaggctgctcttatcgccctttacttattggttttcgccgttctaattcctctgatcgggatcgtggccgcacaacttcttaaatgggagacaaagaactgttctgtttcgagcacgaacgccaacgatattacgcagtcacttaccggaaaggggaatgactccgaggaggaaatgcggtttcaagaggtgttcatggaacacatgtcgaatatggaaaaacggattcagcacatccttgatatggaagccaacctgatggatacagagcacttccagaatttttctatgacgacagaccaacgatttaatgacattttactacaattatcaactctgttttcatctgttcaaggccatggcaacgcgatcgatgagatatccaagtccttgatttcgctcaacacgactcttttagatcttcaacttaatatcgagaaccttaacggcaagattcaagagaatacatttaagcagcaggaagagatctcaaagctggaggaacgggtgtacaatgtgtctgcagaaattatggccatgaaggaagaacaagtgcatctggaacaggaaatcaagggggaagtgaaagttctgaataatatcactaatgatctgaggctcaaagattgggaacatagccagacactgcgaaacatcacattgattcagggcccccccggaccccccggcgagaaaggtgatagaggcccaacgggagaatcaggccccagaggatttcccggcccaattgggccccctggtcttaaaggtgatagaggcgccattggatttcccggctccagagggcttcccgggtacgctggcagaccaggcaatagtggtcccaaaggacagaaaggagagaaaggatcgggaaatacactgaccccttttactaaggtacgtctggtggggggatctggaccgcatgaaggccgagttgaaattttacatagtggccaatggggcactatctgcgacgatcgctgggaggtcagagtgggccaggtcgtttgtaggtctctggggtatccaggagttcaggccgtacataaggccgcccattttggacagggaaccggacctatatggctgaacgaagtgttttgcttcgggagagaatcttctattgaggaatgtaaaatcagacaatggggtactcgggcatgcagtcattcagaagatgccggagttacgtgtactctctag

SEQ ID NO: 248925 - RNA, 1167 nt, synthetic construct
  misc_feature 1..1167: note = Description of Artificial Sequence: Synthetic coding sequence
  source 1..1167: mol_type = other RNA
atggagcaatgggatcattttcataaccagcaagaagacaccgacagctgttccgagagtgtcaaatttgatgctcgatctatgaccgcgctactcccccccaatcctaagaattcaccctccctccaggagaagctcaagtcatttaaggccgctctgatcgccttgtacctcctcgtttttgccgtgctaatccccctgatcggtatagtcgccgcacaacttctcaagtgggaaaccaagaactgctctgtaagcagcacaaacgctaatgacatcacacagtccttgacgggcaaaggcaacgattctgaggaagagatgcggtttcaagaggtattcatggagcacatgtctaacatggaaaaaagaatccagcacatactagatatggaagcaaatctgatggacaccgaacacttccaaaatttttcgatgaccactgatcagaggttcaacgacattctcttacagctatccaccctcttcagctctgtccagggacatggcaacgctatcgacgaaatctcaaaaagcctgatttccctaaatactacgttactggatctccaattgaatattgaaaatctcaatggtaaaattcaggagaatacattcaaacaacaggaggaaattagtaaactagaagagagggtctataacgtgtcagcagagatcatggctatgaaagaagagcaagttcacctagagcaggagattaaaggggaagtaaaggtcttaaataacatcactaacgacctccgcttaaaagattgggaacattcgcagactctgagaaacattaccctgattcagggcccacccgggcctccaggcgagaaaggggacagggggcccacaggcgaatctggaccccgcggattccctggacccatcggcccgcccggcctgaaaggcgatagaggggcaattggattccccggatccagaggattgcccggatatgctggtcgcccagggaacagtgggcctaaaggccagaagggagagaaggggagtggcaacacactgtctacggggccaatctggctgaatgaagtgttttgttttggaagagagagtagcattgaggaatgtaaaatccggcagtggggcaccagagcctgtagccatagcgaagatgctggcgtcacctgtacattatag

SEQ ID NO: 248926 - RNA, 1167 nt, synthetic construct
  misc_feature 1..1167: note = Description of Artificial Sequence: Synthetic coding sequence
  source 1..1167: mol_type = other RNA
atggagcagtgggatcatttccataatcagcaagaagataccgactcatgtagtgaaagtgtgaagttcgacgccaggagcatgaccgcccttctgccacctaacccaaaaaactcacctagtctacaagagaagctgaaatcatttaaggccgcgttgatcgccttgtacttattggtgttcgctgtgctgattcccctaattggcattgtcgccgctcagctgctgaaatgggaaacaaaaaactgtagtgtttcatcaactaatgctaacgacataacccaaagtttgaccggaaagggcaatgactcagaagaggagatgagattccaagaggtctttatggagcacatgagcaacatggagaaacgcatacagcacatcctggacatggaagccaatctcatggataccgaacacttccagaacttttcgatgaccaccgatcagcggtttaatgatatcctattacaactatctactctcttttcctcagttcaaggtcacggaaacgcaatagacgaaatttccaaaagccttatttcacttaataccacactcttagatctgcagcttaatatcgagaatctgaatggcaaaatacaggagaacacatttaaacaacaggaggagatatctaagctcgaggaaagggtgtacaacgtgagcgcagagatcatggcaatgaaggaagaacaggtccatctggagcaggaaattaagggagaagtgaaagtcctaaacaatattacaaatgatctgagacttaaggactgggaacatagccaaaccctgagaaatattaccctgatccagggtccacccggccccccaggtgagaaaggcgatcgcgggcctactggggaatccggacctagggggtttccagggcccatcggccctccagggttgaaaggggatcggggcgcaattggttttcccggctctcgcggtctccccggatatgctgggcggcctggaaattccggtccaaagggccagaagggcgagaaaggaagtggaaataccttgagcactggtccgatttggttgaacgaagtcttttgtttcggacgcgagagttctatcgaagaatgcaagataagacagtggggaacacgagcatgttcacactcagaagatgctggggtgacctgtactttgtag

SEQ ID NO: 248927 - RNA, 1077 nt, synthetic construct
  misc_feature 1..1077: note = Description of Artificial Sequence: Synthetic coding sequence
  source 1..1077: mol_type = other RNA
atggagcagtgggaccatttccacaaccaacaagaagacactgactcctgttccgagtccgtgaagttcgacgcacgctcaatgaccgccttgctaccgcccaacccaaaaaatagcccttcgctccaggagaagctgaaatctttcaaagctgctctgatcgctctgtacctgctagtttttgccgttctgatccctctgattggcatcgttgctgcacagctcctaaagtgggaaaccaaaaactgttccgtgagctcaactaacgccaatgatatcacccaaagcctcactggaaaaggaaatgattctgaggaggaaatgcgctttcaagaggtctttatggaacatatgtctaatatggagaaacgcattcagcatatcttggacatggaagcgaacctgatggatacagagcactttcaaaacttttcgatgacaaccgaccagagatttaacgacatcctgttgcagctgtctacactattcagttctgtccagggccacggcaatgccattgacgaaatctccaagagcctgattagtcttaacactaccctgcttgatctgcaattgaacattgaaaatctgaacggcaagattcaagagaatacgttcaagcagcaggaagagattagcaaattagaggagcgcgtgtacaatgtgagcgccgaaattatggcaatgaaggaagagcaagtgcatcttgaacaggaaatcaaaggagaagtgaaggtcctgaacaacatcacgaatgatctgcgcctgaaagattgggagcactcacaaacactacgtaatatcacccttatacaaggccctcccggccccccgggggagaagggcgacagaggccctactggcgagtcaggcccacgcgggtttccaggcccgattgggccaccaggcttaaaaggcgatcgaggtgcgattggcttccccggcagcagaggactgccgggatacgcaggcagacctggaaactccggcccgaagggacagaagggtgaaaaaggatccggaaacactctgcgacctgtgcaattaacagaccacatcagagccggcccctcttag

SEQ ID NO: 248928 - RNA, 1410 nt, synthetic construct
  misc_feature 1..1410: note = Description of Artificial Sequence: Synthetic coding sequence
  source 1..1410: mol_type = other RNA
atgtgctatctttccgcaatcatttcgatatccctgctgaataagaaaccgtccatggaacaatgggaccacttccataatcaacaggaagacactgatagttgttccgagtcagtcaagtttgatgcaagatctatgaccgccctactgccacctaatccaaagaattcaccgtccctgcaggagaaactgaaatcctttaaggccgctctgatcgctttatacctgctggtgttcgccgtcttaataccactcatcggaattgtcgctgcgcagctcctgaagtgggagaccaagaactgctcagtgtcatccacaaacgctaatgatatcacccaatcactgaccggcaaagggaacgattcagaggaggagatgcgctttcaagaggtgttcatggaacatatgagtaatatggaaaagagaatacagcatatactggacatggaagcaaacctgatggataccgaacactttcagaatttttcaatgacaactgatcaacggttcaatgacatcctgctgcagctgtcaacactcttttcgtctgtacagggtcacggaaacgccatcgacgagatttctaagagtttaatctccctgaacacgacattactcgacctgcaactcaatatcgagaatttaaatggaaagatacaggaaaacacttttaaacaacaggaggagatttccaaactcgaagaaagagtttacaacgttagtgctgagatcatggcaatgaaagaagagcaagttcacttggaacaagagatcaaaggagaagtgaaagtgttaaacaatataactaacgacctgcggcttaaagattgggaacatagtcagactctgagaaatataacgctcattcagggtccccccggcccaccgggcgagaaaggggacagaggccctacgggagaatccggcccccgaggattccccggtcctatcggccctccaggcttaaagggggatagaggcgcaattggtttccctgggtcacgcggtttgccagggtatgccggaagaccaggtaatagcggtcccaaagggcagaagggagagaaggggtctggtaatactctcactccttttacaaaagtgcgcctggtgggaggtagtggacctcacgagggtcgcgtggaaattctgcacagtggtcagtggggaacaatttgtgacgaccgatgggaggttagggtgggccaagtggtttgccggtctctcggttaccccggagttcaggctgttcataaggctgctcacttcggtcagggtacaggacccatttggctgaatgaagtgttctgtttcggaagagagtcaagtatcgaagaatgcaaaataagacagtggggcacaagagcttgttcccactccgaagacgctggagtcacatgtactctatag

SEQ ID NO: 248929 - RNA, 195 nt, synthetic construct; identical to SEQ ID NO: 248323
  misc_feature 1..195: note = Description of Artificial Sequence: Synthetic coding sequence
  source 1..195: mol_type = other RNA

SEQ ID NO: 248930 - RNA, 399 nt, synthetic construct
  misc_feature 1..399: note = Description of Artificial Sequence: Synthetic coding sequence
  source 1..399: mol_type = other RNA
atggcgatgaaggaggaacaagtgcatttggaacaagaaattaaaggggaagttaaagttttaaataatatcaccaatgatctacgcttgaaggattgggagcacagtcagactctgcgtaacattactctcattcagggccccccaggaccgccaggggagaagggcgatagaggtcccaccggcgagtctggtccccgcggtttccccggcccaattggacccccagggttgaaaggagaccgtggagccatcgggtttcctggaagcagaggattgcctggatatgctggcagaccaggcaattcaggacccaaggggcagaagggggaaaaaggatctggaaacaccctccgcccagtgcaactgaccgatcacatccgagcaggacccagttag

SEQ ID NO: 248931 - RNA, 1143 nt, synthetic construct
  misc_feature 1..1143: note = Description of Artificial Sequence: Synthetic coding sequence
  source 1..1143: mol_type = other RNA
atgagatggctgctactctattatgcactttgtttctccctatctaaggcttccgcccatacagtcgagctcaacaacatgttcggacaaattcaatcccccggttaccctgattcctaccccagtgacagcgaggtgacttggaatataacggtgcctgacggcttccggatcaaattgtactttatgcactttaacctggaaagcagttacctctgtgagtacgattacgttaaagtcgaaactgaagaccaagtccttgctactttctgcgggcgagaaacaactgacacagagcagacccctgggcaggaagtcgtcttgagtccaggttcattcatgtctatcacctttaggtcagacttttccaacgaggagcggttcacaggatttgatgctcactacatggccgtggatgtggatgagtgcaaagaaagagaagacgaggagctgtcttgcgatcactattgccacaattatattggcggatactactgctcatgcagatttgggtacatcttacacaccgataatcggacttgtagagtggagtgttctgataatttatttacgcagagaactggcgtcattacctcacctgactttcctaatccttatcctaaaagctctgagtgtttatatacgattgagttggaagagggctttatggtgaacctacaatttgaggacatttttgatattgaagaccaccccgaagtgccatgcccttacgattacattaagattaaagtgggacccaaagtcttaggcccattctgcggggaaaaagccccagagcctatttccacccagtcacacagcgtcctcattcttttccactccgacaattctggcgagaacaggggctggcggctgtcttaccgtgcagccggcaatgagtgtcccgaattgcaaccccctgtgcacggaaagattgagccctcacaggcaaagtactttttcaaagaccaggtcctggtgagctgcgatactggctataaagtcctgaaagacaacgttgaaatggatacattccagatagaatgcctcaaggacggtacatggagcaataagatccctacatgtaagaagaatgaaatcgatctggaaagtgaactcaaatctgagcaagttacagagtag

SEQ ID NO: 248932 - RNA, 2187 nt, synthetic construct
  misc_feature 1..2187: note = Description of Artificial Sequence: Synthetic coding sequence
  source 1..2187: mol_type = other RNA
atgagatggttgcttctgtactacgcactctgtttttccctatctaaggcttcggcacacactgtagaattaaacaatatgtttggacagatacagtccccaggttatcctgacagctaccccagtgatagcgaggtgacttggaatattacagtccctgacggttttcgtattaagttatacttcatgcacttcaatcttgaatcatcatatctctgtgagtacgattatgtaaaggtggagaccgaggatcaagttctggcaacattttgcgggcgtgaaaccacagatactgagcagacacctggccaggaagtggttctgtcacctggctcttttatgtccatcacttttcgcagtgattttagcaacgaagaaagatttaccggattcgacgctcattacatggccgtggacgtagatgagtgtaaagaacgtgaagatgaggagctgtcgtgcgatcattactgtcacaattacataggagggtactattgcagctgtcggtttggctacattctgcacacagataacaggacctgtagggtggagtgctcagataaccttttcactcagcgcactggagtcattacatccccagacttccctaatccctaccctaaatctagcgagtgcctgtacaccattgaactagaagaaggattcatggtgaatctgcaatttgaggacatattcgacattgaggatcaccctgaggtgccatgcccctacgactatattaaaatcaaggttggacctaaagtgttaggacccttttgcggagagaaggccccagaacctatttctactcagtcccacagtgtcttaatcctgtttcacagcgataactctggcgagaacaggggctggagacttagttacagggcagccggaaacgaatgcccagagctgcagcctccagtgcacggaaagatcgagccaagccaggccaaatattttttcaaagaccaggtcttagtatcgtgtgataccggatacaaagtgctgaaagataatgtcgaaatggacacttttcaaatagaatgcttgaaggacggcacatggagtaacaaaataccaacttgcaaaatcgtggactgcagggcaccgggcgaactggaacacggcctcattactttttcgacccgcaacaatcttactacttataagtccgaaatcaagtattcctgtcaagagccgtattataaaatgctgaataacaacacaggcatatacacttgttccgcccagggcgtgtggatgaataaggtcctcggacgatcactccctacatgtttgcccgaatgtggacagccctctcgcagcctgccaagtttggtgaaaagaattatcggcggccgaaatgcagagcctggactgttcccatggcaggcgttaatcgtggtggaagacacctcgcgagttcccaacgacaaatggttcggaagcggtgctctgttgtctgcttcttggattcttaccgctgctcatgtcctgcgatctcagcgcagagacaccactgtgattcctgtgtctaaggagcacgttacagtgtatttaggcctccacgacgtcagggataagtctggagcagttaactcaagtgcagcgcgagtagtcctccaccccgactttaatatacagaactacaaccacgacattgccttagtgcagctgcaggaacctgtgcccctgggtccccatgtgatgccagtgtgtttgccccgtctagagcctgaagggcccgcaccacatatgttgggcttagttgcaggatggggaatcagcaacccaaacgtcactgtcgacgaaattatttcttctgggacgagaactttgagcgatgtattacagtatgtcaaacttcctgtagtgccacacgccgaatgcaaaacttcctacgaatccaggtctggaaactactcagtgactgagaatatgttttgtgccggctattatgaggggggcaaggacacatgcctgggtgatagcggtggagcgttcgtaatttttgacgatctatcccagcgatgggttgtacagggcctcgtatcctggggagggccagaagaatgcggcagtaaacaggtgtatggggtgtacacgaaggtgagtaactatgtggattgggtgtgggagcaaatgggtcttcctcagagtgtcgttgaaccgcaggtcgagaggtag

SEQ ID NO: 248933 - RNA, 2100 nt, synthetic construct
  misc_feature 1..2100: note = Description of Artificial Sequence: Synthetic coding sequence
  source 1..2100: mol_type = other RNA
atgcgctggctccttctgtactacgctttatgtttctcactgagcaaagcctcagctcacacggtagagttaaataacatgtttggacaaattcaatctcccggataccctgactcctatccttctgatagcgaggtgacttggaatattaccgtaccagatggctttcgaatcaaactgtacttcatgcattttaacctggagtcgagttacctctgcgaatacgactatgtgaaggtcgagaccgaagatcaagtactggccaccttttgcggccgcgagactactgatactgagcagacgcctggccaggaagtcgtcctgtctccaggaagcttcatgtccatcacgtttcggtcggatttttcgaacgaagaacgattcactggtttcgacgcccattacatggctgtagacgttgacgagtgcaaagaacgagaagatgaggaactgtcttgcgatcactattgtcacaactatatcggaggctattactgcagctgtagattcgggtacattctgcataccgataatagaacctgtcgtgtcgaatgctctgacaacctattcactcaacgcacaggtgttatcacctcacctgatttccctaatccctacccgaaatcatcagaatgtttatataccattgaactggaggagggctttatggttaacctgcagtttgaagacatctttgatattgaagaccacccagaagtcccatgcccatacgactatatcaaaattaaggtggggcccaaagtgctcggaccgttctgtggcgagaaggcccccgagccaataagcacccaatcacatagcgtacttattctttttcactcagacaactccggagagaaccgcggttggaggctgtcctacagagcagcaggcaacgaatgccccgaactgcaaccccctgtacatggcaagattgagccgtcacaagcaaaatattttttcaaggaccaggtgctggtttcctgcgatactgggtataaggttctcaaagacaacgtggaaatggatacgttccagatcgaatgtttgaaggatggaacatggtcaaacaaaattcccacctgtaagatcgtggactgtcgcgctccgggagaactcgaacacggtctaattaccttctctacccgaaacaacctgacgacatacaagtcagaaattaaatattcatgccaggaaccctactacaaaatgctcaataataacacgggaatctacacatgcagtgcccagggcgtatggatgaataaagttctggggcgatctttaccaacgtgcctcccagtctgtggcctacctaagttttcacgtaaactgatggctcgcatctttaacggacgacctgcacagaaagggacaactccatggatcgctatgttatcccacttaaatggacaacctttttgcggggggtcactcctcggctcctcgtggatcgtaactgcggctcattgccttcaccaatctctggatccagaagatcccacactaagggatagtgatttgcttagtccaagtgactttaaaatcatcctgggtaaacactggagattgagatcagacgaaaatgagcagcacctgggagtgaagcacactactctccacccccagtatgaccccaatacatttgagaacgacgtggccctggttgagctgcttgaatcgcccgtcctgaatgcttttgtgatgccaatctgtctccccgagggaccacagcaagaaggagctatggtaattgtgtccggctggggaaagcaatttctgcaacgctttccagaaaccctcatggaaattgaaattcctatagtcgaccacagcacttgtcagaaagcctatgcccccctcaaaaaaaaggtaacgagggacatgatttgcgcaggtgaaaaggaaggcggaaaagacgcgtgcgccggagactctggaggtcctatggtaaccttgaacagagaaaggggccagtggtacctggtggggacagtgtcttggggagacgactgcggaaagaaagatagatacggggtgtacagctacattcaccacaacaaagattggatacaacgtgttacaggggtgcgaaactag

SEQ ID NO: 248934 - RNA, 1848 nt, synthetic construct
  misc_feature 1..1848: note = Description of Artificial Sequence: Synthetic coding sequence
  source 1..1848: mol_type = other RNA
atgtccatcaccttcagatccgacttctccaatgaggaacgcttcaccggattcgacgctcattacatggccgtagacgtggacgaatgtaaagagagagaagacgaggaactgtcatgcgaccactattgtcacaactatattggcggctattattgcagttgtcggttcggctacatattgcacactgataatcgcacgtgcagagttgagtgttctgataatctgttcacacagaggaccggcgtcattacatcacctgactttcccaacccttatcccaaatccagcgaatgcctgtatactatcgagttagaagaaggtttcatggtgaatctccagtttgaggacatcttcgacatcgaagatcatcctgaagttccttgcccttacgactacatcaaaatcaaagttggaccgaaagtcctcgggcccttttgcggagaaaaagcgcccgagcctatttccacgcaatctcactctgttttaatattgtttcattccgacaactcaggagaaaatagaggatggagacttagctatagagcggctggcaacgagtgcccggaactgcagccaccagtccacggcaagattgaaccttcacaagcgaagtatttctttaaagaccaagtcctggtaagctgtgataccggttataaagttctcaaagacaatgtggagatggatacattccagatcgagtgcctgaaggatggaacttggtccaacaaaattccaacgtgtaagattgttgattgtcgagccccaggcgaactggaacacggcctaattacattttctactcggaacaatctgacgacatataaaagcgagatcaaatatagctgccaggaaccctattacaaaatgttaaacaataataccggaatctacacttgctcagcccaaggtgtgtggatgaacaaagttctcgggcgaagtctcccaacctgcctcccagagtgcggacaaccttcccgaagcctgccttctttggtcaaacggatcattggcggaaggaatgcagagcctggactgttcccttggcaagccctcatagttgtagaggatacttcgagagtccccaacgacaaatggttcggttccggggctttactcagcgcctcctggatattgacagcagcgcacgtcttacggagccagcgccgcgatactacagtgattccggtaagtaaggagcacgtgacagtttatctcggcttgcatgatgttagggacaagtctggagccgtcaacagtagtgcagctcgcgtcgtacttcatcctgattttaacattcaaaattataaccacgatatcgctcttgtacaacttcaggaacctgtgcctttaggccctcacgtgatgccagtgtgtctcccgcgactggaaccggagggccccgcccctcacatgctcggactagttgcgggctggggcataagtaatcccaatgtgactgttgatgaaatcataagttccggaacaagaaccttgagtgacgtgttgcagtatgtcaaactgcctgtggtgcctcatgctgaatgtaagacaagctacgaatctcgatctggaaactatagtgtgacagaaaacatgttctgtgcaggctactatgaaggcggtaaggacacttgcttaggcgatagcggaggggcctttgtgatatttgatgaccttagtcaaagatgggtggttcaaggcctggtgagctggggagggcccgaagaatgtggatcaaagcaagtgtatggagtatatacaaaagtctcgaactatgtggactgggtgtgggaacaaatgggcctccctcagtctgttgtagagcctcaagtagagcgttag

SEQ ID NO: 248935 - RNA, 249 nt, synthetic construct; identical to SEQ ID NO: 248329
  misc_feature 1..249: note = Description of Artificial Sequence: Synthetic coding sequence
  source 1..249: mol_type = other RNA

SEQ ID NO: 248936 - RNA, 1443 nt, synthetic construct
  misc_feature 1..1443: note = Description of Artificial Sequence: Synthetic coding sequence
  source 1..1443: mol_type = other RNA
atgagcataaccttcagatcagacttttcgaacgaggaacgattcactggattcgacgctcattacatggccgtagacgtagatgaatgtaaagaaagagaggacgaagagctgtcttgtgaccactactgccacaattacatcggcggttactactgcagctgtagatttggatatattctccacactgacaaccgaacatgtagagtcgagtgctccgataatcttttcacccagcgcaccggagttattacctctcctgactttccaaatccctatcccaaatcttccgagtgcctttatacgatcgaactggaggaagggttcatggtcaacttacagtttgaagacatcttcgacatagaagaccaccccgaagtcccttgtccttacgactacataaaaatcaaggtcggccccaaagtgttgggtcccttctgtggagaaaaagctcccgagccaattagcacacagtctcacagcgtgcttatcctctttcattcagacaacagcggcgaaaacagaggttggcggttatcttacagagcagccggaaacgagtgtcccgagctccagcccccagtgcatggtaaaattgaaccatctcaggcaaagtacttcttcaaggaccaggttttagtcagctgcgacacagggtataaggtgttaaaagataatgtggaaatggacacctttcagatagagtgtctgaaggatgggacctggagtaataaaattcccacctgcaagattgtggactgtagggcccctggagagctggaacacggattaataaccttctctactcgcaacaatttaactacctataaaagtgaaattaaatattcatgtcaagagccctattacaagatgttgaataacaataccggcatttacacctgcagcgcccaaggagtgtggatgaacaaggtcttaggacgctcactcccgacctgcctgcctgagtgcggtcagccttccagatccttgccttccctcgtcaagaggatcatcggtgggcgcaacgctgaacctggcttgttcccctggcaggcactcatcgtagtcgaagatacctctcgggtccccaatgataaatggtttggatcaggggccttactgtccgcatcctggatcttgacagctgcccacgtactcagaagccagagaagagacaccaccgttattcccgtttctaaggagcacgtcaccgtttacctcggcctccatgatgtacgagataaaagtggcgcagtcaactcttcagccgccagggtggttttgcaccccgactttaatatccagaattacaatcacgatatagctctggttcagctgcaggaacctgtacccttgggtcctcacgtcatgcccgtatgcttgcctcgactagagccccccggaggaaggttgggtcatctccagtctcagtgtgattcttag

SEQ ID NO: 248937 - RNA, 834 nt, synthetic construct
  misc_feature 1..834: note = Description of Artificial Sequence: Synthetic coding sequence
  source 1..834: mol_type = other RNA
atgttccccttctactcatgttggaggaccggactcctacttctcctcctcgctgttgccgtcagggagtcatggcagacggaagagaaaacgtgcgacctagttggggagaaaggaaaggagagcgagaaggaactggcactcgtcaagaggcttaaacctctatttaataaatcgttcgagagcacagtcgggcagggaagtgacacgtatatttacatttttagggtatgtcgagaggctggaaatcacacaagcggtgccggcttagtacagatcaataaaagcaacgggaaagaaacagtggttggccgactgaatgagacacacatctttaacgggagtaactggataatgttgatttataagggaggcgacgaatacgataaccattgtggcaaggaacagagaagagctgttgtgatgatctcatgtaatagacatacactcgctgacaacttcaatcctgtgtccgaagagagggggaaggtccaagattgtttttaccttttcgaaatggactcttcactggcatgcagcccagagatcagccatctcagtgtcggcagcatattactcgtgaccttcgcatcgttagtcgctgtgtacgttgtgggaggcttcttatatcaacggttggtggttggtgccaaaggaatggagcagttcccccacctggccttctggcaagatctggggaatctggtggctgatggatgtgattttgtctgtagaagtaagccaagaaacgtgcctgctgcttatagaggtgtaggcgacgaccaactgggcgaggaatctgaagagcgggacgaccacctactgccaatgtag

SEQ ID NO: 248938 - RNA, 3942 nt, synthetic construct
  misc_feature 1..3942: note = Description of Artificial Sequence: Synthetic coding sequence
  source 1..3942: mol_type = other RNA
atgtcaggatggagatatctgatttgcgtgtcttttctgctgacaattctgctggaattgacttatcagggccccccagtaccagcctcgtcctccaccaaactgctgatgactagctatagtatgcggagcacagttgtttcacgctacgcccacactttggttaccagcgtgttgttcaatccccacgccgaagcccatgaagctatattcgatcttgacttaccacatctggcatttattagcaatttcacaatgactataaataacaaggtatatatcgccgaagttaaggaaaaacaccaagcaaagaagatttatgaggaagcacaccagcagggaaagacagcagcccatgtaggcatccgcgatagggaatccgagaagttccggattagcacatcattagccgcagggacagaagttacattttcattagcatacgaagaactgctacaacgacatcaaggacagtatcagctggtcgtgtcactgagaccgggccaactggtcaaacgcctcagcattgaagtaacggtgagcgaacgtacgggtattagttacgtgcatatccccccactgcgcactggacggctccggactaatgcacatgcgtctgaggttgattccccgccatcaacccgcatagagagaggagaaacttgcgtccggatcacctattgccctacccttcaagaccaaagttcgatcagtggctctggtataatggctgattttcttgtacaatacgacgtagtgatggaagatataatcggcgacgttcagatttacgatgattattttatccattatttcgccccaagaggtctgccccctatggagaagaacgtcgtattcgtaattgacgtttcttccagtatgttcggaaccaagatggaacagaccaagaccgcaatgaacgtcatactaagcgatctacaggccaatgattattttaacatcatttcattctccgataccgtcaatgtttggaaggcagggggctctatacaggccacaattcagaatgtccacagcgccaaggactacctgcattgtatggaggcagacggatggaccgatgtaaattccgccttgttagccgcagctagcgtgcttaatcactccaatcaggagccagggagaggtccctctgttggaagaatccctcttattatatttttgactgacggcgaacctacagctggcgtgacaacaccatctgtgatactatccaacgtaaggcaggcacttgggcaccgcgtgtcactcttttctttggcatttggagacgacgcggactttaccctgcttagacggctctctttagaaaaccgcgggatcgcgcggagaatctacgaagacaccgacgccgcgttacagctgaaaggattatacgaagaaatctctatgccgctcctggctgacgtaaggctgaactatctcggggggcttgtgggagctagtccgtgggccgtgttccccaactatttcggcggtagcgagcttgtagtagccggccaagttcaacctgggaaacaggaactggggatacacttagcagcaaggggacccaaagatcaactcctggtggcccaccactctgaaggtgcaacaaacaattcacagaaggccttcgggtgtcctggagaaccagcaccaaatgtcgctcactttatccgaagactctgggcatacgtaacgataggcgagttgcttgatgcccatttccaggctcgtgacaccactactcgccacttgcttgctgccaaggttctgaatttgagtctggagtacaactttgtgaccccccttaccagcctcgtcatggtccagcctaaacaagcaagtgaagaaacaagacggcagacatccacaagcgcaggtcctgacacaatcatgccctcaagttctagtcgtcacggcctcggagtctctaccgctcagcccgcgttggtgccaaaagtcattagccccaagtcccgtccagttaaacccaaattctacctgtcgagtacaaccactgcttccaccaagaaaatgctgtcatccaaagaattggagcctctgggcgagtcccctcataccttgtctatgcccacctacccgaaagcaaaaattcctgcgcagcaagactcaggaacgttagctcagccaaccctaagaacaaaaccgaccattctggtgcctagtaactcagggaccttacttcctctgaaacccggctccctctcccatcagaaccccgacattctgcccacaaacagcagaactcaggtgcctccagtgaagcctggaataccagcctcccctaaagccgacacagtcaagtgcgtgacacccctgcatagcaagcctggcgctccttcccatccacaactcggagcacttacatcgcaagcaccaaaaggcctgccacaatcacgaccaggcgtttctaccttacaggtccccaagtatcccctccacactagaccacgagtgcccgccccaaagacacgaaacaacatgccccacctgggcccgggaatactcctctcaaagacccccaagatcttactaagtttgaagccaagcgcacctcctcaccagatctctacctcgatatccctcagcaaacccgagacacccaatcctcacatgccgcagactcctctgcccccccgtcccgacagaccacggcccccgcttcctgaatcactgagcacatttcctaatacaataagctcttcaacagggccttcctcaaccactactacatctgttctgggtgaaccactaccaatgccttttacccccacactgcctcctggtcggttctggcaccagtacgacctgctccccggtcctcagcgcactcgccaggtacttggcccaagtagacccggggtcccaacaatgtccctcttgaatagctcaagaccaacaccagagggctctccccctaacctgcctattctacttccctcttctattttgcccgaagcgatctccctcctgctgctcccagaggaacttgagctgttatccgaatccatggtggaatccaaatttgtcgaatccctaaacccgcctgccttttatacattcctgacccccgatgaggacgggtctccaaattgggatggaaatagcgaagagatcttagggggggcaggtggctcaatggaatcccaaggttcatctgtcgggctggccaagggtactttaccttccatcttcacattctcatcatcagttgacggcgacccgcatttcgtcatccagatcccccacagtgaagagaagatctgttttactctcaacggtcatcccggcgatcttctgcagctaatcgaggaccctaaagccggcctacatgtgagcggaaaactcttgggggccccacccagaccaggccataaggaccagaccagaacgtatttccagattatcacagtcacaaccgataaaccccgcgcctataccataacaataagtcgcagttcaatcagcctccggggcgagggaactctgcggttgtcctgggaccagccagccctactcaaaagaccacagctagagctttatgttgccgctgctgcccggctcaccctaaggctaggcccctatctcgaattcttggtcctgagacatcgctatagacatccctctaccctccagctccctcatctggggttttatgttgccaacgggagcggccttagcccatccgcccgcggtctcattggacagttccagcacgccgacatcagactcgttactggccctatgggtccttgcctgagaagacaccacggacctgatgtaccagtgatacttggcaagcgcctgctaaaagattcccccagactgctgcctaggtgggctagttgttggctcgtcaagcggtcccatgtcgaattgcttttaggtcacccttatctatcatatgtactgtag

SEQ ID NO: 248939 - RNA, 804 nt, synthetic construct
  misc_feature 1..804: note = Description of Artificial Sequence: Synthetic coding sequence
  source 1..804: mol_type = other RNA
atgatgagctctaagcccaccagccacgctgaggtcaacgagacaatccctaacccatatcccccaagctcctttatggccccaggatttcagcaacccctgggatctatcaacttagaaaaccaggctcaaggtgcacagcgcgcacagccctatggtataacttcccccgggatattcgcatcaagtcaacccggacaggggaatatccaaatgatcaatccctccgtaggaaccgccgtcatgaactttaaggaagaagcaaaagctctgggagtaatccagattatggtcggtctgatgcacataggctttggcattgttttatgtcttatttccttttcctttagagaggtgctcggcttcgctagcacggccgtcattggtggctatcccttttggggcgggttgtcttttattatatcaggcagtctgtccgtcagtgccagtaaagaacttagtaggtgtttggtgaaaggtagtcttggaatgaatattgtgagctccatactcgcttttataggcgtaatactgctcctggtcgatatgtgcattaacggcgttgcgggacaagactactgggctgttctgagtggcaagggaatttctgctactttaatgattttttccctcctcgaattcttcgtcgcctgtgccaccgcccacttcgctaatcaggcgaacacgaccaccaatatgtcagttttggtcatacctaatatgtacgagtcaaatccagtcacaccagcttccagtagtgcgccgccacgatgtaacaattattctgccaatgcccccaaatag

SEQ ID NO: 248940 - RNA, 876 nt, synthetic construct
  misc_feature 1..876: note = Description of Artificial Sequence: Synthetic coding sequence
  source 1..876: mol_type = other RNA
atggaacgcaaaagatgggaatgtcccgcactgccccagggatgggaaagggaagaggtacctcgccgtagtggactgtcggcgggccaccgtgatgtcttctactattcgccgagcggcaaaaaatttaggtccaagcctcaacttgcacgatacctaggaggtagcatggatctgagcaccttcgactttaggaccgggaaaatgttaatgtccaaaatgaataagtccagacagcgcgttcgatatgatagctctaatcaagttaagggaaagcctgatcttaacactgccctgcctgttcggcagactgcaagcattttcaaacagccagtcacgaaaattaccaatcacccatctaataaagtcaaaagtgacccccaaaaagcagtggaccagccacgccaattattttgggaaaagaagttgtccggattaaacgcatttgacattgcagaagagctggtgaagacaatggatctgccaaaggggctccagggcgtcggaccggggtgtaccgatgagactttgttatccgcgatcgcttccgcacttcatacatctacaatgccaattacaggccagctctccgccgcagtggaaaaaaaccctggagtgtggctgaataccacccagcccctgtgtaaagcctttatggtgaccgacgaagacatcagaaaacaggaagaactggtgcagcaggttcgaaagagactagaagaggcccttatggctgatatgctcgcacatgtggaagagctggccagagacggagaggcccctcttgataaagcttgtgcagaggatgatgacgaagaggatgaggaagaagaagaggaagagcctgacccagatcctgagatggagcacgtgtag

SEQ ID NO: 248941 - RNA, 522 nt, synthetic construct
  misc_feature 1..522: note = Description of Artificial Sequence: Synthetic coding sequence
  source 1..522: mol_type = other RNA
atgtctcttttgggccctaaggttctgctgtttctggccgcattcatcataacctctgattggatccctctcggagtgaatagccagcggggcgacgatgtgacccaagccacacctgaaaccttcactgaagaccccaaccttgttaatgatccagccacagatgaaaccgtgctcgctgtactcgcagacatcgcacctagcactgatgacttggcttccctcagcgaaaaaaacaccactgccgagtgttgggacgagaaatttacatgcactaggttgtactcggtccaccgtccagtcaaacaatgtatccaccagctctgttttacctctttgcggcggatgtatatagttaataaagaaatatgctcaagactggtctgtaaggaacacgaggccatgaaggatgaattgtgtcgtcagatggcaggactacctccccgtagattacgacgttccaactactttaggctcccaccgtgcgagaacgtcgacttgcagcggcctaatggcctgtag

SEQ ID NO: 248942 - RNA, 492 nt, synthetic construct
  misc_feature 1..492: note = Description of Artificial Sequence: Synthetic coding sequence
  source 1..492: mol_type = other RNA
atgtctctcctgggccctaaggttctcctgttcctcgcagctttcatcataacttctgattggattccactgggagttaattcgcaaagaggcgatgacgtgacacaggccacccccgaaacctttaccgaggatccaaatctagtcaacgaccctgctacagacgaaacggtgctcgccgtgttggccgacattgctccctccactgacgacttggagtgttgggatgaaaagttcacatgcacgcgactctattcagtgcatagaccggtcaaacagtgcatccaccagctgtgctttacatcactgaggaggatgtatatagtaaataaagagatctgttccagactggtatgcaaagagcacgaagctatgaaggacgaactctgtcggcagatggctggcctccctcctcgccgactcagaagatcaaattattttagactccccccctgtgagaacgtggacctgcagcgacccaacggcctctag

SEQ ID NO: 248943 - RNA, 447 nt, synthetic construct
  misc_feature 1..447: note = Description of Artificial Sequence: Synthetic coding sequence
  source 1..447: mol_type = other RNA
atgtcgttgcttgggcctaaagtgcttctttttctggctgccttcataattacatctgactggatccccctgggcgtgaactcgcagcgcggagatgatgtgacacaagctactcccgaaaccttcacggaagatcctaacctggtgaatgatccagccacagacgagaccgaatgttgggatgaaaaattcacctgtactagactctactccgtgcatcgccccgtcaaacagtgcattcaccaactttgttttacttccctacggcgcatgtacatcgtcaataaagagatttgttcgcggctggtatgcaaggaacatgaagctatgaaggatgagctctgccgacaaatggccggcctccccccaagacgactaaggcggtcaaactatttccgattgcctccctgcgaaaatgtcgatctccaacgaccaaatggcttgtag

SEQ ID NO: 248944 - RNA, 492 nt, synthetic construct
  misc_feature 1..492: note = Description of Artificial Sequence: Synthetic coding sequence
  source 1..492: mol_type = other RNA
atgtctttgctaggacctaaagttctgttgttcctggccgcctttattattacatctgattggatcccccttggagtgaattcccaacgcggtgatgacgtaacccaggccacccccgaaaccttcactgaggacccaaatcttgtgaacgacccggccactgatgagacggttttagccgtgctggctgacatcgcccccagtacggatgatctggaatgttgggacgaaaagttcacatgtacacgcctttattcagtgcaccgtccagttaaacagtgcatacatcaactttgcttcacttccctcagaaggatgtacattgtgaacaaagagatatgttcaaggctggtgtgtaaagagcatgaagccatgaaggacgagctgtgtagacagatggcaggtctccccccccgacggttgcgccgttccaattactttagactcccaccttgtgagaacgtggacttgcaaaggccaaacgggttgtag

SEQ ID NO: 248945 - RNA, 276 nt, synthetic construct; identical to SEQ ID NO: 248339
  misc_feature 1..276: note = Description of Artificial Sequence: Synthetic coding sequence
  source 1..276: mol_type = other RNA

SEQ ID NO: 248946 - RNA, 468 nt, synthetic construct
  misc_feature 1..468: note = Description of Artificial Sequence: Synthetic coding sequence
  source 1..468: mol_type = other RNA
atggttgacttaacccaggtaatggatgatgaagtatttatggcctttgctagctatgcaaccattatcctgagcaagatgatgctaatgtccacagctacagccttctacagacttaccaggaaagtatttgccaaccccgaggattgtgtggccttcggtaaaggagagaacgcgaagaaatatctgcggactgacgatcgtgtggaacgcgtacggagagcacatcttaatgatttagagaacatcatcccctttctcgggataggccttctgtattcactgagcggtccagatccctcaaccgcaatccttcatttccgattattcgtaggcgcacggatctaccacacaatcgcatacctaactccacttccacagcctaatagagctctgtctttttttgttggatacggtgtaacgctgtccatggcctatcgtttactgaagtccaaactctacctgtag

SEQ ID NO: 248947 - RNA, 4395 nt, synthetic construct
  misc_feature 1..4395: note = Description of Artificial Sequence: Synthetic coding sequence
  source 1..4395: mol_type = other RNA
atgttctcctttgttgatttaagactactactgctgctagctgccaccgccttgctgacacacggacaggaagaaggacaggtggaaggacaggacgaagatattcccccaattacttgtgtccaaaatgggctgagatatcacgatcgagatgtgtggaagcctgagccttgccggatttgtgtctgcgacaatggcaaagttctctgcgatgatgtgatttgcgacgaaaccaagaattgtccaggcgccgaggtgcccgagggagaatgctgccccgtatgcccagacggctctgagtctcctacagatcaggaaacaaccggcgtcgaaggtccaaaaggcgacactggacctaggggtcctagaggacctgcggggcctcccggaagagatgggatccccggacaacctggtttaccgggccccccaggcccacccggaccgccaggaccccctggcctgggcggtaattttgcacctcagttgtcctacgggtatgatgaaaagagtaccggtggaatctcagtgcctggccctatgggaccgtccggaccccgtggtctaccgggcccaccaggtgcaccgggtccgcaggggtttcaggggccacccggcgaaccgggggaaccgggtgctagcgggcctatgggaccaagaggcccccctggtccccccggaaagaatggtgatgatggggaagcaggcaaacctggacgacctggggagcgcggtcccccagggccacagggtgcgcggggcctgcctgggactgcgggactacctggcatgaaaggccaccgaggcttctcgggtttagacggagcgaaaggcgacgcaggacctgctggacctaaaggagaacctggatcgcctggggagaatggggccccaggccaaatggggcctaggggcttacctggggagagaggtcgacccggtgcacctgggcccgccggagcgcgagggaatgacggtgctacaggcgcagcagggccacccggacccactggtcctgcaggaccccctgggttccctggtgccgtcggtgctaaaggggaagctggacctcaaggcccacggggatctgaaggacctcagggtgtgaggggtgagcccggccctcctggaccggccggagcagccgggccagcaggaaatccaggtgcagatgggcaaccaggggccaaaggagctaacggcgcacctggcatcgccggtgcgccaggcttcccaggtgcacgcggaccctccggacctcagggacctggcgggcccccggggcccaaagggaactcaggtgaaccaggcgccccgggatcaaagggagatacaggcgcaaaaggcgagccgggaccagttggagttcaaggcccacccggacctgccggagaggaaggcaagagaggggccagaggcgaaccaggaccaacagggttaccaggcccccccggagagcgcgggggacctgggagtcgcggctttcctggagctgacggagtggcagggcccaaaggaccggcaggcgaaagggggtcccccggaccagccgggcccaaaggcagtcctggcgaagctggtagaccaggcgaggccggcctgcctggcgctaaggggcttactggttccccaggttcccctggtcccgacggtaagactggaccccccggcccggccggacaagatggacggccaggcccacctggcccacctggtgccaggggacaggccggcgtaatgggctttcccggaccaaaaggagcagctggagagcctgggaaagcgggtgagaggggagttcctggaccccccggcgctgtggggccggcaggcaaagacggagaggctggggcacagggtccacccggaccggctggcccggccggcgaacgtggggagcagggaccagccggttctccaggattccaaggtctacccggaccagcgggaccccctggagaagcaggtaaaccaggtgagcagggagtccccggtgaccttggcgccccggggcccagtggagcgagaggggagaggggatttcccggggaacggggcgtacaaggcccacccggcccagccggccctagaggggctaatggtgctccagggaacgatggcgctaaaggagacgcgggcgctcccggcgctccaggttctcaaggcgctcccggtttacaaggaatgcccggcgaacgtggcgccgccggcctccccggaccaaagggagacagaggcgatgcaggtccaaaaggagcagacggctcccctggtaaggatggtgtgagaggcttgaccggacctatagggcctcccgggccggccggggcccccggagacaaaggcgagagcggaccttcagggcccgcagggcccacaggcgccagaggagccccaggggaccgtggggagcccggaccacccggccccgcaggatttgctggccccccaggtgctgatgggcagcccggggccaagggagaaccaggggacgccggagctaagggagatgccggtcctccaggccctgctggccctgccggacccccaggacccatcggaaacgtcggcgcccccggtgcaaaaggcgcgagaggctcagcaggcccacccggtgcaactggattccccggagcagcaggccgtgtaggtccgccggggccctcaggaaatgccggtccccccgggcctcccgggcctgctggcaaagagggtggaaagggcccaagaggtgagactggtcccgccgggagacccggagaagttgggccccccggaccacccggccctgctggcgagaaaggcagccccggtgccgatggccccgccggcgcacccgggactcctggacctcagggaatagcagggcagcggggagtggtgggccttccaggccaaagaggagaaagaggtttccccggcctgccgggtccaagtggagagcccggcaaacaagggcctagtggggcatcgggtgagagggggccacctggtccgatggggccccctggactggcagggcccccgggagaatcaggtcgggagggagcccctggagctgaaggcagccccggccgcgatggcagtccaggagccaaaggtgatagaggtgagaccggccctgctggccctcccggagcaccaggcgcacccggagctccggggcctgtgggtcctgctgggaagagcggagatcggggcgagacaggcccagctgggccaactggacccgtcgggccagtaggtgctcgaggccctgcaggcccccaggggccaagaggtgacaaaggggagacaggggagcagggagatagaggtatcaagggccaccgcggcttttctggactccagggaccacctgggccccccggctcacccggggaacaaggaccttctggcgcgtccgggcccgccggaccacggggcccacccggcagtgcaggagcccccgggaaagacggccttaacggattgcctggccccattggcccccccggacccagaggcagaacaggtgatgcgggtcccgttggcccccctggcccacctggacccccaggaccaccaggccctccctctgctggctttgacttttcctttcttcctcagccaccccaggaaaaagcccatgacggcggccgctactaccgcgctgatgacgccaatgtggtacgagatagagatctggaagttgatacaacattaaaatccttgtcacagcaaattgaaaatattcgttctccagaaggaagtaggaaaaaccccgctcgcacttgcagagacttgaagatgtgtcactctgattggaagagtggagaatactggatcgatccaaatcagggctgtaacctagatgccatcaaggttttctgcaatatggaaactggggagacttgtgtgtatccaacccagcctagcgtggctcagaagaactggtatatctcaaagaatcccaaggacaagagacatgtgtggtttggcgaaagtatgacagatggctttcaattcgagtacggggggcaagggtcagacccagcagatgtggctatacagttgacattcctaagactcatgtccacagaggcatcacagaacattacctaccactgcaaaaattcagtcgcctatatggatcagcagacagggaatctgaagaaagctttacttttacaaggttcaaacgagattgagattagggccgagggaaatagcagattcacctatagcgtgacagttgatggatgtacaagtcacaccggcgcgtgggggaagaccgtaatagagtacaagaccacaaaaacttctcggctaccaatcatagacgtcgctcctctggatgtcggcgcacccgatcaggagtttggatttgacgtggggcctgtgtgcttcctgtag

SEQ ID NO: 248948 - RNA, 606 nt, synthetic construct
  misc_feature 1..606: note = Description of Artificial Sequence: Synthetic coding sequence
  source 1..606: mol_type = other RNA
atggcagcaagaacagcttttggcgcagtatgtcgcagactttggcaaggcctcggaaacttctctgtcaatacctctaagggaaataccgccaaaaacggtggcctgcttctgtcaacaaacatgaagtgggtgcagtttagtaaccttcacgtggatgttccaaaggacttaactaagcccgtagtgactataagcgacgaaccagacatcttatataagcggctctccgtcctcgttaaaggtcacgataaagcggttttagatagttacgagtatttcgccgtgctggcggcgaaagaactcgggatttctataaaagtgcatgagccacccagaaaaatagaacgattcacccttttgcagagcgttcacatctataagaaacatagggtccagtatgaaatgcgaacactgtaccgctgtctggagttggagcatttaaccggatctacagctgacgtttacctcgaatacatccagcgaaatttacccgaaggcgttgccatggaggtcaccaagacccagctggagcagcttcccgaacacatcaaggaacctatttgggaaactctgagcgaagagaaggaggagtccaaatcatag

SEQ ID NO: 248949 - RNA, 972 nt, synthetic construct
  misc_feature 1..972: note = Description of Artificial Sequence: Synthetic coding sequence
  source 1..972: mol_type = other RNA
atggctgccgccgcactgcccgcatggctttccctgcaatcacgagccagaacgctgagggctttctccaccgctgtgtactctgccacccccgtgccgaccccctcacttccagaacgcactcctggtaacgagagaccccccaggcgcaaagctttaccccctaggaccgaaaagatggcagtcgaccaagactggccttcggtgtatccagtagcagcccctttcaagccatccgctgtgcctttaccagtcagaatggggtacccagtgaaaaaaggagtcccaatggcaaaggagggcaacctcgagctgctgaaaatccctaactttctccatctcacccccgtcgccataaagaagcactgcgaagcactaaaagatttttgcactgagtggcctgccgcgctcgactccgacgaaaaatgtgaaaagcacttccctatcgaaatcgactcaactgactatgtatcttctggcccctccgttcgaaacccccgtgcccgagtcgttgtactacgcgtcaaattaagtagcctgaatctggatgaccacgccaagaaaaagctcatcaagctcgtaggagaacgctactgcaagaccaccgatgtgttaacgataaaaacagacaggtgccccctgaggcggcagaattatgattacgctgtgtatctattgacagtactgtaccatgaaagttggaataccgaagaatgggaaaaatctaagacagaggcagatatggaggagtacatatgggaaaactcaagttccgagagaaatatcctggagaccctgctgcagatgaaggctgctgagaaaaacatggagataaacaaggaggagctgctgggtacgaaagaaattgaggaatacaagaaaagtgtcgtgagtctgaagaatgaagaagaaaatgaaaattctatcagccagtacaaagaatcagtcaaaagactcttgaatgttacctag

SEQ ID NO: 248950 - RNA, 1797 nt, synthetic construct
  misc_feature 1..1797: note = Description of Artificial Sequence: Synthetic coding sequence
  source 1..1797: mol_type = other RNA
atgctccctgatttcccctcccctagtacctgggcccctggacttctactgccatccggaccagccttgctcagcccgtcagttctgcaagactctcttagcttaggtcgaagtgaacagcctcatccaatatgttcctttcaagatgatttccaagagtttgagatgatcgatgataatgaagaggaggatgatgaggatgaggaagaggaggaagaagaggaagaaggagatggagaagggcaagaaggtggtgatcccggaagtgaggcacccgctccgggccccctgattcctagcccaagcgtagaagagccacacaagcaccgcccgaccactctgcgccttaccacccttggtgctcaggacagccaagatcctgaggctgcggccgggcccggaggagtcgagcttgttgacatggagaccctgaacccaaccagagatactatcacccccctttgggcagcaccagggcgagcagctagacccggacgtgcgtgctctgccgcatgttccgaggaggaggacgaggaggacgatgaagaagaagaagacgccgaagattccgccggatcacctgggggcagaggcaccggccctagcgcaccgcgcgacgcatctcttgtttatgacgcagtcaagtatactttggtagtcgacgagcacacacagttggagttggtctctctgagaagatgtgcaggcctgggacatgactccgaagaagatagtggcggggaagcctctgaagaggaggctggggcagctcttctgggcggtggacaggtttcaggcgatacgtccccagactccccagatctgacattttctaaaaagttcttaaatgtcttcgtaaacagcacgtctcggtcttcttctactgaaagctttggcctgttctcttgcctagtaaatggagaggagagggagcagactcatagagccgtattcagattcattcccaggcatcccgacgagctcgaattggacgttgacgaccctgtgttagtcgaggctgaggaggatgacttttggtttcgaggatttaatatgagaacgggcgagaggggagtgttccccgcattctatgcgcacgccgtaccagggcctgccaaggacttactgggtagtaaacggagcccttgctgggtagaacgttttgatgtgcagttcctcgggtccgttgaagtcccgtgccatcagggtaatggaatcttatgtgcagccatgcagaagatagccaccgccaggaagctgaccgttcatctacgtccccccgcctcatgtgacttagagataagcttaagaggtgttaaactgtctttaagcggcggcggcccagagttccaaaggtgttcccatttcttccagatgaaaaacatatccttctgtggatgccatccgaggaattcctgcgaagcacctcaaggcgcagcctttcaatgggagcggggcgttgatagaaaacgggtccttcagactcgcggtaacgtacagccacacctcggcgctggacagggcgctgcactcaaccgcgccaccgaaggatcctccaccggatccgagaaaggcgaatggacaccgctcgtgatcatggagctcacccaatcagtgaatagttgttactttgggtttatcaccaaacatcctcttttgtcaagatttgcctgtcacgttttcgtgtctcaggaaagtatgagacctgtcgcacagtcagtcggtcgagcattcctcgagtattaccaagaacaccttgcatatgcctgtcccacggaggatatctatcttgaatag

SEQ ID NO: 248951 - RNA, 3357 nt, synthetic construct
  misc_feature 1..3357: note = Description of Artificial Sequence: Synthetic coding sequence
  source 1..3357: mol_type = other RNA
atggaaccctccagagcattgctgggttgtttggcttccgcagcagcggccgcacccccgggcgaggacggggctggggccggcgccgaggaggaggaggaagaggaagaggaagcagctgcagctgtcggaccaggtgagttaggttgtgatgcccccctgccctattggaccgccgtttttgaatatgaggccgcaggtgaagacgagctcacattacgcctgggggacgtggtagaagtgctgagcaaggactcacaggtatcaggcgacgaaggctggtggacaggccagttgaatcagagagtcggaatcttccctagtaattatgtcactcctaggagtgcattcagtagcagatgccagcctggcggtgaggaccctagctgttacccccccatccagctcctagaaattgactttgccgagcttaccctcgaggaaatcataggaattggcggctttggaaaagtctatagagccttttggattggtgatgaagtggcagtgaaggctgctcggcacgatcccgatgaagacataagccagaccattgaaaacgtcaggcaggaagctaagctatttgctatgttaaaacaccctaacattatcgccctccggggggtgtgcctcaaggagccaaatctatgcctcgtcatggaattcgcacggggagggcctctcaaccgggtgctgagcgggaaacggataccccccgatatccttgttaactgggccgtccaaatcgcaagaggtatgaactatttgcacgacgaagccatcgtaccgatcatccatcgagacttgaaatcatcgaatatcctaatattacagaaagtagaaaatggcgacctcagcaacaagattctcaagatcacagattttggtctcgccagagagtggcatcgcacaaccaagatgtctgctgccgggacttacgcatggatggcaccagaagtgattagggcgtccatgttctcgaaaggttccgacgtttggagctatggcgtcctgttgtgggagctcctgaccggtgaagtcccttttagaggaatagacggccttgcagtggcctacggtgttgccatgaacaaattagcactgcctatcccatccacctgcccagaaccattcgctaagctcatggaagattgctggaaccctgacccacattctaggccttcctttacaaacattctggaccagttaacgactatcgaggaatccggttttttcgagatgccgaaagactcattccattgcctgcaggataactggaagcacgaaatccaggagatgttcgaccagcttcgagcaaaagagaaagagttgcgaacatgggaagaagaattgacccgggcggccctgcagcagaagaaccaggaagaacttttaagacgcagggagcaggaactggctgaacgcgaaattgatatactggagagggaactgaatattataatccaccagctgtgccaggaaaaaccgagagtgaagaagcgtaagggaaagtttcgaaagtctcgcttgaaactgaaggatggtaatcgtatatctctcccttccgattttcagcataaatttaccgtccaggccagcccgacgatggataaaagaaaaagcctcatcaacagtcgatcaagtccaccagcaagcccaaccattatacccaggctgcgggccatccaactcacaccaggagaatcaagcaaaacgtggggaagaagttccgttgtgccaaaggaagagggcgaggaggaggagaaacgtgcccctaagaaaaaaggcagaacatggggtcctggaaccttaggacagaaggaactggctagtggcgacgaaggatcccctcaaagacgagagaaggccaatggtctatctacaccatcggaatcccctcacttccacttaggactcaagagtttggttgacggatacaagcagtggagtagcagcgccccaaacctggttaagggtccaagatctagtccagccctgcccggctttacctcattgatggagatggctctgctggccgcctcctgggtcgttcccatagatatcgaagaagacgaagattccgaaggcccaggcagcggggaatctcgacttcagcatagcccctcccagtcctacctgtgcatcccattccctcgcggcgaagacggcgacggtccttcatcagacgggatacatgaggagcctaccccagtcaatagcgctacctccaccccccagcttacgcccaccaattcccttaagcggggtggtgctcatcaccgaagatgcgaggttgccctccttggatgcggcgcagtgctggctgctaccggtcttggcttcgacctcttagaagcgggtaaatgccagctgctgcccctggaagaaccggaaccccccgccagagaggaaaagaagcgtcgagagggtctgttccagagaagttcacgcccccgcagatctacaagtcctccctccagaaagctgtttaagaaagaagaacccatgctgctccttggagatcctagcgcatcactgactctgctctccctctcctcgattagtgagtgtaattctacccgctctctgttgagatctgactccgatgagattgtagtctacgaaatgcctgtgagcccggtcgaagcaccccctcttagtccatgtacacacaatccccttgtgaacgtgagggtggagcgatttaaacgggatccaaatcagtcacttacccccacgcacgtgacactgactaccccctcccaacccagctctcaccgtcgcaccccatcagacggggcactgaagcccgaaactctactggcaagccgctcacccagttcaaatggcctgtctccaagtccaggcgccggcatgctcaagacaccctccccctctcgggatccaggcgaattccctaggctaccggatcctaacgtagtcttcccacccaccccccgtagatggaacactcagcaggactcaaccctcgaacgtcccaagaccctggaatttctgccaagacctcgtccctccgctaatcgacaacgtctggatccatggtggttcgttagccccagtcatgctcgcagcaccagccctgctaatagctcttctaccgaaaccccctccaatctcgactcttgtttcgcatctagctcctcaaccgttgaagaacgtccaggcctacccgcactgctgcccttccaagccggtcccctaccccctactgagcgaactctgctggacctggacgctgagggccaatctcaggattcaaccgtcccgttgtgccgtgcagaactcaacacacaccgtcctgccccctatgaaatccaacaagaattctggtcttag

SEQ ID NO: 248952 - RNA, 2541 nt, synthetic construct
  misc_feature 1..2541: note = Description of Artificial Sequence: Synthetic coding sequence
  source 1..2541: mol_type = other RNA
atggaggctccgctccgtccggcagcggatatactacgccgcaacccacagcaggactacgaacttgttcagagagtcggcagcggcacttacggcgatgtctataaagctcgaaacgttcatactggggagttggcagctgtcaaaatcattaagcttgaacctggtgatgacttcagtctgattcagcaagaaatcttcatggttaaagaatgtaaacactgtaatatagtagcttattttggctcttatctgtcacgtgagaaattatggatttgtatggagtattgcgggggcggaagcctgcaggacatctatcacgttacgggaccgctttctgaactccagatcgcctacgtgtgccgagaaactctgcaaggactcgcctacttgcacacaaaaggaaaaatgcatcgagacattaaaggcgccaatatcctcctcacagatcacggcgatgtgaagctggccgattttggcgtagccgcaaaaattaccgccactatagctaagagaaaatccttcatcggtactccctattggatggctcccgaagtggcagccgtcgaaaaaaacggaggttacaatcaactctgcgacatatgggcagttgggatcaccgccattgaactgggcgaactccagcctcctatgttcgacctacaccccatgcgagccctgttccttatgtccaaatcaaatttccagcctccaaagttaaaagacaagaccaagtggagcagcacattccacaactttgtcaaaatcgcccttacaaaaaaccccaaaaagagaccaacagccgagcgcttgctgactcacacttttgtggcccagccgggcctgtcccgtgctttagccgtggaactgctagataaagtaaacaacccagacaatcacgctcattatactgaagccgacgacgacgacttcgaacctcatgcaatcatccgacacaccataagaagtactaaccgcaacgcacgagccgagcgcaccgcctctgaaatcaacttcgacaaactccaatttgagccacctctgcgaaaagagacggaggcacgagatgaaatgggacttagttcagaccccaacttcatgcttcagtggaatccctttgtggacggggcgaatactggcaaatcaacctcgaagagagcaatcccgccacctttaccacccaagccgagaatctcttcgtaccccgaagataattttccagatgaagagaaggcctccaccatcaaacattgtcctgattccgagtctagagctccacagatcctgagaagacaatcaagtccttcctgcgggccggtcgcagagacctcaagcataggaaacggagatggaatttcaaaactgatgtcagaaaacaccgaaggatcagcgcaagcccctcaactccctcgaaagaaggataaaagggacttccctaaacccgctattaacggcctgccacctactcccaaagtgttgatgggagcgtgtttcagcaaagtctttgacggctgcccccttaagatcaactgcgccacaagctggatacaccctgacaccaaagatcaatacatcatcttcggaaccgaagacggaatctacactctgaacctgaacgaactgcacgaggccaccatggaacaactcttccctcggaagtgcacatggctgtacgtgattaataacacactgatgtcactgtctgtgggaaaaacttttcagctgtactcacataatctcatcgccctgtttgaacacgcaaagaaacctggactggctgcccatattcagactcatcggttcccagatcggattttgccccgtaagttcgccctcactacaaagattccagataccaaaggctgccacaaatgctgtatcgttcgcaacccatacactggtcataaatacctctgcggggccctgcaaagcggaattgtgttgctgcagtggtacgaacccatgcaaaagtttatgctcattaagcactttgactttccacttcctagcccccttaatgttttcgaaatgttagtaattcctgaacaggaatatccgatggtatgtgtggccatcagcaaaggaaccgaatctaaccaagttgtgcagttcgaaaccattaacctgaattctgcatcatcctggtttacagaaataggggcaggctcccagcagctagattctattcacgtgacacagttagaaagggacacagtcttagtgtgcttggacaagttcgtcaaaatcgtgaacctacaagggaaactgaaaagttcgaagaagctagcatccgagctcagctttgactttaggatcgagtctgtggtttgtctgcaggatagtgtcttggcattttggaagcacggcatgcaaggaaaatcgttcaagagtgatgaggtaacacaagagatctccgacgaaactagagtgttccgcctgctgggttctgacagagtggtcgtgcttgagtctagaccaaccgaaaatccgaccgcccattcaaacctatacatacttgctggccatgaaaattcttattag

SEQ ID NO: 248953 - RNA, 345 nt, synthetic construct
  misc_feature 1..345: note = Description of Artificial Sequence: Synthetic coding sequence
  source 1..345: mol_type = other RNA
atggtctcgaggaaggccgtggccgcgcttctggttgtacacgtcgcagccatgctggcatcacagaccgaagcatttgtaccaatatttacatatggggaactgcagcggatgcaagagaaggagagaaacaagggacagaagaagtctctatcagtctggcagcgatcaggcgaagaaggccccgtcgaccctgcagaaccaatcagagaagaagagaatgagatgatcaaactgacggctcctcttgaaataggcatgcgcatgaacagccggcaactcgaaaaataccccgccaccttggaaggcctattatccgaaatgttacctcagcacgcaaagtag

SEQ ID NO: 248954 - RNA, 348 nt, synthetic construct
  misc_feature 1..348: note = Description of Artificial Sequence: Synthetic coding sequence
  source 1..348: mol_type = other RNA
atggtaagccgcaaagcagtggccgcgttactggtggtgcatgtggctgccatgctcgctagccagactgaggcatttgtgccaatctttacctatggcgaattgcagaggatgcaggaaaaagaacgaaacaaagggcagaaaaagagcttatccgtgtggcaaagatcgggagaagaaggccctgtggatccagcggaacctatccgggaagaagagaatgaaatgatcaaacttacagctcctttggaaattggcatgaggatgaacagcagacagcttgaaaaatatcctgccactcttgaaggcctcctaagtgagatgctcccacaacacgcagcgaagtag

SEQ ID NO: 248955 - RNA, 327 nt, synthetic construct
  misc_feature 1..327: note = Description of Artificial Sequence: Synthetic coding sequence
  source 1..327: mol_type = other RNA
atggtctcaaggaaggcagtggccgcactgttagtcgtgcatgttgccgccatgctggcctcccagacggaggccttcgtgccaatcttcacttatggagaattacagagaatgcaggagaaggagcggaataaagggcagaagaaaagtttatctgtgtggcagagaagtggggaagaaggaccggtagaccctgcagaacccatacgcgaagaagagaatgaaatgatcaagctgacagctcctttggaaatcggaatgcggatgaactcccggcagcttgaaaaataccccgccacacttgaaggattattaacagccaagtag

SEQ ID NO: 248956 - RNA, 17121 nt, synthetic construct
  misc_feature 1..17121: note = Description of Artificial Sequence: Synthetic coding sequence
  source 1..17121: mol_type = other RNA
atgggggccccatcagcctgccgcacactcgtacttgcattagcagccatgctcgtagtccctcaagccgagactcagggccccgtggaacccagctgggaaaacgcaggtcacacaatggacgggggcgcccccaccagctcacctactaggcgggtttcatttgttcccccagtcaccgtgttccccagcctgtccccactgaaccctgctcataacggccgggtttgctctacttggggcgatttccattacaagacatttgatggcgatgtgttcagattccccgggctgtgtaattatgtgttttcagagcattgccgcgccgcgtatgaagatttcaatgtccagctgagaagaggattagtgggaagtcgccccgtagtaactagggtagtcattaaggcccagggtctggtgctcgaagcaagcaatggatcagttcttatcaatggccagcgcgaagagctgccatatagtcgcacgggcttactcgttgaacagagcggagactacatcaaagtttcaatacgacttgtgctaaccttcctgtggaatggtgaggacagtgcactgttggagctggaccctaaatatgcaaaccaaacctgcggcctctgtggcgactttaacggccttcctgcgttcaacgaattttatgcccataacgcccgactgacccccctgcagttcggcaacctgcagaaactcgacggtcctactgagcaatgccctgacccgctgccgctacctgccggtaactgtacagacgaagagggaatctgtcaccgcacactgttaggacccgccttcgcagagtgtcacgcactggtcgactctacagcttacctagctgcgtgcgcccaggacctctgtcggtgccccacttgtccatgcgccacttttgttgaatactcaaggcaatgcgcacatgcaggcggccagcccaggaactggagatgccctgaactgtgcccgcgaacatgtcccctgaatatgcaacaccaagagtgtggttcgccatgtactgatacctgttccaaccctcaacgtgcccaactgtgcgaagatcactgtgtcgatggatgcttttgcccccccggctcaaccgtgctggacgacatcacccacagcggctgcctgcccctgggccagtgcccatgcactcacggagggagaacctatagtcccggaacatcatttaacactacgtgcagtagctgtacatgtagcggtggactgtggcagtgccaggaccttccttgcccaggaacctgctccgtgcagggtggagcgcacatcagcacctacgacgaaaaactgtatgatctgcatggcgattgttcctatgttctttctaaaaaatgcgctgactcttcctttacggtgctcgccgagcttcgcaaatgtggtctcactgacaacgaaaattgtttgaaagctgtcactctatccctcgacggaggcgacaccgcaattcgcgtccaggctgacggtggcgtttttctgaattcaatttacacccaactgccgttgtctgccgcgaacatcactctctttacaccctctagtttcttcattgtggtgcagacaggcctcggattacagctgctggttcagctagtgccactcatgcaagtttttgtgagactggaccctgcccatcagggacaaatgtgcgggttatgcggaaatttcaatcagaatcaggccgatgactttacagcactgtccggggttgtcgaggccaccggagctgctttcgccaacacctggaaggcccaggccgcatgcgcaaatgccagaaacagcttcgaggatccctgcagtttgtctgtcgaaaacgaaaactacgctaggcattggtgcagtcgtctgacagatccaaattcagcattctctcggtgccacagtattataaacccaaaaccttttcattccaactgcatgttcgatacttgtaattgcgaaaggtccgaagattgtctctgtgcggccctgagctcttatgtccacgcttgcgcagcaaaaggcgtacagctatctgattggcgcgatggtgtttgcacaaagtatatgcagaactgccccaagtcccagcgttatgcgtatgttgtggacgcatgccagcccacatgtagaggactctccgaagccgacgtgacttgttctgtgtctttcgttcccgtcgacggctgtacctgtccggccggaacatttctcaatgatgccggggcctgcgttcctgcacaagagtgcccgtgctatgctcatgggacagtgctcgctccaggcgaggttgtacatgatgaaggggcggtgtgttcatgcaccggaggcaagctttcttgtctgggagcgtccctacaaaaatctactggctgtgctgctcctatggtctacctagattgctccaattcctcagcaggcacccctggtgctgaatgccttcgctcttgtcacactttagatgttggctgcttttcgacacactgcgtttcaggctgcgtgtgccctcctgggctggtgtcagacggatccgggggttgtatagcggaggaggactgcccctgtgtgcacaatgaggccacatacaagccaggtgaaacgatccgagtagactgtaatacatgtacctgtcggaataggaggtgggagtgtagccacagactctgcctcggcacatgtgtcgcatacggtgacggtcatttcataacctttgacggagatcggtatagtttcgagggttcttgtgaatacatattagctcaggactactgcggagacaacaccactcacgggactttccggattgtgacggagaatatcccatgcggtactacaggtacaacttgctctaaggctatcaaactcttcgttgaaagctatgaactcatcctccaagaaggtacatttaaagccgtagcccgaggacctggcggcgatcctccctacaagattagatacatgggcatctttcttgtgattgagacccacggaatggcagtgtcctgggatagaaagacttccgtttttattagactgcaccaagattacaagggcagagtctgtggactgtgcggcaacttcgatgacaatgcaattaatgacttcgccactcggtctaggtctgtcgtgggcgacgcactcgagttcggaaactcctggaaactcagtccgagttgccccgatgcactagctcccaaagacccctgtaccgccaaccctttcagaaagtcttgggcccaaaaacagtgttctatcctgcacggccccacatttgctgcctgccgctcacaggtggacagtaccaaatactacgaagcttgtgtgaatgatgcctgcgcctgcgattcaggcggagactgcgaatgtttttgcactgccgtggctgcctatgcccaggcatgtcacgatgccggactctgtgtgagttggagaacccctgacacatgccctctgttctgtgacttctacaatcctcacggtggctgcgaatggcactaccaaccctgcggagcaccctgtctcaagacatgcagaaacccctcaggtcactgcctcgtggacctgccgggcctggaaggttgttatcctaaatgcccacctagccagccctttttcaacgaggatcaaatgaagtgtgtggcgcagtgtggctgttacgacaaagacgggaattattatgatgtgggagctagggtcccaacagctgaaaattgtcagagctgcaactgcaccccctccggcatccagtgtgcacattccctcgaggcctgcacatgtacctacgaagacagaacatactcataccaagatgtgatatataatacaacagatgggctcggagcgtgcctgattgcgatatgcggctcaaatggaactattattcgcaaagccgtcgcctgccccggtacgcctgccacaacccctttcacctttaccacagcttgggtgccgcactccactacctcgccagcccttcctgtatccactgtttgcgtgcgcgaggtttgccgatggtcttcttggtataatggacaccgaccagagcctggacttggagggggcgactttgagacttttgaaaatctgagacagcggggctatcaggtgtgccccgtactagccgatatagaatgccgggctgcccagttgccggatatgccgctggaagaactaggccagcaagtagactgtgaccgaatgagaggcctgatgtgcgccaattcccaacagtccccacctctgtgtcacgattacgaactccgtgtgctgtgttgtgaatatgtgccttgcggcccgagcccggcgcctggcaccagtccgcagccttctctctccgcgtctaccgaacccgccgttcctaccccgacccagactaccgccacagaaaaaacaacactatgggttacaccatcgattcgttccacagccgcccttacatctcagaccggcagtagctccggcccagttaccgtcacaccttctgccccggggaccaccacatgtcaacctcggtgtcagtggactgaatggtttgacgaggattaccccaagagtgaacagctgggcggagatgttgaatcatatgataaaataagagctgcaggcggccatctgtgtcagcaacctaaggacattgagtgccaagcagaatcattccccaattggacccttgcccaggtcggacagaaagttcattgcgatgttcatttcggactagtttgcagaaactgggagcaggagggggtgttcaaaatgtgttataactaccggatccgggtgctgtgctgttctgacgaccattgcaggggacgggcaactactccgcctccaactaccgaattagaaaccgccactaccacgaccacccaggcattattctccaccccccaacctacctcctctccgggtctgacacgagcgccccccgcttcaactaccgccgttcctaccctgtcggaagggctgaccagccctcgctacacctctacacttggtacggctaccaccggaggccctacaactccagccggctctactgagcccaccgtacctggcgttgcaacttcaactcttcccactcgatcagcacttcccggcaccacgggctctctaggaacatggcgcccttcacaacctccaacactagccccgactacgatggccacaagccgcgcccgccccacaggcaccgcctctaccgcatcaaaggaacctttgacgactagcctggctcctactctgacatctgaactttctacctctcaagcagaaacaagcactccgcgcaccgagactacaatgagccccctcactaataccacaacctctcagggtactacgagatgtcaaccaaaatgtgaatggactgagtggttcgatgtggactttcctacaagcggcgtagctggaggcgacatggagacttttgagaacatcagagctgcgggaggcaaaatgtgctgggcccctaagtcgatcgaatgccgcgcagagaattaccccgaagtctcaatcgatcaggtgggtcaagttctgacctgttcactggaaaccggcctgacctgcaaaaatgaagaccagaccggacgtttcaatatgtgttttaactataacgtcagagttctgtgttgcgatgattactctcactgtccaagcacccctgccacttcaagcacagcaacaccttcctccacaccaggcaccacttggattctcactaagccaacaaccacggcgaccaccacagcatccaccgggagtacagccacccccacatcaactctccgcactgctccaccaccgaaagtgttgactactacagccaccactcctacagttacatcttcgaaggccaccccctcttcaagcccaggaacagcaactgccctaccagcccttaggtcaactgctacaacccctaccgcaacatccgtcacccccatcccatcctctagtttaggaacgacctggacgagactatctcaaactaccacgccaaccgccactatgtcaaccgctacaccaagctcaacccctgaaacggctcatacaagcactgttctgaccgccacagctaccaccactggggccaccggatctgtcgcaacgccaagtagtaccccaggaacagcccatactaccaaagttccaacaacgacaaccacaggttttacagcaacccctagttcttcccctgggaccgcactcacaccccccgtatggatttcaaccaccaccacacctaccacacgaggaagcacagtcactccttcatctatccccggcacaactcacacggccacagtgctgacaacaacaacaacaaccgtggccaccggtagcatggcaactccttccagttctacacagacgtcaggcacgcccccttcacttacaaccaccgccaccaccatcactgccacaggttctacaaccaatccctcttctacccccggaaccaccccaattcccccagtattaacaacaactgcaacgactcccgccgcgactagtaatactgtgacacctagctccgctcttggaaccacacacactccccccgtcccaaatactatggccaccacccacggacgctccctgccccccagctcacctcatacagttcgcacagcatggacctctgctacatctggcattctgggaactacccacatcaccgagccgtctactgttacttcccacacattagcagccacaaccgggaccacccagcatagcacccccgcattgagcagcccacatccatcgtcacgaacaactgaatccccaccatcacccggtacaaccacccctggccataccactgccaccagccgaacgaccgccactgccacgccttccaagacccgaactagtaccttgctgcctagctcccccacatccgcccccattactacagtcgtcactatggggtgtgaaccacagtgtgcatggtctgaatggcttgattactcatacccaatgcctggaccatcaggcggcgattttgatacatactctaatataagagctgccggcggcgccgtgtgcgagcaaccactaggcctggaatgtagagctcaagctcagcccggcgtgcccctccgggagctagggcaagtggtggaatgctccctagatttcgggctggtctgtaggaatagagaacaggttggtaaatttaaaatgtgctttaactacgaaataagagtcttttgctgcaattacggccattgcccaagtacccccgccaccagcagcactgccatgccttcctcgacacctgggaccacctggatcttgaccgaactgactactaccgcaaccactaccgagtcaaccggttcaacagccaccccatcctctacacctgccaccgccgggactcctcacgtttccacaaccgccacgacgcccacggtaacctctagcaaagccacaccattttcctctccgggcacagcaactgcactcccagctctccgatcaactgccaccacaccaaccgccaccagttttacagcaatccccagttcctccctcggcactacctggacccgccttagtcaaactaccactcctaccgccaccatgtcaaccgccactcctagttcaacccccgaaaccgtgcacacttctaccgttcttacaacaactgcaactactaccggtgccacgggctcagtagcgactccttccagtaccccaggcaccgcccacaccaccaaggtccttactacaacaacaacagggtttaccgccacaccctccagtagtccgggaacagcacggacacttcctgtgtggatttcaacaaccaccactcctacaacacgaggttcaaccgtgacaccctcatcaattccaggaaccacccatactcctacagtactaacgaccactaccaccactgttgctaccgggagcatggcgactccttcttcctcaacccagacatctggtacccccccatctctgaccactaccgccacaacaattacagccacaggatcaactacaaacccgtcctccactcctgggaccacaccaatcccccctgtcctaactaccacagccacaactccggcagctactagctcgactgtgaccccctcctcagccctgggcacaactcacacaccaccagtccccaatactactgctacaacccacggtcgctccttgagtcccagctccccacacacagttcgcaccgcctggacatcagccacttctggtacacttggtactacccacatcacagagccgagcaccggcactagccacacccctgccgccactacaggaaccacgcaacatagtactccagccttgtcttccccgcatcctagttcaagaacaactgaatcgccaccgtcccctggcaccaccaccccagggcacactcgcgctaccagtaggacaactgccacagctacaccatcaaagacacgcacttcgacactcttgcccagctctcccacatcagcacccatcaccacagtggttacaatggggtgtgaaccgcagtgtgcatggtcagaatggttggactactcctaccctatgccaggaccgagtggcggggattttgacacatatagcaacatacgcgcggcaggaggcgctgtctgcgaacagccattgggactagaatgccgagcacaggcccagcctggcgttccattgagagaactaggccaagtcgtggaatgctcacttgattttggtctcgtatgcaggaacagggaacaagttgggaaatttaagatgtgctttaactacgagatacgggtgttctgctgtaattatggtcactgcccttcaacacccgcaacttctagcactgccactcccagttctacccccggcaccacctggatactgactgagcagaccacagccgctaccactaccgcaactacaggctctaccgctatcccctcctccacccccggaacggcgcccccgcctaaagtgttgaccagtaccgccaccacaccaaccgcaacctcaagcaaagccaccagctcctcatctccccgaaccgccaccaccctgcctgtccttacctctacagcaactaagagcactgccacgtcctttactccgattccgagtttcacactggggactactgggacgcttccagagcagaccaccacacccatggccacaatgagcacaatccatccctcttctacacccgaaaccacccacaccagcacagttctcactaccaaagccacgaccacccgcgctacttcttccatgtctacaccctcgtctacacccggcaccacttggatcctcacagaattaactaccgctgctaccacaacagccgcgaccggacccaccgccaccccatctagcacacccggcactacatggattttgaccgaaccctcaacaaccgctacagtcacagtcccaactgggtctaccgccacagctagctcaaccagggccaccgccggcactttgaaagtattgacctccaccgccacaacgcctacagtaatttcttctcgggcgactccgagttcatcacccggtacagccaccgcacttccagcgctgcgatcaaccgctactaccccaacagcaacaagcgtgaccgctattccttcttcatcactgggcacagcatggactcgactgtctcaaaccacgacccctactgcgaccatgagcaccgcaacaccctcctccacacccgaaaccgtgcacaccagcaccgtgttaacaaccaccacaactacaactcgagccaccggctcagttgcgactccatcctcgacaccaggcactgcgcatacaacgaaagtaccaactacaacaaccacgggctttaccgctaccccctcttcctcccccggcacagctttgaccccccctgtttggatatccaccaccaccacgcccactacaagaggttccaccgtgacgccctccagtattcccggaacgactcacaccgccaccgtgctgaccaccacaactacaaccgtcgccacagggagtatggccactcctagtagttccacccagacatcaggcacccctcctagcttgacaacaacagccactactataaccgcgacaggttccactaccaacccaagctcgaccccaggaacgactcctatccccccagttttgaccaccacagccaccacccccgccgccacctcctccacagtgacaccttcttctgcactcgggactacacatacccctcctgtgccaaataccaccgccacaacccatggacgcagtctgccaccctcaagcccacacaccgtcaggaccgcctggactagtgccacctcagggatccttggaacgactcacatcacggagccctcaacagttacttctcataccccggcggccacgacatctacaactcagcactctacccctgccctctcctcccctcatccttcttctcggaccacagaaagtcccccaagccctggaacgacgacacctgggcacacccgcgggactagtagaaccacagctacagctaccccctcaaagacacggacatcgactctcctgccaagtagtccaaccagcgcccccataaccacagtcgtaaccaccggatgcgagcctcagtgtgcctggtctgaatggctcgattacagctatcccatgcccggaccttcaggcggcgatttcgacacatattcaaatatccgtgctgccggtggagccgtatgcgagcaaccactagggttagagtgtagagctcaggcccagcccggtgttccactgcgggaattgggccaggtagttgagtgctcattggacttcgggctcgtttgcagaaacagagaacaggtcggcaaatttaaaatgtgtttcaactacgaaatccgcgtgttctgttgtaactatggccattgccccagcactcctgcaacttcatcaaccgctactccttcttccacacctggaaccacttggatactgacaaaactcactacaaccgcgacaaccacagaatccacaggctcgacagccacgccttcaagtacaccaggagcaacagccgggacacctcatgtgagtactaccgctactactccgaccgtgacatcctcaaaagccaccccattctcctctcccggaactgccaccgccttacccgccctgagaagcactgcaaccactccaaccgcaacttccttcaccgccatcccatcctcttcactcggaacgacttggacacgcctatctcagactacaaccccaacagctactatgagcactgccactccatccagcaccccagaaaccgcccacacatccacagtactgaccacaaccgccactaccactagagccacaggaagtgtggctacgccatcctcgactcctgggaccgcccacacaactaaagtacctacaacaacaaccaccgggtttaccgtcacccccagctcaagcccaggcacagccagaaccccgcctgtatggatatcaacaaccaccaccccaaccacaagtggctccactgttaccccttcgagtgtgcctggcactacacacacgcctacagtgctgaccacaactacaaccactgtcgccacgggctctatggccaccccctcatcatcgacccagacatctggcacgcctccttctctgatcacaaccgcaactacaatcactgccacaggctctaccaccaatccctcgtccacccctggcactacacccattccacccgtgctgactacaactgccaccactcctgctgcgacatcttcaacagtgaccccctcatctgcccttggtactactcacaccccaccagtcccaaataccactgcaacgacccacggccgctccttatctcctagttcgccacacacggtgcgcactgcctggacctctgcaacatcgggcacgctgggtaccacccatatcactgaaccttctacaggaacaagtcataccccagctgctactactggcactacccagcactcgacaccagctctgagctctccgcaccccagttcccgcaccaccgaaagtccacccagcccagggacaacaactcccggacacacgaccgctactagccgtaccacagcaacagccacaccaagcaagacaagaacaagtaccctactgccctcctcccccacctcagcccctataacaactgttgtaactacaggatgcgagccccagtgtgcctggagtgaatggctggattactcctaccccatgccaggcccatctggaggtgatttcgatacctatagtaacattagggcagccgggggagcggtttgcgaacagccattgggtctagaatgtagagcacaggcccaacccggcgttcctttaggcgagctcggacaggtcgtggagtgctctttggacttcggtcttgtgtgccgaaaccgcgagcaggtaggaaagtttaaaatgtgttttaactatgaaatcagggtcttttgttgcaactacggccactgcccgtctaccccagctacatcaagcacagcaatgcccagtagcacgcccgggactacttggatcttgacagagctcacaacaaccgccaccacaacagcctctacaggaagcaccgccacaccaagttcgactcccggcacagctcccccacctaaagttctcacttccccggcaaccacgccaacagcaacatccagcaaggccacatcctcctcatcaccgcgaacagccactacactgccagtactaacgtccacagctactaagtccaccgctacctctgtgacaccaataccatcctctacattaggcactaccggaaccctgccagagcagacaacgactcctgttgctacaatgagcaccattcacccatcctcaacccccgaaacaacacacacctctacagtcctaacaaccaaagccaccaccacacgggcaacttcatccacttcgactccctcctccacccccgggactacctggattctcacggaactcaccacagccgcaactaccacagcagcaaccggtcctaccgctaccccatcttccacccccggtactacttggatcctgactgaactgactactactgcaacaaccacagcaagcaccggttccacggcaacccctagcagcactcccggcacaacttggatcctaaccgagcccagtactactgcaactgttacagtcccaaccggatcaacagcaactgcatcctcaacccaggccacagccggtaccccacacgtttccactacggctaccactcccacagttactagctcaaaagccacgccctctagttcacccggcacagctactgctcttccagccctgagatctacagcaaccaccccaacagccacctcctttacggcgatcccatctagctctcttgggaccacgtggactagactcagccaaacaacaaccccaactgccaccatgtccactgccacgccctcaagtacgcccgaaaccgtacatacttcaactgttttaactgccactgctactactacaggggccactggcagtgttgccacaccctcatccactcctggtacagcgcatacgaccaaggttcctactacaactaccactggttttacagcgacgccttcctcatcccctggtacagccttaaccccgcccgtctggatcagcacaaccacaacgcctaccaccacgacccccacgacatccgggtcaaccgtgaccccgagctcaatcccaggaactacacacacagcacgcgttcttacaacaacaacaaccaccgtagctaccggttccatggctaccccctcaagtagtacccagacatcaggtactcccccatccctcaccacaacagcaaccacaattacagccaccggcagcaccactaacccaagctcaacgcccggaacaacaccaattacacctgtcctgacctctaccgccacgacccctgcggccacatccagtaaagccaccagctcttcatccccacgcaccgcaactacgttaccagtcttaacctccactgccacaaagtctacagcaacgagtttcacacccataccatcgagcaccctttggacgacttggacagtgcctgcccaaacaaccacccctatgtcaacaatgagcacaatccacacaagtagcacacccgaaaccacccataccagcacagttttaaccacaaccgccaccatgactcgggccactaattccaccgcaactccttcctccacgctcggaactacacgcatactcacagagctgactacaaccgcgaccaccacagcagcaactggaagcaccgccaccctgagttccacccctgggacgacctggattcttaccgagcctagtaccatagctactgtcatggtgccaaccggcagtactgcgaccgcatcctcaactctaggcacggcccatacccctaaagtcgtgacaacaatggctactatgcctactgccaccgcctcaactgttccctcatcctctactgttggcactactcgcacacccgccgtgcttccaagctctctccctacctttagtgtgtccacagtatcctcctcagtcctcacaacactccgtcctactggctttcctagttctcacttttccaccccatgcttctgccgagctttcggccaattcttctcccctggtgaagtgatttacaataagactgaccgagccggatgtcatttttacgcggtatgtaatcagcattgcgacatcgatagattccagggcgcatgtcctacctccccccctcccgttagcagcgcaccactctcttccccttcccccgcacccgggtgcgataatgcaatccccctccggcaagtaaatgagacctggacactcgaaaactgcacagtggctcggtgcgtgggcgacaaccgagtggtgctcctggatcccaaacctgtggctaatgtaacttgcgtcaataagcatctccccatcaaagtcagcgacccatcccaaccttgcgacttccattatgaatgcgaatgtatttgctcaatgtggggaggttcacactatagcacttttgatggtacgagttatacctttaggggcaattgtacctatgtcctgatgcgcgaaatccatgcccgattcggaaacctcagcctttaccttgataatcactactgcaccgcaagcgccaccgccgccgcagcccggtgcccccgagccttgtctatccactacaaatctatggacattgtgttgaccgtgactatggtccatggaaaggaggagggattaatcttgttcgatcagattccagttagcagtgggtttagcaagaacggtgttttggtgagcgttctgggcaccaccaccatgcgtgtagatatccctgccctcggcgtatccgtcactttcaatggtcaggtctttcaagctagactgccttattcacttttccacaataacaccgagggtcaatgcggcacgtgtactaacaaccagagggatgactgccttcagagagacggtaccactgcagcatcatgtaaggacatggcaaagacctggcttgtcccagatagtaggaaggacggatgctgggccccaacaggaacccccccgaccgcttcccctgcagctccagtgtcaagtacccccacaccaactccatgtcctcctcagcccctgtgcgatttaatgctttcccaggtgttcgcggagtgccacaacctagtccctcctggcccatttttcaacgcttgtatatccgaccactgccgcggtagactggaggtgccatgtcagtcgttagaagcgtatgccgaactttgccgagctcgaggcgtgtgctccgattggaggggagcaaccggaggcttatgcgaccttacatgtccaccaacgaaagtgtacaagccctgcggacccattcagcctgccacatgtaattctagaaatcagtcaccacagctcgagggcatggccgaggggtgtttctgtcctgaagaccaaatattatttaacgcacacatgggaatctgcgtgcaagcttgcccctgtgtcggtcccgacggtttcccaaagtttcccggagaaaggtgggtgtcaaattgccaatcatgcgtgtgcgacgagggatccgtgtccgttcagtgcaaacctctgccctgcgacgctcaaggacagcctcctccctgtaaccggcccggatttgtcacagttactagaccccgagccgaaaatccttgttgtccagaaaccgtatgtgtatgcaataccacgacctgtccccagagtctgcccgtctgccccccaggccaggagtctatctgtactcaggaagaaggggactgttgcccaaccttccgatgtcgaccccaactctgttcctataacggaacgttctatggcgttggcgccacttttccaggcgcattaccctgccacatgtgtacatgcctcagtggagatacacaagatcctacagtgcaatgccaggaagacgcctgtaacaacaccacatgccctcaaggattcgagtataaaagagtcgcaggacaatgttgcggcgagtgtgtccagaccgcgtgtctcacccccgatggccagcctgtccagctcaatgaaacatgggttaattcgcatgtggacaactgtaccgtctacctttgtgaggcggaaggaggagtccacctgctaacaccccagccagcctcctgccccgacgtatctagctgtaggggcagtctgcgtaagaccggttgttgctactcgtgcgaggaggactcgtgccaggtccggatcaacacaactatactatggcatcaaggatgcgagacagaagtgaatattacattttgcgaagggagttgtcccggggcttccaaatacagcgccgaggcccaggccatgcagcaccagtgcacatgctgccaggaacgacgagttcatgaggaaacagttcccctgcattgccctaacggatctgccatcctccacacttacacccacgtcgacgagtgtggctgtactccattttgcgtgccggcacctatggctcccccgcacacccgaggattcccagcccaggaagccacagccgtttag

SEQ ID NO: 248957 - RNA, 16587 nt, synthetic construct
  misc_feature 1..16587: note = Description of Artificial Sequence: Synthetic coding sequence
  source 1..16587: mol_type = other RNA
gctcccaggatgggcgcacccagtgcttgccggacattggtgcttgctttggccgctatgctggtagtgccacaagccggaaagagtccacctttgcgaccactgagcagaaattccggcgccggcttagacggtggcgcgcccaccagctccccaactagacgagtgtcatttgtgccccctgtgacagttttcccttccttgagccgcaaacaaatgctgcccctaccagccggcaagggcgtgtttgcatctccaaaaggtggcgggccagacctcggcgtgcagctaccccccgcccttaatcccgctcacaatgggcgtgtctgctcaacatggggggactttcattacaaaacttttgacggggacgtgtttagatttcccggactttgtaactatgttttctcagaacactgtcgcgccgcgtacgaggatttcaatgttcagctcaggcggggcctggttggaagtcgtccggtggttactcgcgtcgtcataaaggctcaaggactcgttttggaagcttctaatggcagcgtcctgatcaacggtcagagagaggaactgccctattcacgcactggactgctggtagaacagtcaggagattacattaaggtcagcataagactggtgctcacttttctatggaacggcgaagacagcgcgctgctagagctcgaccctaaatacgcaaaccaaacatgtggcctttgtggcgatttcaacggcttgccagcatttaacgaattttatgcccacaacgctcgtttgacccccctccagtttggaaacctccagaagctcgacggccctaccgaacagtgtcccgatccactcccattgccagccggcaactgtacagacgaggaagggatctgccaccgtaccctgttgggacctgcattcgccgaatgccacgccctggtggacagcacagcttaccttgccgcttgtgcccaggatctgtgcaggtgccctacatgcccgtgcgcaaccttcgtcgaatatagcagacaatgcgctcatgccggggggcaacctcgcaattggagatgtcctgaactttgtccacgaacctgtccccttaatatgcagcatcaagagtgcggttcaccatgtacagacacctgtagtaacccacaaagggcccaattgtgtgaagaccattgcgtcgatggctgcttttgcccacccggccgctcatgtacagtgctcgatgacattacacactccggctgtcttcctcttggtcaatgtccttgtacacatggtggaagaacttactcccctggtactagctttaacaccacctgctcctcttgtacttgcagcgggggtttgtggcagtgccaagatttgccttgtcccggaacctgctccgtacagggtggggctcatatatcaacatacgacgagaagttatacgacctccacggggactgctcgtacgtgctgtctaaaaaatgcgcagattcaagttttaccgtactggcagagctccgcaagtgtggactgacggataatgagaactgtctgaaggccgtaactctgtcacttgacggtggggataccgctatccgcgtccaggcagatggaggcgtattcctcaacagcatttacacccagcttcccttgtccgccgcaaatatcaccctgttcaccccttcctccttcttcattgtggtccagacaggactgggattacagctgttagtccaactcgtaccattgatgcaggtgttcgttaggcttgaccccgcacaccaggggcagatgtgtggcttgtgcggtaattttaatcaaaaccaagccgacgattttactgctctatccggagtcgttgaagcaaccggtgccgcctttgcaaatacctggaaagcccaagccgcctgtgccaacgcccgaaatagctttgaagacccgtgcagcctgagcgtcgagaacgaaaactatgccagacactggtgctctagactgaccgacccaaactccgcattcagcagatgccatagtataataaacccaaagccattccattccaactgcatgttcgatacatgcaattgtgaacgaagtgaagactgcctgtgtgctgccctgagttcctacgttcatgcatgtgccgccaagggcgtgcaactgtctgattggcgagatggtgtctgcaccaagtacatgcagaactgccccaagtcccagcgatacgcgtatgtggtggacgcctgtcaaccaacttgtagaggtctttcagaggccgacgttacctgctcagtctcctttgtacctgttgacggctgtacctgtccagctggtaccttcctcaatgacgccggtgcatgtgttcctgcacaagaatgcccctgttatgcccacggtaccgtccttgccccgggggaagttgtccatgatgagggtgcggtgtgtagctgtactggaggaaaactttcatgtctcggagcctccctgcagaagtctacaggttgcgccgccccgatggtctatctggactgttccaactcgtctgcaggaacccccggcgccgagtgcctacgaagttgtcataccctcgacgtcggttgcttttcgacgcattgtgtctctggctgtgtgtgtccacctgggctggtctctgacggtagcggcggttgtattgccgaggaggactgtccttgcgtgcataatgaagcgacctataaaccaggcgagacaattagagtggattgtaatacttgcacatgtcgtaatcgaaggtgggagtgcagccacagactctgcctcggaacctgtgtggcttatggagatggacattttataaccttcgatggggatcgttacagcttcgaaggctcatgcgagtatattctagcgcaggattattgcggcgataatacaacccacggaacctttcggattgtcactgagaacattccatgcgggacgaccggaacgacctgtagtaaagcgattaaactgttcgtggaagtaaggactgcccccgcggtcagtacaccagatcccgcagcaaatgaacctgcccctagagaagctagtgtcggatttagacagagattgcctccccttcaatcttatgagctgattctgcaagagggaactttcaaagccgtggctcggggacccggcggcgaccccccttataaaattcgctacatgggcatatttttggtgatcgagacacacggaatggctgtgagctgggatcgaaaaacctccgtttttatccgcttacaccaggattataaaggaagagtgtgcggattgtgtgggaacttcgatgataacgccatcaacgatttcgcaaccaggtctaggtccgtcgtaggcgacgccctcgagttcgggaacagttggaaactgagcccttcatgtcctgacgccttagctcccaaagacccttgtaccgccaatccatttcgtaaaagctgggctcagaaacagtgttcgatcctccatggccccacatttgctgcatgccggtctcaagttgattctacaaagtattatgaggcttgcgtcaatgacgcctgtgcctgcgattccgggggagactgcgagtgtttctgtactgccgttgccgcttacgctcaggcgtgccacgacgctgggctgtgtgtttcttggcgcacccccgacacatgccccctgttctgcgacttttataacccccatggaggctgcgaatggcactaccagccatgcggggcgccttgcctaaagacatgtagaaacccctctggccattgtttagtggacctgcctggattagaaggctgctaccccaaatgtccaccgtctcaacccttttttaacgaggaccagatgaagtgcgtggctcaatgcggctgctacgacaaagatggtaactactacgacgttggcgctagagttcctacagccgaaaactgccagtcctgtaactgtaccccatcgggtatccaatgcgctcactcactggaagcctgtacctgcacttatgaagaccgtacctactcctaccaagacgtgatttataacactactgatggactcggcgcatgtttaatagcaatttgtggctcaaacggcacgattattcgtaaagctgtggcatgcccgggcaccccagctactactcctttcactttcacgaccgcttgggtccctcactcaaccaccagccctgccctacccgtcagcacagtatgtgtgagggaagtatgtagatggtcatcctggtataatgggcacagaccggagcccggactaggcgggggagattttgaaacctttgaaaaccttaggcaacgaggatatcaagtatgccccgtgctcgccgacatcgagtgtagagctgctcagttgcccgatatgcccctggaggagttaggtcagcaggttgattgtgatcggatgaggggcctcatgtgcgcaaattcgcaacagtcaccacctctttgtcatgattacgagctgcgggtgttatgttgtgagtacgtgccttgtggcccctccccagcccccggcacgtcaccacaaccgtctctgtcagccagcactgaaccagctgtacccacccccacccagactaccgctactgagaagacaaccctgtgggtaaccccatccattaggagtacagctgccttaacatcccagacaggctcaagttccggtccagttactgtgactccttcagccccaggtaccactacctgtcaaccaagatgccagtggaccgaatggtttgatgaagattacccaaagtcagaacagctcggtggcgatgtcgagtcctatgacaagatcagagcagcaggcggtcacctgtgccaacaaccaaaagacatcgagtgtcaggcagaaagctttcccaactggacgctcgcgcaggtcggtcagaaagtccactgtgatgtgcatttcggtctggtgtgccgcaattgggaacaagaaggtgtctttaagatgtgctacaactatagaatccgcgtgttatgctgtagcgatgatcactgccgcggccgagctaccactcctcctccgaccacggagttggaaacagctaccactaccaccacccaagccctcttcagtacaccccaaccaaccagcagccccggtctcacccgtgcccctcccgcctcgaccaccgcagtaccaaccctttctgaaggattgaccagtccccgatacactagcacgctcgggacagccactaccggaggtccaacaactccagccggcagtacagagcctacagtccccggcgtggccacttctaccctgccaacccgaagtgccctgcccggcactaccggatccttgggcacttggcgaccatcccagccccccactctggctccaactaccatggcaactagtcgggctcgtcctacaggaacggcttctaccgcctccaaggagccactgacaactagcttggcacctacattgacctcagaattaagtacctcgcaagccgagacaagtacccctagaactgagactaccatgagccccttgaccaacacaacaacctctcaaggcacaactagatgtcagccaaagtgcgagtggacagaatggttcgacgtggacttccccacctctggcgtagccggcggggatatggagacatttgaaaatataagagcggccggcgggaagatgtgttgggcccctaagagcatcgaatgtagggcagaaaactatccagaagtcagcattgaccaagttggtcaagttctcacttgctctcttgagaccggcctgacctgcaaaaatgaagaccagacaggaagattcaatatgtgctttaattataatgttcgcgtgctttgctgcgatgactacagccactgcccctctacaccagccacatcctctaccgccaccccctcttcaaccccaggaactacatggatcttaaccaagcctacaacaacggcgacaactactgcatcgactggaagcaccgctaccccgacttcgaccctgcgcaccgcccctccacccaaggtccttaccacaactgctaccacgcctactgttactagtagtaaagctacaccctcatcatcccccggaactgctaccgccttgcctgctctccggtccaccgctacaaccccaactgctaccagtgttacaccaatcccttccagcagcctcgggaccacctggacacgcctctctcaaaccacaacgccaacagctaccatgtccaccgccacacctagttccactccagagactgcccacacctccacagtccttaccgccacagccacaaccaccggcgctacaggctctgtggccaccccttcatccacccccggcaccgctcacaccactaaagtgcctacaaccactaccaccggtttcactgcaacccccagctcctcaccagggaccgccttgacaccccctgtgtggatttctacaacaaccacccccaccacccgcggcagcacagtaactccttcatccatacccgggacaacgcacactgcaaccgtgttaactactaccactaccaccgtcgcaacaggaagtatggctactccttccagcagcacacagacttccggaacaacccacaccccccctgtccctaatacaatggccaccactcatggacgaagcctgcccccctcatctcctcataccgtcaggactgcatggacatcagcaacctctggaatcctcggaactacccacataacagagccatcaactgttacgagccacaccctggccgccaccaccggtaccacgcaacattccaccccagcgctgtcgtcaccccacccttcttcacgcacgaccgaatctccacccagccctgggaccactacccccggacatacaaccgctacgagtcgcactacagcaaccgcaaccccttcaaagactcggacctcgacccttctgccctctagccccacctccgccccaataacgacagttgtcactatgggctgcgagcctcagtgtgcttggtcggaatggcttgattactcttacccgatgccagggccttcaggaggcgactttgacacatacagtaacataagagctgccggaggagccgtgtgcgaacagcccctgggactggaatgtcgtgctcaagcccaaccaggcgtacccctgcgcgaactcggacaagtggtggagtgtagcctggatttcggacttgtttgtcgtaaccgagagcaggtaggtaaattcaagatgtgctttaattacgaaattcgggttttctgttgcaattatggacattgtccttcgacccctgctacctcttcaaccgccatgccctcgtctacaccgggaacaacctggattctgactgaactgacaaccaccgccacaactaccgaaagtacaggcagtaccgcgactccatcatctacccccgggaccacatggatcctgacggaaccatctaccaccgctaccgttacagtgccgacgggctccactgctaccgcttctagtactcaggctacagccggcactccccacgtcagcaccaccgcaacaacacccactgtaacttcgtctaaagccactcctttttcctcaccaggcaccgcaaccgccctccctgccctcaggtcaacagcaactacgcccaccgcaaccagcttcaccgcaattcctagctccagcttaggtactacatggaccaggctgagtcaaactacaactcctactgccactatgtcaaccgccacccccagtagcacaccagagacagttcacacctcaaccgtcctaactactacagcgaccactaccggggcaaccggaagcgtcgctacccctagttccacccccggcactgctcataccactaaagttctcactaccaccaccaccggattcactgccaccccgtctagttcccctggaacggcccggactcttccagtttggattagtaccactacaactccaactacacgcggatcaacggtaaccccttctagcatccctggcaccactcacactccaacagttttgaccacaactaccactactgtcgctactggttcaatggccacacccagttcctctacccagacatcaggcacaacccacacacctcctgtgcctaacaccacagcaactactcacggcagatccctgagcccgtcaagtccacatacagttcgtacagcatggacatcagcgacaagcggcacccttggcactactcacattaccgaaccttctacaggcacttcacatacacctgctgccacaacaggaaccacacagcactcaacacccgcactcagctctcctcacccttcctcccgtaccacggagtctccaccctctccaggcactacaacccccgggcacacccgagccaccagccgaacaaccgcaactgccaccccgtctaaaactcgaaccagtacgctcctgccgtcctccccgacttctgcccctattactactgtcgtaacaatgggttgtgagccccagtgtgcctggagtgaatggttggattatagttatcctatgccagggcctagtggcggcgacttcgatacatactctaacatccgtgcagcagggggtgcggtgtgcgaacaacctctgggcctggaatgccgagcccaggcacagcccggtgtgcctctaagagaactcggccaggtagtagaatgtagcctggacttcggactcgtgtgtcgcaaccgagagcaggtcggaaagtttaagatgtgttttaattacgagattcgcgtattctgctgcaactatggacactgtccctctacacctgccacctctagcacagccactcctagcagcacccctggaacaacctggattctcacagagcagaccactgcagcaactactaccgccacaacaggcagcacggcaattccttcaagcacccctggcactgcaccgccccctaaagtccttacgagcacagctaccacgccaacagcaacgagcagcaaggccacctcgtcatccagcccaagaacagctacaacactcccggtactaacctctacagcaaccaagtccaccgccacttccttcacccccatccccagcttcaccctaggaactacaggaaccctccccgagcagacaacaacacccatggccactatgtccactatccatcccagctctacacccgagacgactcacacttcgacggtcctcacaactaaagctactacgactagagccactagcagcatgagcactcccagttcaactcctggcacaacatggattttgaccgaactgactacggccgctacaactactgcagccaccggaccaaccgctacaccaagcagtacacccggcaccacctggatacttactgagccatccaccaccgccacagtcactgtccctaccggatctactgccacagcatcttccaccagagctaccgcaggtaccctcaaagttctaacaagcaccgcgacgactcccactgtcatctcctcacgtgctactccctcatcctcccccggcaccgcaaccgctttgccggctttgcgcagcactgccacaacaccaactgctactagcgttactgctattcctagttcatccctcggaaccgcatggacccgcctctcacagaccacaaccccaaccgcaaccatgtccactgccaccccttcctccactcccgaaaccgtgcatacctctaccgtgctcaccactactacgaccacaacccgcgcaaccggctccgtcgccaccccctctagcacacctggtaccgcccatacaacaaaagtaccaaccaccaccaccaccggctttacggctacacctagctcttcccctgggacagctcttacgcccccggtttggatttctactaccacgaccccaaccacccggggctcaactgtaacacctagctctattcctggaacaactcatacagcgactgtgctaactactactaccactacagtggccacagggtcaatggccactcctagctccagcacacaaacctcaggaactacacataccccccccgtgccaaacacaacagctacaacccacggacgatcactgccgccatcctctcctcacacagtgcgcacggcctggactagtgctacctccggcattctcggcaccacacacatcaccgaacccagtactgtaacctcccatacacccgccgctacaacttccaccacccagcactccacaccagccctgtcttccccacatcccagttcaagaactaccgaatccccccccagtcctggcactacgacccccggtcacacacgcggcacctctcgtaccaccgctacagccaccccttcgaaaactcgtacctccaccctactgccctcatccccaacctcagcacccatcacaaccgtggtaactacaggctgcgagccacagtgtgcctggtcggagtggttggactatagctatcctatgcccggtccctcaggcggagattttgacacctattctaatatccgggccgccggaggggcagtatgcgaacagcctctgggcttagaatgtagagcacaggcgcaaccaggagtccccctgagggagctcggacaggtcgttgaatgctcgctcgactttggattagtgtgccggaatcgtgaacaggtcgggaagttcaaaatgtgttttaactacgagattagagtattttgttgtaattacggtcattgccccagcacgcccgctacatccagtactgccaccccctcatccaccccaggcactacatggatcttgactaaacttaccactactgctacaaccacagaatctacagggtctactgccacacctagttctacaccaggtacaacctggatcctgacagagccttcgacaactgcaaccgtgacagtgcctaccggatctacagccaccgcttcctccactcaagccaccgcaggcacaccccacgtgtcgacaactgcaaccacccccacagtcacatcatcaaaggctactccattctctagtcccggcacagcaaccgctctccccgcgttacgatccacagcaaccacgcccactgccaccagttttactgctatcccctcctcctctctgggcacaacatggaccagactcagccaaacgactacccccactgccaccatgtccaccgctacaccctcctctacacccgaaaccgctcacacttccacagttttgacgacaaccgctacaaccactcgcgcaactgggtccgttgcaaccccgtcatccacacccggcaccgcccacactaccaaagttcctacgacaactactacaggattcacagttacgcccagcagtagccctggaactgctcggactccgccggtgtggatctcaacaacaacaacacccaccacctcaggatccaccgttacccccagctcagtgcccggaacgacacacactcctaccgttcttacaaccaccactacaactgtagcgacaggcagtatggcgacaccttcctctagcacacagacctctggtactacccacacgcctccagtgcccaataccaccgcaaccactcatggccgttccctctccccttcttccccgcacacagttagaaccgcctggacctccgccacttccggaaccctgggaactacacacattacagaaccttccaccggcaccagtcatacacccgccgctactacaggaacaacccagcatagtacacctgcattatcaagcccccatccatccagtagaacaaccgaatcccccccatcaccaggaactacaaccccgggtcacaccacggcaaccagtcgaacaaccgctaccgctacgccttccaagacaaggacttcaacactgctgccatcatcccccacatccgctcccattaccaccgttgtcaccacaggatgcgagcctcagtgtgcgtggtccgaatggttagattatagttatcccatgcctggtccttccggcggagatttcgatacatatagtaacatccgggccgctggaggtgccgtctgcgaacagcctctaggcctcgaatgccgtgctcaagcccaacccggcgtgcctttaggagaattaggacaggtcgtagaatgctctctcgattttggcttggtttgcaggaaccgagagcaggtaggcaagtttaaaatgtgttttaattacgagattcgcgtgttttgttgtaattatggacattgtccctccacaccagctacatccagcaccgcaatgccgtccagcacaccagggactacctggatcctcacagagttaactacaaccgcaacaactacagcttctacaggaagtactgccacacctagttcaacccccggcacagcacctccaccaaaagtactgacctcacctgcaaccacacctaccgccacatcttcaaaggcaaccagcagctcgtccccccgcacggccactaccctgcccgttcttacatcaaccgccactaagtctaccgctacttctgtcacccccatcccgtcctccacactggggacaaccgggacacttccggaacagactaccacccctgttgccaccatgtctacaattcatccttccagtacccctgagactactcatacttccactgtccttactaccaaagctaccaccacccgggccacgagcagcacctcaaccccctcatccacacccggaaccacctggattctgactgaactgaccacagccgccacaaccactgcggctactggacccacggcgactccctcatcaactcctggaacgacctggatcctgacagaactcactactaccgcaaccacaacagcctctaccggatctaccgccaccccgagctccactcctggcacaacatggatactaacagagccctccacgacagccacggtgaccgtccccacaggttccaccgccaccgccagctccacccaggctacagccggcactccccacgtttccacgactgccacaactccaaccgttacatcctctaaagctacacctagcagctcacctggaaccgccaccgccctgcccgccttgcgcagtacagcaaccacccccaccgccacatcttttaccgcgattcctagttcttctctgggcaccacatggacccgtctgtcccagaccacaacaccaaccgcgacaatgagcaccgcaactccatcatccactcccgagaccgtccacacctccaccgtacttacagcaaccgccaccaccacaggtgctaccggtagcgttgctacaccctcttcgactcccggtactgctcatactactaaagttccgactacgaccacgaccggcttcactgccactccgagctcctcaccaggcaccgccctcacacccccgactacaacaccaatgtctactatgtcaacaatccataccagtagcacgcctgaaacaacgcacacctctaccgttttgactactacggcgacaatgactagggccacaaactccacagcaaccccgagcagcacactaggcactacacgaattttgactgaacttaccacgaccgccactactacagcagcgaccggatcaacggccaccctctcctctacaccagggaccacatggatactcacagaaccttctacaatcgcaaccgtaatggtccccactggctcaaccgccacagcatcatctaccttgggtactgcacacacccctaaggtcgttactacgatggccacgatgccaactgccaccgcttcgacagtaccatcctcatctacagttggtaccacgcggacccccgccgtcttgccatcgtccctgccaacattctcagtctctaccgtgtcctccagtgtcctcaccactctccgccctacaggattccctagttcacacttctcaacaccatgtttctgtcgcgcctttggccagttctttagtcccggagaagtgatatataacaaaactgacagagctgggtgtcacttctatgctgtgtgtaaccaacattgtgatatagataggttccaaggcgcctgtccaacaagcccccctccggtgtcttccgccccattgtcttcgcctagcccagcaccgggctgtgacaacgctatcccattgcggcaagtgaacgaaacttggactctggagaactgcaccgtggctcggtgtgtcggtgacaacagagtggtccttctcgatccaaaacccgtagctaatgtaacatgtgtgaacaagcatctgcctattaaggtatcagatccttcacaaccttgtgactttcattatgagtgcgagtgcgaatgtgtcggcggacgtggaattacaccaggcgcaggaatatgttcgatgtggggtggttcccactactcaacatttgacggaaccagctacacatttagggggaactgtacctacgtactcatgcgggaaatccacgcacgattcggcaacctctccttatatctggataaccactattgcactgcaagcgcgactgcagcggccgccagatgcccaagggcactgtctatccactataagagtatggacatcgtgcttactgtcactatggtgcacggaaaagaagaaggtttaatcctattcgatcagattccagtctcaagcggcttctcaaagaacggcgttctggtttctgtgctggggactacgacaatgagggttgacatcccggcccttggggtttctgtgacattcaacggccaagtgtttcaggctagactgccctattctctctttcacaataatactgaggggcagtgtggcacttgtaccaataaccaacgcgacgattgtttacagcgagatggcacaaccgctgcgtcttgtaaagatatggccaaaacatggttagtaccagattcaaggaaagatggatgttgggcccccactggcaccccccctacagcctcacctgccgcccctgtttcctccacccccacccctactccctgcccccctcaaccattatgcgacttgatgttgagccaggtttttgcggagtgccataatcttgtcccccctgggcctttttttaacgcctgcatcagcgatcattgtcgcgggcgactggaagtcccatgccagagtttagaagcctatgcagagctgtgtcgagcgaggggcgtgtgctctgattggaggggtgccaccggcggcctctgcgacttgacgtgcccaccaaccaaagtctataaaccctgtggacccattcagcccgcaacatgtaatagccgcaaccaatctccccaactggaaggtatggcggaaggctgtttctgcccagaagaccaaatactgtttaatgcccatatggggatttgtgttcaggcatgcccatgcgtcgggcctgatggttttccaaaattccccggtgaaaggtgggtatctaattgtcaatcttgtgtatgtgatgaggggagcgttagtgtacaatgtaaacccttgccctgcgatgctcaaggccagcccccaccttgcaacagacccggatttgtgacagtgaccagaccaagagccgagaacccctgttgcccagagacagtttgcgtctgtaatactactacgtgcccccaatcgttacccgtctgcccgcccggtcaagaatccatctgtactcaggaggaaggtgactgttgcccaacctttcgctgccgaccccagctatgttcatacaatggaactttctatggcgtgggcgctacatttccaggagcactgccctgccacatgtgtacctgtttatcaggagacacccaggatccaaccgtacaatgtcaagaggatgcatgtaacaatacaacttgcccgcaaggcttcgaatacaaacgggttgccggtcagtgttgcggggaatgtgtgcagacagcttgcttaaccccagatggacagcccgtgcaactgaatgaaacctgggtgaacagccacgttgacaattgtacagtctatctatgcgaggcagagggaggcgttcatctcctcaccccacaacctgcctcatgcccagacgtcagcagttgtagagggtcccttaggaaaaccgggtgttgctactcatgcgaagaagatagctgccaagtgagaattaacactacgatcctttggcaccagggctgcgaaacagaggtgaatatcacgttttgcgagggctcttgtcccggtgcatctaagtactccgctgaagcacaggccatgcagcaccagtgtacatgctgtcaggaacgaagagttcatgaggagaccgtgccccttcactgtcccaatggatctgctattctccacacatatacacacgctgtccaggtactctgcggtcttttggcgtggggcctgcaagctggagggcacattcggggcgcagtacaggaccctcagcagcccttaaaggaccaggaagcttcaggtaaggcgaggcagggtggaggatatcgccaaaccgtggcctggggtgataaatcaaacgcacgtgcctggctccagaaacctgtggtttgggtccagtccggtgcatttccaactcccggccctgcgtcagccttatgtccttggtag

SEQ ID NO: 248958 - RNA, 17298 nt, synthetic construct
  misc_feature 1..17298: note = Description of Artificial Sequence: Synthetic coding sequence
  source 1..17298: mol_type = other RNA
atgggagccccctctgcgtgtcgtacactggtactcgctcttgcggccatgctggtcgtcccacaggccgagactcagggtcctgtggagccaagttgggagaatgcaggtcacactatggatggcggcgcccccacctcctctccaacccgtcgcgtcagcttcgtccctcccgttaccgtttttcctagtctctcccccttgaatccagcccacaacggcagagtttgtagtacttggggagactttcattacaagacctttgatggagacgtgttccgctttcccggcctatgtaattacgttttctccgagcattgtcgggccgcatacgaggactttaatgtccagctgagacggggactggtcggctcgaggcccgtagtgactcgcgtggtcataaaagcacagggcctcgttcttgaagcatccaacggatccgtgttaataaatggccagagggaagaactgccgtattctcggactgggctgctggtggaacagagcggtgattatattaaggttagtattcgtctggttctaacatttttatggaatggcgaggattcagcattattagaactagaccccaaatacgctaaccaaacatgtggtctgtgcggagattttaacggattaccagccttcaatgaattctatgcacacaacgctagattaacccccctgcagtttggaaatttacagaaactcgatggtcccaccgaacagtgcccagacccgctgcccctgccagccggaaattgtactgacgaggaaggcatctgtcacaggaccctgctggggccagcatttgcagaatgccacgccttagtcgactctaccgcctatttggccgcttgcgcccaggatctatgtcggtgccccacatgcccctgcgccacctttgtcgaatatagcagacagtgcgctcacgccggcggccaacccaggaattggcgctgcccagaactttgcccacgcacgtgcccactgaacatgcaacatcaggaatgtggatcaccatgcaccgacacctgttctaaccctcagcgagcgcagctctgtgaagaccattgcgtcgacggatgtttttgccccccaggaaggtcttgcaccgtactggatgatattacacatagcggctgcctcccactggggcagtgtccatgcacgcatggcgggcggacctatagccctggcacatcttttaacaccacatgttcttcttgcacttgttccgggggtctgtggcagtgtcaagatctcccttgtcccggcacttgctctgtccaggggggcgctcacatcagtacgtatgatgaaaaactctacgatctgcacggcgattgttcctacgttctttccaagaaatgcgcagacagcagcttcactgttctagccgagttacgtaagtgtggactgaccgataacgagaattgtctcaaggcagttacactgagcctcgacggaggggatactgccatccgagtccaggcggacggaggtgtattcctcaatagcatctacactcagctccctttgtccgcggctaatattacgctctttacccctagttcgttctttatagtggtacaaactggtctgggattgcagttactcgtccagctcgtgcccttaatgcaggtgtttgtgcgattagatccagcgcatcagggccagatgtgtggcctctgtggtaactttaatcaaaaccaggctgacgattttaccgctcttagcggagtagtagaggcaacaggagccgccttcgctaacacttggaaagcacaagctgcttgtgccaacgccagaaatagttttgaggatccctgtagcctgtctgtggagaacgagaactacgctagacattggtgctcccgactaaccgaccccaactctgctttctcccgctgtcactcaattatcaatcctaaaccttttcatagtaactgtatgttcgacacctgcaattgcgagaggagcgaggactgtctatgcgcagctttgagctcctacgtccacgcatgcgctgccaaaggagtccagctttctgattggcgcgacggcgtgtgtacaaagtatatgcagaactgccctaagtcccaacgttatgcgtatgtggtcgacgcctgtcagcccacctgccgcgggctctcagaggcagacgtaacctgctcagtaagtttcgtgccagtggatgggtgcacatgccccgcaggcaccttcctgaatgacgccggtgcatgtgtcccagctcaggaatgcccttgctatgcccatggtacagtgcttgcccccggtgaagtggtccacgatgaaggtgccgtttgttcctgtacaggagggaagctctcatgtttaggggccagtttgcaaaaaagtaccggctgtgccgcacctatggtgtatctggactgctcaaactcatctgctggtacaccgggagcagagtgcctccgcagctgtcataccctagatgtgggatgcttttctacccactgcgtctccggctgtgtctgtccgccaggccttgtttctgacggctctgggggctgtattgctgaagaagactgtccttgcgtccataacgaagctacctataagcccggcgagaccattcgcgtggactgcaatacatgtacttgtagaaatcgtcgatgggaatgctcccaccgcttgtgcctggggacatgcgtcgcctatggcgacgggcacttcattacatttgatggcgataggtactccttcgagggctcttgcgaatacattctcgcccaggactattgtggtgataataccactcacggcactttccgcatcgtgaccgaaaacatcccatgcggcacaacaggaaccacttgctcgaaggctattaagctgttcgtagaatcgtacgagcttatactacaggaaggcacatttaaagcagtcgctcgaggacccggtggcgatcctccctataagatcaggtatatgggaatcttccttgtgatagaaacccacggcatggctgtcagttgggatagaaagacttctgttttcattcggctccaccaggattacaagggtagagtttgcgggttgtgcgggaatttcgatgataacgctattaacgatttcgccacacgaagtcgatccgtggttggcgacgccctcgaattcggcaacagttggaaacttagtccttcttgcccagacgctctcgctcccaaagatccttgcaccgctaacccattcagaaagtcatgggctcagaagcaatgcagcattctacacgggcctacgtttgcagcctgtagatcccaagtagattccacgaaatactatgaagcatgtgtgaacgatgcctgtgcctgcgacagtggtggagattgcgagtgcttctgtacagccgtcgctgcatacgctcaagcatgtcatgatgctgggctctgtgtgtcatggcggacacctgatacctgtcctctgttctgtgacttctacaacccacacggcggatgcgaatggcactatcaaccatgtggcgctccctgcttgaaaacttgccggaatcccagcgggcactgtttggtcgaccttcccgggctcgaagggtgctatccaaaatgtccaccctcccaacccttcttcaatgaagaccagatgaaatgtgtcgcacagtgtggctgctacgacaaggacggaaactactacgacgtcggggccagagtacctaccgctgaaaattgccagtcatgcaactgcactcctagtggaatccagtgcgctcattctttggaggcctgtacatgtacctacgaagatagaacctacagctaccaagacgttatttacaacacgactgatggcttaggagcctgcttgattgccatatgtgggtccaacggaacaattatcaggaaggccgtggcatgccctggtacgcctgctactacaccatttacctttactacagcatgggttccacattcaaccacgtccccggctttaccagtgagtaccgtctgcgtgcgcgaggtgtgccgttggagctcatggtataatgggcatagacctgaacctggattggggggaggagacttcgaaacattcgaaaaccttaggcaaagaggataccaagtctgtccggttttagccgatatcgaatgccgcgccgcacagttgcccgatatgcctctggaggaattgggtcagcaagtggattgcgaccgcatgcgcggcttaatgtgcgccaatagccaacagtccccaccattgtgtcacgattatgaactccgcgtcctctgctgcgaatacgtaccatgcggaccctctcccgctcccgggacctctccccagccttccctcagcgcctccacagaacccgccgtgcctacgcctactcaaacaacagccactgagaagaccacattatgggtcaccccctccatccgctctacagccgccctgaccagccaaacaggctctagctccggacctgtaacggttacacccagcgcccctgggacaactacctgccagccccgctgccagtggaccgagtggttcgatgaggactacccaaagtctgaacaactcggcggagatgtggagtcgtacgataagattcgagccgcaggtggccatctttgccaacagcctaaagacatcgagtgtcaagccgagagttttcccaactggacgttagcacaagtgggtcagaaagtgcattgcgatgttcacttcggtcttgtatgtcgcaactgggaacaggagggtgtgttcaagatgtgttataactacagaattcgagtgctttgttgcagcgacgatcattgtcggggccgtgcaactacccctccccccacgaccgagcttgagacagcaacaactaccaccacccaggccttgttttccaccccccaacccacctctagtcctgggctgacaagagccccccccgccagcactaccgcagtacccaccctctcagaggggctgacttcccctagatatacctccaccctaggcacagcaacaaccggaggacccaccacacctgccggtagtacagaaccaactgtgccaggggtcgccacctccactctgcccacacgtagcgctctcccaggtacgacgggcagccttgggacctggagaccctcacaacctcctactcttgcgcctaccacaatggctaccagtcgcgcaaggcccacaggaacagcaagtactgcatcgaaggagcctctgactacgtccctggcaccaactttgacttcagaattatccactagccaagccgagacatccactcctcgtacagagacaaccatgtcccccttgaccaataccactacatcccagggcactactagatgtcagccgaaatgcgaatggacggagtggttcgacgtagatttcccaacatctggtgtggccgggggggacatggaaaccttcgagaatatccgagccgcgggcggtaaaatgtgttgggctcccaaaagcatcgagtgccgagccgaaaactatcccgaagtgtcaatcgatcaagtggggcaagttcttacatgctctttagagactgggctaacctgcaagaatgaggatcagacaggtcggttcaatatgtgctttaattataacgtaagagtactatgttgtgatgactattcacactgccctagtacacctgcaacttcaagcaccgcaaccccgagtagcaccccaggcaccacttggatactgactaagcccacgaccaccgccactaccacagcctctaccggctctacagccaccccgacttctacactccggaccgccccacctcctaaagtactgacgacaaccgccaccacccctacagtcacaagttccaaagccacgccctcctcgagcccgggaacagctacggccctgcccgccctccgatctactgccacaactcccaccgcgacctcagttacgccaatcccctcttcatccttaggcaccacatggactaggttgagtcagacaactactcctaccgccacgatgtctacagctacaccatcatcaacaccagagacagcccatacttctacagttctgaccgcgaccgccacgactaccggcgcaaccggctcagttgcaacaccctcatccacccctgggacagctcatacaactaaggtcccaacgactaccactacaggctttacggctactccatcctcctcacccggcaccgctttaacccctcccgtgtggatcagtactactaccacacccaccactcgtggatccactgtgactccttcctccatccctggaactacccacactgctacagttctgaccacgacgacgactaccgtggccaccggcagcatggccactccatctagctcgacgcagacttctggcacgcccccatccctgaccacgaccgcaaccacaattacagcaaccggatcaactactaatccttcctccactcccgggacgacacccatccctccagttttaactacaacagccaccacacccgcagcaactagtaacaccgtaaccccttcctctgctctaggcactacccatacaccccccgttcccaacaccatggctactacccacgggcgctctctccctccatctagcccacacactgtcaggaccgcatggacctctgccacttccggaatcctgggtactacacatattacagaaccaagcaccgtgacttctcataccctggccgccaccactggaactactcagcactcaacacccgctctgtcttcgccacatccatcatctaggaccactgaaagccccccaagtccgggaaccactactcctggccataccaccgctacttcacgaacaaccgcaaccgctacaccatccaagacacggacctcaaccctattgccgtcttcccccacctccgcccctatcacaacggtagtgactatgggatgcgaaccccaatgtgcttggagcgagtggttagactacagttatccaatgcccggtccctccggaggagatttcgatacttatagcaatattcgcgcagcgggaggtgcagtgtgcgaacagccattgggtctggaatgtagagctcaggcacagcccggggtacccctccgggaacttgggcaggtggttgagtgttcgttagacttcggactggtatgtagaaacagggagcaagtcggcaagtttaagatgtgcttcaattatgaaattcgagtgttctgctgcaactatggtcactgtccatctactccggcaacttcctctacagccatgccatcctctactcctggcactacttggatattaaccgagctgacaacgacagccacgactactgaatctactggttccactgcgacaccctcttctactcctgggacaacttggatacttactgaaccatccaccaccgcaaccgtaacagtccccaccggatccaccgccacagctagcagtacacaggcaaccgctggtaccccacacgtgagtactaccgccacaacccccactgtgacaagttcaaaggccactccgttttccagtcccggaactgccactgctttacccgcgctacgctcaacagcaactacacctacagccaccagtttcactgctattccctcctcttctttgggcacaacttggacccgtctttctcaaaccactacccccaccgcaaccatgtccactgctaccccatcctctactcctgaaaccgtgcacacttcaactgtattgacgaccacggctacgaccactggagctaccggctccgtcgcgaccccatcctcaactcctggaactgcccacacgaccaaagtgctcactaccaccaccaccggttttaccgccactccatcctcttctccaggtacagcccggacgctccctgtgtggatctctacgactaccacccctacaacccgcggatcaaccgttaccccaagttctattccaggcaccacgcacactcccactgtcttgactacaacgaccaccaccgtagcaaccggttctatggccacaccctcctcttctacacaaaccagcgggacgcccccctccctcaccaccacagctaccactatcaccgctactggctcaacaacgaatccttcatctacccccggtacaactcccattcctcctgttttaactaccaccgccacgacacctgcagctaccagcagcactgtgacaccttctagcgctttgggaactacacacacccctccagttccgaacaccacggccactacacacggtcgaagtctgtccccttcatcccctcacactgttcgcactgcctggacatctgcaacatctggaaccctgggcacgacacatatcacagagccttctactggaacctcccacacgcctgccgccactacgggcacgacacaacactccacacctgctctaagttccccccatcctagctcccgtaccactgagagtccccctagccccggtacgacaacccccggacacacccgtgcaaccagcaggaccaccgccaccgccactccaagcaaaactcgaacatcaaccttacttccttccagtccaacatcagctccaataaccaccgtggtcacaatgggctgcgaacctcagtgtgcttggtccgaatggctcgactactcttaccccatgcctggcccttccggtggcgactttgatacttattcaaacatcagggccgccggaggcgcagtgtgtgaacaacccctcggcctcgaatgtcgggcccaggctcaacccggagtccccttacgcgaactgggccaggtcgtagaatgcagcctagattttggactggtgtgcagaaaccgggagcaggtgggtaaatttaaaatgtgttttaactatgaaattagagtgttttgttgtaattatggacactgcccaagcacgccggccacctcttctactgcaactccatctagcacgcctggaaccacttggattctcactgagcaaactacagcggcaacgacaacggccaccaccggatctaccgctatccccagtagcactcctggcaccgcacccccccccaaggttcttacatctaccgcaaccacacccactgccactagctctaaagcaacaagttcatcttctcctcgtacagcaacaaccctgcccgtcctaaccagtactgccacgaagtctacggctacatccttcactccaatcccatcctttacattaggcactacaggcaccctacccgaacagactaccacccccatggctacaatgtctactatccacccctcaagtacccccgaaaccacacacacttccaccgtgctgacaacaaaggctaccactacacgggccacctctagtatgtcaaccccaagctctacccctggcacaacatggatcttaacagagctaacgaccgccgccacaactactgccgccaccgggccaacagctactccttcatcaacccctgggacaacttggatattaactgagccttctactacggccacagtcactgtacctactggatctaccgcgaccgcatcttctacccgtgccacagccgggacgttaaaagtgctcacctcaaccgccacaacccccaccgtgattagctctcgtgccacaccctcatcctccccaggtaccgcaacagcacttccagctttgagatcaacagctacaaccccaaccgccacctccgtgacagccattccctcctcctctttaggtactgcctggactagattgagtcagaccaccactcctacggctacaatgtcgacagctactccctctagcaccccagaaaccgtccatacttcgacagtcctcaccactaccacgactaccacgcgggctaccggaagcgtagccaccccatcctcaacccctggtaccgcacacacaacaaaagttcccacaacaacgaccaccgggttcaccgccaccccatcttctagccccggaacggccctaaccccaccagtatggatttcaaccaccaccacccctaccacacgcgggtcaactgtgacgccaagctctattcctggcactactcacacagctacagtgctcaccacgactacaacaacagttgctacaggctcaatggccaccccatcttcgagtactcaaacttctgggactcccccaagtctaaccacaactgcgacaacaatcacagctaccggatccaccacaaacccgagtagcacaccaggtactactcccatcccacccgttctgactactacagcaaccactccagccgcgacctcaagcaccgtcacaccatccagcgcactcggaaccactcacacacccccagttcctaacaccacagcaactacacacggaagatctctgcccccttcatcaccccacacagttcgaacagcttggacctccgccactagcggcatcctaggtacaacacatattaccgaacctagtactgtcacctcccacactcccgcagccacgacgagcactactcagcatagcacgcccgcactttcttcccctcatccatcctcccggaccacagaaagcccaccttcaccaggaacaaccacaccagggcacacccgcggaacctcaagaacgaccgcaactgccactccaagcaagacacgaacgagcaccctgcttccttcctcccccacgtccgctcctatcactactgtcgtcactaccggctgtgaaccccagtgcgcctggagtgaatggctcgactatagctaccctatgccaggccctagtggcggcgactttgacacttacagtaacattagagctgcgggaggggctgtgtgcgagcaacctttaggcttggagtgtcgggcccaggcccagcccggcgtccctctgcgcgaacttggccaggtggtggagtgtagcctggacttcggacttgtctgccggaatagagagcaagtcggcaaattcaagatgtgtttcaattacgaaatcagagtcttctgctgtaactatggacactgtccctcaacacccgcaacatcgtcaactgctacgccttcctctacacccggaactacatggatcctaacaaaactgacgacaaccgcaactacaacagagtctacaggtagcaccgccacaccatcatccacacctggtacgacctggatccttactgagccttcaaccacagccaccgtaacagtcccaaccggctccaccgctactgctagttcaactcaagcaacagcaggtactccccatgtgagcaccactgccactactcctaccgttacaagcagcaaagccacgccattctcttcccctggaacagccacagcactacccgcccttaggtcaacagctaccacgccaaccgccacctcattcaccgctatcccctcttcctccctgggaaccacctggacacgactgtctcagaccaccacacctacagctactatgtccacagccactccgagcagcacccccgaaacagctcataccagtaccgtgctgaccacaaccgccaccactactcgcgccaccgggtccgtggcgaccccttcatcgacacctggcacagcccataccactaaagtcccgaccacgaccaccacaggattcacagttactccctcatctagccctggcacagcgcgcactccgccagtttggatttccaccacgactactcccaccacttcaggtagcaccgtcactccgtcttctgtgcctgggacgacccacaccccaacagtccttaccaccacaacaactaccgtggctacaggaagcatggcgacacctagctcctccacccagacatccggcaccccaccttccctaattaccaccgcaacgactattaccgcaactggctcaacgaccaacccctcctctactccaggcacaactccaattcccccggtcctgacaactacggctaccacccctgccgccacatcctcaacagtcacaccatcctctgcactcggaacaacacacacgccacccgttcctaataccaccgctaccacacacggccgaagcttgtccccctctagcccacatactgttaggacagcctggacttcagcgacttctgggaccctaggaaccactcatatcacagaaccatctaccggaacctcacacactccagccgctacgactggaaccactcagcactccacaccagccctgtcctccccccacccttcaagtcggacaacagagtcaccgcccagcccaggaaccacaacccccggccacaccactgccacttctaggacaaccgccaccgcgactccttcaaaaactcgtacaagcaccttgctcccctctagccctacatccgctcctattactactgtagtgaccaccgggtgcgaaccccaatgcgcgtggagcgaatggctagactattcttaccctatgccaggacctagtggaggtgatttcgatacatacagtaatatacgtgcagcaggaggcgccgtctgtgagcaacctctcgggcttgaatgtagagcccaggcccagccaggggtgccattaggcgagctggggcaagtggtggaatgcagccttgactttggactagtgtgtaggaatagagagcaagtcggcaaatttaaaatgtgcttcaattatgagattcgagtgttttgttgcaactatggccattgcccttctacccccgcgacgtcatcaaccgccatgccatctagcacccccggaacaacctggattctgacagaactgaccacgacagccacaactactgcgtccactggttctaccgcaactccgtctagtacgcctggaacggcaccccctcctaaagtgctcactagcccagccaccacaccaacagcaacctctagcaaggcaaccagctcaagctcaccgcgaaccgccactaccctccctgtactgacatccaccgcgacgaaaagcactgcaacatccgtcactcctattccatccagcactttgggtacaacaggaactctgccagaacagaccaccacacctgtggccacaatgtccacaattcacccttctagcactcctgaaacgactcacacctcaaccgtgctgactactaaagctactacgactagagccacctcctcaactagcacgccctcctccacccctggaactacctggattctcaccgaacttactacagccgcgaccaccacggctgccaccggccctacagcgacccccagtagcacccctggaacaacctggattctcaccgaactgacaaccaccgccaccacgaccgctagcaccgggtccaccgccacaccgtcatcaactcccggcactacctggattctaacagagccatccaccaccgccacggttactgtgcccacagggtccacagcaactgcgagcagtacccaggccaccgcaggcaccccacatgtctcaacgaccgccactacacccaccgtcaccagctcgaaagcaaccccatctagttccccagggaccgccaccgccttaccagcactgagatcaaccgccactacccccacagccacatccttcacagcaatccctagctcctccctgggcaccacttggacccgtttaagccagactacaaccccgacagcgactatgagtaccgccaccccttcctcaacccccgagactgttcatacctccaccgtgctaaccgccactgccaccaccacgggcgctactggctccgtggcaacaccaagctctacacccggcacagcgcatacaaccaaagtgcctaccaccaccacgacaggatttacagccacaccatcgtcttctcctggaacggccttaacacccccagtttggatatctacaactacaacacccacaaccacaactcccacgacttccggctccacagtgacacctagctctatccccggtactactcacacggcccgagtcctgacaactacaaccacgactgtggctaccggctcgatggccactccctccagctccacacagacttctggaaccccaccatctttaaccaccaccgccaccacaattaccgcaactggatcaactaccaaccctagttccactcccggtacaaccccaatcacaccagttctgacatcaactgcaacaactcctgccgccacctctagcaaagccacaagcagtagctcccctcgcacagccaccaccctaccggtcctgacatcgacagcaactaagtctacggccacctccttcacacctatcccctcttcaaccctttggacaacttggaccgttcctgcccaaaccacaacaccaatgagtacaatgtccacaattcatactagtagtacaccggaaactacccacacatccaccgtcctcacaacgactgcaactatgacacgcgctactaatagcactgccactccctcctcaacattagggacaactcgtattttgactgagctcaccaccaccgcaacgacaacagctgcaacaggatccacggccacattatcctctacacccgggactacctggatcctcacggagccctctaccattgcaactgtcatggttcctactggttcaaccgccacagcctcctcaaccttgggcactgcccacacccccaaagtagtgactactatggccacgatgccaacagcaaccgcttcaaccgtaccatcctcaagcactgtaggtactacgcgtacccctgctgtgctgccttcctcgctccctactttttccgtctcaaccgtatctagcagtgtcctgactaccctccgcccaaccggatttccttcttcacactttagcaccccctgtttctgtagggcttttggtcagttcttctctccaggcgaagtcatatacaataagaccgatcgcgccggctgccatttttacgctgtctgtaaccaacactgcgacatcgacagattccagggggcttgccccactagtccaccccccgtctccagcgcacctcttagctcccccagtcctgctcccggttgcgacaacgctatccccttgcggcaggtgaacgagacctggactttagaaaattgtaccgtcgcccgttgcgtgggtgataatagagtcgttttgttagaccctaaaccagtcgccaatgtgacatgcgtgaataagcacctgcccattaaagtctccgaccccagccaaccatgcgattttcactatgaatgcgagtgcatctgctctatgtggggagggtcccactattccacctttgatggcacctcctacactttccgcggcaattgcacttacgtgttaatgcgggagatccacgcccgttttggcaacctgagtctgtacctggataaccactattgtaccgcgtccgccactgctgccgccgcaagatgtccccgcgccctatctattcattataagagcatggatatcgtgcttactgtgaccatggttcatgggaaggaggaaggcctaatcctttttgatcagattcctgtctccagcggcttctccaagaacggagttctcgtgtctgtattagggaccacaaccatgcgcgttgatatccccgctttgggagtttctgtcacattcaacggccaggttttccaagcaagactgccctactccttgtttcacaacaataccgaaggacagtgcggtacatgcacaaataaccaacgcgacgattgcctgcagcgggacggtaccacagctgcttcgtgcaaggatatggcaaaaacatggctagtccccgattcccggaaagatggatgctgggcacctaccggtacaccaccaacagcaagcccagccgctcccgtatcctccacacccactccaaccccctgcccaccccagcccctctgcgacctgatgctttcccaggtctttgctgaatgccacaatctcgttcccccaggacccttctttaacgcatgcatatccgatcactgccgcggacggctggaggtaccatgccaatcattagaggcttacgcagagttatgcagagccaggggtgtgtgttctgattggcgcggcgctacaggtggactttgtgatctgacgtgcccccccactaaagtgtataagccctgcggacccatacagcccgctacttgcaattctaggaatcagagcccgcagctggagggcatggctgaaggctgcttctgtccagaggatcagattctgtttaacgcccacatggggatctgcgtgcaagcctgcccctgtgtaggtcccgacggctttccaaagtttccgggtgagagatgggtgtcaaattgccaaagctgtgtgtgtgacgaaggttccgtgtccgttcaatgtaagcctctcccatgcgacgctcagggacagcccccgccctgtaatcgacccggctttgtaacagtgacccgacccagagctgagaacccctgttgtcccgagaccgtgtgcgtgtgtaatactacaacctgccctcagagtctgcctgtgtgcccaccaggacaggaaagcatttgtacacaagaagagggcgattgctgccctaccttcagatgcagaccccagctatgttcttacaacgggaccttctatggagtgggagctactttccctggggcactcccatgtcacatgtgcacatgcctgagcggtgacacccaggaccccaccgtccaatgccaggaagacgcatgcaacaatacaacttgtccacaagggttcgaatacaaaagggttgcaggacagtgttgtggcgagtgcgtgcagaccgcttgtctgacaccagatggacagcctgtccaactgaatgagacttgggtgaattctcacgttgataactgtactgtttacctatgcgaggcggaaggaggtgtccatttactaaccccccagccagcctcatgccccgatgtgtcttcttgccgcgggtcactgagaaagaccggttgctgctattcctgtgaggaggattcctgtcaggtgcgaataaacaccaccattctatggcaccaggggtgtgaaacggaggtcaacattactttttgtgaagggtcttgtcctggagcttccaagtacagtgctgaggctcaagcaatgcagcatcagtgcacatgctgccaagaaaggagggtccacgaggagactgtcccccttcattgtcctaatgggtccgctattttacatacatacacccacgttgacgagtgcggttgtacccccttttgtgtccccgctccgatggctcccccacatacccgcggatttcctgcacaggaagcaacagcagtctag

SEQ ID NO: 248959 - RNA, 17289 nt, synthetic construct
  misc_feature 1..17289: note = Description of Artificial Sequence: Synthetic coding sequence
  source 1..17289: mol_type = other RNA
atgggtgccccatcagcctgtaggacccttgtcttagccttagcagctatgctcgtcgttccgcaagcggagactcagggaccagtggaaccaagttgggagaatgctggccacactatggacggtggtgcacctacctcgtcccctacccgccgcgtgtcttttgtgcctcccgtgaccgttttcccatccttaagccccctcaatccagcacacaatggcagggtgtgttccacttggggagacttccattataagacttttgatggcgatgtgttcagattccccggcctgtgtaactatgtgttcagcgagcattgtcgcgcagcctatgaggacttcaacgtgcaattaaggagggggcttgttggcagtcgtcctgtggtcacaagagtagtcataaaggcccaaggcttagttctcgaggccagcaacgggtcagtgcttattaatggacagagagaagaactcccctattcaagaaccgggttattagtagagcagagcggtgactacatcaaagtatcaatccgtctagttctcaccttcctctggaatggcgaagactctgctcttctggaactggatcctaaatacgcaaatcaaacatgtggactttgcggagattttaacggcttacctgcatttaatgaattttacgcacataatgccagattgaccccactgcagttcggaaacttgcagaaattagatggccccaccgagcaatgtccagaccctttacctttaccagccggcaactgcactgacgaggaaggcatctgccaccgcacgctacttggtccggctttcgcggaatgccatgctttggtggacagcactgcttatctggctgcatgtgcccaagacctgtgtcgttgcccaacatgtccttgcgccacgttcgtcgaatatagcagacaatgtgcgcacgcaggtggacagcctaggaactggagatgccccgagttatgcccaagaacctgtcctttgaacatgcagcatcaagagtgtggctctccttgtactgacacgtgctccaatccgcagcgggcacagctatgtgaggatcactgcgtggatggttgtttctgcccacccggaacagtccttgacgacattactcattccggttgtctccccctcggccaatgtccatgcacacatggcggaagaacctacagtcctgggacttctttcaacaccacatgctcttcgtgtacttgctcaggtggtttatggcagtgccaagatctcccatgccctggcacatgtagcgtgcaaggaggggctcatataagtacctatgacgaaaaactgtatgacttgcacggcgattgctcatacgtgctgtccaaaaagtgtgccgatagttctttcactgtactagcagagctgagaaaatgtggtctgactgacaatgaaaactgcctgaaagcggtgactctgtcgcttgatgggggtgatacagccatacgggtccaagctgacggcggagtgtttctgaattcaatctatactcagttacctttaagtgccgctaatatcacactatttacaccttcctctttctttatagtcgtccaaacaggactgggtctgcaattgctcgtccagctcgtccccttgatgcaagtctttgttagactggaccccgctcaccagggacaaatgtgcgggttgtgtgggaatttcaatcagaaccaggctgacgatttcacagcactgtcaggagttgtggaggctacaggtgctgctttcgctaacacatggaaggctcaagctgcctgcgccaacgcccggaatagtttcgaggacccgtgctctttatctgtcgagaatgagaattacgctcgacattggtgttcgcgcttgaccgaccccaacagtgctttctcaaggtgccactcaattatcaacccaaaaccttttcattccaattgtatgttcgatacctgtaattgtgagcggagcgaggattgtctgtgcgcagcattgagcagttacgtgcacgcctgcgctgccaaaggagttcagctgagtgactggagagatggcgtttgtactaaatatatgcagaattgtcccaaatcacagagatatgcctacgtcgtggatgcttgtcagcctacgtgtagaggcctctctgaggccgacgtcacctgttctgtatcatttgtgccagtagatggctgtacatgtcccgctggaaccttcttaaacgatgccggagcctgcgtccccgcccaagaatgcccctgttacgcgcacggaaccgtgctggctcctggagaggtagtgcacgacgaaggagccgtatgctcctgtacaggtggcaagttgtcttgtctgggagcctcgttgcaaaagtcaactggatgtgccgcacccatggtgtacttggattgcagcaactcatctgctggcactcccggcgcagagtgccttagatcctgccacaccctggatgtggggtgtttttctacccattgcgtttcgggttgtgtgtgtcccccgggcttggtttccgacgggagcggagggtgcatcgctgaagaggactgcccctgtgtacacaacgaagctacctataaacctggagagactatcagagttgattgtaatacctgtacatgtcgtaatcgccgctgggagtgcagtcatcgtctctgcctgggcacatgtgttgcatacggggatgggcacttcataacattcgacggagatcggtacagcttcgaaggatcttgcgagtatatcttggctcaggattattgtggcgacaacacgacgcatggcacgtttaggatagtgacggagaatattccgtgtgggacaaccgggacaacctgtagcaaggccatcaaactttttgtggaatcctacgaattgatcctccaggaaggcaccttcaaagccgtagcgcggggacccggcggggatcctccttacaagattagatacatgggaatcttcctagtgattgagactcatggtatggctgtttcttgggatagaaaaacatccgtgtttatccgattgcaccaagattacaaaggcagagtatgtgggctgtgtggcaatttcgatgacaatgcgataaatgattttgcaacccgtagcaggtctgtagtaggcgatgctcttgagtttgggaactcctggaagcttagtcctagttgcccagatgccctggctccaaaggacccctgtaccgcaaatccctttcgtaaatcatgggctcagaagcagtgttctatcttgcacgggccaacgttcgccgcctgtcgaagtcaggttgacagcactaaatattatgaggcttgtgtaaatgacgcatgcgcctgcgactctggaggagattgtgaatgcttttgcacagccgtcgccgcctatgcccaagcctgtcatgatgccggactttgtgtgagctggagaacccctgacacatgcccattgttttgtgatttctataatccgcacggagggtgtgaatggcattaccagccctgcggcgcgccctgcctgaagacatgccggaacccctcgggtcactgcctggtggatctgcccggcctcgaaggatgttaccccaaatgtccaccttcccagccctttttcaacgaagaccagatgaaatgtgtagctcagtgcggctgttacgataaagacggaaattactacgatgtgggggcccgggttcccaccgctgagaactgtcagagttgcaattgtaccccaagcggcatccagtgcgcccattccctcgaggcatgtacctgtacgtacgaggaccggacttattcttaccaggacgtgatttataatactactgatggcctcggcgcttgtctgatagctatctgtggctctaatggtactattattcggaaggcagttgcctgcccgggaacacccgcaactacaccatttaccttcaccacagcctgggtcccacacagtaccacaagcccagccctgcctgtgtccacagtctgcgtaagggaagtttgtcgttggagttcttggtacaacggtcatagaccagaacctggcttgggtggcggcgatttcgaaactttcgagaatctcagacaaagaggatatcaggtttgccccgtattagccgacatcgaatgccgcgcggctcaactcccagacatgcctctcgaggagttaggccaacaagtagattgtgaccggatgagaggactcatgtgcgcgaacagtcaacagtcaccacctctctgtcacgattatgagcttcgggtcctctgttgcgaatatgtgccctgcggccccagtccagctcccggcacctctccgcagccttcactatcagctagcacggaacctgccgtccccactcctacccagacgaccgccacggaaaaaacaacactatgggtcacaccctctatacgatcaacagcggcccttactagccagacaggtagtagctccggtccggtcaccgtaaccccctccgccccaggaaccaccacttgccagcctaggtgccagtggacagagtggttcgatgaggattacccaaaatcagaacagctcgggggcgacgttgaaagctatgacaagatccgcgccgctgggggccatctttgccagcagcctaaggacatcgaatgtcaagcagaaagcttccctaattggactcttgcacaggtgggccagaaagtgcattgtgatgtccactttggcctcgtatgtaggaattgggagcaagaaggagtcttcaagatgtgttataactacagaatccgagtattatgttgcagcgatgatcattgccgaggtagagccaccacccccccccccactactgagcttgaaaccgccaccacaactacaacgcaggcactgttctccactccacaacccacctcctcgcccggcctcacccgcgccccacccgcaagcactaccgcagtcccaacactgtctgagggccttacatcacctagatatacctcaacccttggtaccgctacaactggcggccctacaacacccgcaggtagtactgaaccaaccgtacccggtgttgctacaagcacgctgccgactcgctccgccctgccaggcacaaccgggtcgctcggcacgtggcgtccttctcagccccccactcttgcacctactactatggccacgtcaagagcaaggcccacaggtacagcttcaaccgctagtaaagagcctctgaccaccagcttagcaccaactttaacatccgagctctcaacttcccaagctgaaacctctacacctagaacagagactacaatgtcacctcttaccaacacaaccacatcacaaggaaccactagatgccagcccaaatgcgagtggacagaatggttcgatgtcgacttccccacctcaggtgtcgccggtggcgacatggagacattcgagaacattagagctgccggcggcaagatgtgctgggccccaaagtctatcgaatgtagagccgaaaattaccccgaggtgtctatagatcaagtgggacaggtactcacgtgctccctggagactggcctgacgtgcaagaatgaagatcagactgggaggtttaatatgtgctttaactataatgtccgcgtcctgtgctgtgatgattactcacattgcccttcaacccctgcaaccagctctaccgcaaccccaagttcaacccctggcactacatggattttaactaaaccaacaacgaccgccaccaccactgcaagcacaggctccaccgccacccctacatcaaccttgagaacagcgccgccgccaaaagtgcttacaactaccgccaccacacccacagtcacatctagcaaagctacccccagctccagccctggtaccgcgacagctcttcctgcacttcggtcaacagctaccaccccaaccgcgacaagtgttacacctatcccctcatcatcgcttggaactacttggacacgcctgtcacaaacaacaactcctacggccactatgtccaccgccaccccctcatcaactccagagaccgcccacacatccaccgtgctaactgcgaccgccacaaccaccggcgccacaggatcagtggcgactccttccagcacaccaggaacggctcacacaaccaaagttcccaccacaaccacgaccggattcacagcaacccctagctcatcccccggaaccgcactaacacctcctgtttggatcagcacaactacaaccccaacaaccagaggatcaacagtcacccccagctctattccgggaactacccacaccgccaccgtattaacaaccactacgacaaccgtggctacaggctctatggctaccccaagctccagtacccagacctcaggaactcctccaagcctcactactaccgccactaccattactgccactggctccaccaccaacccttctagcacgcccggcaccacacctattcctcctgtccttaccacaacagcaacaacaccggccgccacctccaatactgtcactccttcttcagctttaggaactacccacactccccccgtccccaatacaatggcgactactcacggacgtagcctgcctccctccagccctcacaccgttagaaccgcatggacaagcgcaacatccggcatccttggcacgacacacattactgagccatccaccgtgacgtcccataccctcgccgctactacaggaactacacagcattccacgccagcccttagcagcccacacccatcatcaagaacaacagagtcacctcccagtcctgggaccacaacaccaggccatacaacagccacctcaaggactacagctaccgccactccgtccaaaacccgaactagtaccttgcttccgagcagtccaacctctgcaccgataacaaccgtggtaaccatgggctgtgaaccccagtgtgcgtggtcagagtggttagactatagttaccccatgcccggcccctccggcggcgactttgacacctactccaatatcagagctgcgggcggggcagtttgcgagcagcccctcggactggaatgcagagctcaagcccaacccggtgtgccactgcgcgagctcggacaagtcgttgagtgctccctcgactttggtttagtgtgccgaaatcgcgaacaggtgggaaagttcaaaatgtgttttaattatgaaattagggtattttgctgcaattatggtcactgcccctctacccctgccacttcttccactgccatgccatcctctacacccggtactacgtggattctcaccgaactgacaactaccgctacaacaaccgagtccaccggttcaaccgctacacccagtagtacccctggcacgacctggatccttacagagccatcaactaccgccactgtgacagttcctacgggaagtaccgccactgcttcttccactcaggccactgccggcactcctcacgtctcaaccactgctaccacgcctacggttacctcatctaaagccaccccgttttcgagtcccggcaccgccacagctcttccagccctccgaagcacggctaccacacctacagcaacctcattcacagcgattccttcaagctcactcgggacaacatggacccgcctgagtcagactacaacaccaaccgcaactatgtctaccgccacccctagctcaaccccagagaccgtccatacctcaaccgttcttacaacgaccgcgaccactaccggagcaactggatcagtagccaccccatcctcaacacccggaacagcccatactaccaaagtgctaacaaccacaactaccggctttacagcaaccccatcttcctcaccaggtaccgctcgcacactgcctgtatggatttccaccactaccaccccgaccacgcgcggttcaacggtgactccttccagcattccaggaacgacacacacaccaacagtcttgacaacgacaactactaccgtggccactggctcaatggccaccccttcttcatcaacgcaaacatctggtaccccacccagcctgacaacaactgctactacaatcaccgctacaggatcgacgacaaacccaagttctacccccggaacaaccccaattcctcctgttttgaccacgactgccaccacgccagccgccacatcgagtaccgtaaccccttccagcgcactgggcaccacacacactccccccgtccctaacacaaccgccactacccacggtcgatctctttctcctagctctccacataccgtaaggactgcttggaccagcgcgacatctggaaccctcggaacgacccatataaccgagccctcaaccggaacttcacacactcccgcagctactacgggcactacccagcattctacacccgcgctttcttcccctcacccttccagcaggaccaccgagtcacccccctcccctgggaccacaacacccggccatacccgcgcaacctcacgcacaaccgccacggctacaccttccaagacacgtacatcaaccttgttgccatcttcacctacttctgcacccatcacaaccgtcgtgaccatgggatgcgaacctcagtgtgcatggtctgagtggttagactatagttatcccatgcctggacccagcggcggagactttgacacttacagcaacatacgtgccgcaggaggagccgtgtgtgagcagccactcggtcttgagtgtcgtgcacaagcacagccaggggttcctttacgtgagttggggcaggtcgtagaatgctctctggattttggactcgtctgtcgcaaccgcgaacaagtgggaaagtttaagatgtgttttaattatgagatcagagtgttttgctgcaactacggccactgtcctagcaccccagccacatccagcacagccacgccaagttctaccccaggcactacctggattctgaccgaacaaacaacagcagcaacaaccaccgcgacaaccggatctacagctatcccgtcttctacaccaggcacggccccaccacctaaggtgctgacatctaccgcaactactccaaccgccacctcttctaaagctacaagctcttcttctccccgcaccgctactacccttcctgtcctgacatccacagcaaccaaaagcacagctacttcatttacgcccatcccctcatttactctcggaactacaggcaccctcccggagcagaccaccaccccaatggcaacaatgtccaccattcacccttcctcaaccccggaaacgacccacacctccactgttcttacaacaaaagctacaaccacacgtgcgacctctagcatgtcaacaccttcctctactcctggcactacctggatcctaaccgaactgaccaccgccgctaccacgaccgctgcaacaggccccaccgcgactccgtctagtactcctgggaccacttggatcctgaccgaaccgagtacaacagcgacagtcaccgtacccacaggctctacggccaccgccagctcgactcgcgccacagcaggaactctcaaagtgctcacctccactgcgaccacaccaaccgtgataagctccagagcgaccccatccagcagcccgggcacagcgactgccctgccagcattgcgttcaacagccacgacccctactgcaacgtcagtcacagccataccttcgagcagcctcgggaccgcttggacccgactctcccaaaccacaacccccacagccacaatgtctactgccaccccttccagtacaccagagacagttcatacatccaccgttctaactacaacaacaactactactcgggcgacaggcagcgttgccaccccctccagtacacctgggactgctcatactactaaggtgcccacaacgaccacaacaggctttaccgcaacaccttcttccagtccaggcacagctctaacacctcctgtgtggattagcactacaaccacacctaccacccggggttccactgtgacgcctagctctattccaggtaccacccacaccgccaccgtgctgacgactactacaacgaccgttgcgactgggtcaatggctaccccaagctcttccacccaaacatctggcactcctccctcactgactacgaccgccacaacaattaccgctaccggatccacaactaacccttcctctacacccggaacaacaccaattcctcccgttctgacaacaaccgctaccactcccgctgcaacgagctccactgtcacaccatcttctgcactgggaacaactcatacccctcccgttccaaatactacagctactacccacggtcggtccctccccccctcaagcccccatactgttagaactgcttggacttccgcaacatcagggattctcggcacaacccacatcacagagccatctactgtgaccagccacacccctgcagctacgacttccaccactcagcacagcaccccagccctgtccagcccccatccctcaagtcgtaccacagagagtcctccctcaccagggaccacaacgcccggtcacacacgaggcacttcccgaacaactgcgactgccacaccttcaaaaacgagaacgtcaactttactcccgtcttctcctacctctgcgcccattactaccgtcgttactacaggctgtgaacctcagtgcgcctggtctgaatggctagattacagttaccccatgccaggaccaagtgggggcgattttgatacctacagcaacatacgagcagccggcggagccgtttgcgagcaacctctgggcttggaatgtcgggctcaagctcaacctggggtcccacttagggaactggggcaggtcgtcgagtgttctcttgactttgggctagtatgccgcaatcgagagcaagtggggaagttcaaaatgtgctttaattatgaaatacgcgttttctgttgcaattacggacactgtccctcaactcctgctacttcgtcaacggctacaccatcctctactcccgggacaacctggatcttaactaaactgactacaacagcgactactacagaatctacaggctccacggctacaccttcctctacaccagggactacatggatcttgacagagccatccactacagccactgttacagttcccacaggcagtactgcgaccgcctcttccacacaagccacagcaggaacgcctcatgttagcaccaccgccaccacccccacagttacctcaagcaaagctactccattttcctctccaggaacagcaactgctttacccgctcttaggtcgaccgccaccaccccaactgccacaagttttactgctatcccctcaagttcccttggcaccacatggaccaggctctcacagactactacgcctaccgccaccatgtcaacagccaccccatcatcaacgcccgaaaccgctcacacatctaccgtcttaaccacaaccgcaactactacaagagctacaggctccgtcgcaaccccatcaagtaccccaggaaccgcgcataccacaaaggtccccactaccaccaccacagggttcaccgtaacaccatcttccagccctggaactgcacggacccctccagtgtggatatctacgacaaccaccccaacaacgagtggctctacagtgacaccgagttcagtccctggaactactcatacccccaccgttctcacaactacgaccacaactgttgctaccggctcaatggccactccatcctccagcactcagaccagcgggacaccaccctcactgattactaccgcgactactatcacggctactggatctaccacaaacccctcttccacccccggaaccacccccatcccccctgtccttacaaccactgctacaactcccgctgcaacttctagcacagtcacccccagcagtgcccttggtactacccacacaccccccgtcccaaataccaccgcgaccacacacggcaggtcactgtccccaagttccccacatacagtcagaacagcctggacatccgctacatctggtaccttgggaaccacacatataactgagccttccactgggaccagtcataccccagccgccacaaccggcactacacagcattcaacgcccgcactctcatccccccatccatctagccgcaccacagagtcaccacccagccctggcacaaccactcctggccacaccacagctacaagccgcactacagctaccgccactccatcaaagactagaaccagtacactgctgccctcatcgccaacatccgccccaattactaccgtagtgacaactggctgcgagccccagtgcgcatggtccgaatggttggactatagttaccctatgcctgggcctagcggcggtgattttgatacctactcgaacattagggctgccggtggcgcggtgtgcgaacagcctttaggactcgagtgtagggctcaggcgcagccgggcgtccctcttggagaactcggccaagttgtcgaatgttcccttgacttcggacttgtctgcagaaacagagagcaggttgggaaattcaaaatgtgtttcaattacgaaataagagttttctgttgtaactacggccactgcccttcaacacccgccacatccagtactgccatgccttcttctacgcccggcaccacatggatactgactgagctcaccacaaccgcaaccaccacagcatctactggatctactgcaaccccctcctccacacctggcacagcccctccccctaaagtgctgacctcccctgccaccaccccgactgctacctcctccaaagcaacttccagtagttccccaagaactgcaaccaccttaccagtgctgacatcgacagccaccaaaagtacagccacatctgtgactccaatcccctcctccactcttggcacaaccgggacactccctgaacaaaccacaactcctgtagcaaccatgtctacgatacatccgtcctccacaccagagaccacacacaccagcactgtcctcaccactaaggctacaacaacccgtgcgacgtcctctaccagtacgccttcttctacccctggcaccacttggattctgacagagctcacaaccgccgcaacgacgacagccgccacagggccaaccgccacacccagcagcactcccggcacgacatggatactaacagagttaactactacggccacaacgaccgcatccacaggctcaaccgcgaccccatcatctacacctgggactacttggattctcaccgaaccctcaacaacagctaccgttacagtaccaaccggaagcacagccaccgcctcctcaacacaagcaacagcaggaacaccacacgtgagtaccacggctacaactcctaccgtcacatcgtccaaggctacaccatcatcctcaccagggaccgcaaccgccctgccagctctgcgctcaacagccaccaccccaacagcgaccagcttcacagctataccttctagctctctcggaaccacatggacaaggctctctcaaacaaccactcccaccgctactatgtcaacggccaccccatcatctacacccgaaactgtccacacctcaaccgtcctgaccgcaacagctaccacaacaggggcaaccggaagcgttgccaccccaagttctacgcccggcacagcacacacgactaaggtgcctacgactactactactggttttactgctacaccctcatcgagtcctggcacagcgctaacacccccagtatggatttcgactaccaccacgcccactactacaacacccactaccagcggatcgacagtaaccccgtcaagtattccaggaacaactcacaccgctcgcgtcctgactaccactacaacgacagtcgcaaccggatctatggctaccccgtctagcagtacccagacatccgggaccccaccttctcttaccaccaccgccactaccattactgcaactggatccaccactaacccatcatccaccccaggcaccacccctataacccccgtcctgacctccacagccaccacacccgcagccaccagttcaaaggccaccagctcatccagcccccgaacagccacgactttgccagttctgactagtaccgcgaccaagtctacagcaacaagcttcaccccaatccctagcagcacactttggacgacctggactgttcccgcacaaactactacccccatgagcacaatgtctaccatccacacatcaagcactcctgaaacaacccatacttcaactgtcctgaccactacagcaactatgacaagagccaccaatagcaccgccaccccgtccagtactctcggcacaacaagaatccttacagaactgactacgacagctaccaccactgcagcgacgggctcaaccgccacactctcctctacccccggtactacttggatcctgactgagccctcaacgatcgcaaccgtgatggtgccaacaggctccacggctaccgcatccagcaccctcgggacagctcatacgcccaaagtcgtgaccacaatggcaaccatgccaaccgcaaccgcttccacagtgcctagctcatccactgtcggaactactaggaccccagcagttttaccatcttcccttcctacattttccgtctccactgtttcatcctctgtgttgactacactccgtcctaccggatttccctcctcacatttctcaaccccatgcttctgccgcgccttcggacagtttttttctccaggcgaggtcatttataacaaaaccgaccgggccgggtgccacttctatgcagtctgtaaccagcactgcgacatcgatcgattccagggagcatgcccaacctctccacctcctgtcagctccgcccctttaagcagtcctagcccagcccccggctgcgacaatgcaatcccccttagacaggtgaacgaaacctggacacttgaaaactgtacagtggcccgctgcgtcggtgacaacagagtagtcctgttggacccaaagccagtcgctaacgtcacctgtgtcaacaaacacctgccaattaaagtcagtgatccatctcaaccttgtgactttcactatgaatgcgagtgtatatgttcaatgtggggcggatctcattactccacctttgacgggacctcctacaccttcaggggaaattgtacttatgtgttgatgagagagatacacgcacgttttggcaacctgtccttgtatttagataaccattactgcacagcctccgcaaccgcagctgccgcccgatgcccgagagcactgtccattcattacaagtctatggacatcgtacttaccgttaccatggtgcatggcaaggaggaggggctaatcttgttcgatcaaatcccagtgtcctcaggattttccaagaacggcgtcctggtgtcagtgttgggcactactacaatgagagtcgatatccctgcactcggcgtttcggtgacctttaatggtcaagtgtttcaggcgaggctcccctactcattattccataacaacacagagggccagtgcggtacctgtaccaacaatcagcgagatgattgtcttcagagagacggaacaaccgcagcaagttgtaaagatatggccaagacctggcttgtgccagacagcagaaaggacggctgttgggccccaactggcactccccctactgcctccccggccgccccggtgagctctacccccacccctaccccatgtcccccccagccgttgtgtgacctaatgctgtctcaggtttttgctgaatgtcacaaccttgttccacccggccctttctttaatgcctgtatctccgaccattgccgaggtcggctcgaagtcccttgccagtccctcgaagcttatgctgagctgtgccgggctaggggcgtgtgtagcgactggcgaggagctaccggcggactttgcgacttgacctgcccccctacaaaggtatacaagccatgtggccccatccaacccgccacttgcaactcgcggaatcagtccccacaacttgagggcatggccgaaggctgtttttgtcctgaggaccagatcttgttcaatgcgcatatgggaatttgcgtgcaggcatgtccctgtgttggtcctgatggatttcctaaatttccaggtgaacgctgggtctctaattgtcaatcctgtgtttgtgacgagggcagtgtctccgtccagtgtaaaccactaccctgtgatgcgcaaggccagccccctccctgtaaccgtcctggatttgtgacagtgactaggcccagagctgaaaacccttgctgccccgagacggtttgcgtgtgtaataccacaacctgcccccagtccctcccagtatgtccccctggccaggagtctatttgtacccaggaagaaggtgattgctgcccaacatttagatgcagacctcaactctgtagctacaacggtactttttacggagtgggggcaactttcccaggtgccttaccttgccatatgtgtacctgtctcagcggagatactcaagaccccactgtccagtgccaggaggatgcctgtaataatactacctgtccccaggggttcgagtacaagcgcgttgccggccagtgttgtggtgaatgcgtccaaacagcatgtctgactccggacgggcagccagttcaacttaatgaaacgtgggtcaactcacatgttgacaattgcaccgtgtacctttgtgaagctgaggggggcgtacacttgctaactccacaacctgcttcctgtcctgacgtgagcagctgcagagggtctttgagaaaaactggatgctgctactcctgcgaagaagattcttgccaggtacgtatcaacaccaccatcctatggcaccagggatgtgagaccgaagttaatattacattttgtgagggaagttgcccaggcgcatcgaaatattccgctgaggctcaggctatgcagcatcagtgcacctgttgccaggaacgcagagtgcacgaagaaacagtgccactacattgccccaatggttccgccattcttcacacatacacccatgtcgatgagtgcggttgtacacctttttgtgtccccgcccctatggccccccctcacacacgcggcttcccagctcaggaggctaccgccgtttag

SEQ ID NO: 248960 - RNA, 1611 nt, synthetic construct
  misc_feature 1..1611: note = Description of Artificial Sequence: Synthetic coding sequence
  source 1..1611: mol_type = other RNA
gttttttgctgcaactacggccactgcccaccaagaccccctgccttacggccctgccctcccccccttcgggggcgcccaggatcaaccgagcttacaactactgcgactactactgcatccactggaagcaccgccacaccctcttctactcctggtacagcgcctccccccaaagtcctgacttcccccgctaccaccccgaccgccacctcttctaaagccacatcttcctcaagtcccagaaccgccaccaccctgcccgtattgacttcgactgcgacgaagagcaccgccactagtgtgacccccatccctagttctacactggggaccaccggaaccctccctgaacagaccactacccctgtcgccaccatgtcaaccatccatccaagctccactccagagacgactcatacctcaaccgtcctcaccacgaaagctactaccacacgcgccacatcctcaacgagcacaccttcttcgactcccggcactacatggatcctcactgaactgactacggccgccacaacgacagccgcaacaggccctacagccaccccctcctcaacacctggaactacatggattctcacagaattgacaactaccgctactacgactgcatccacaggcagcaccgcgacgcctagcagtactcctggtacaacatggatacttacagaacctagtacaacagcaacggtaactgtcccaaccggcagcaccgcaactgccagttccacacaggctaccgcaggcacgcctcacgtctctactaccgccactaccccgacagtgaccagcagtaaagccacaccgtcctcctctccaggaaccgccacagcattgcccgcactcagaagcaccgccaccacccactcataccagctttactcccacccactattactgcctactacctggactcgcctctctcagaccacgactcctaccgccaccatgtcaactgcaacgccatcttccactcccgagacagtgcacaccagtaccgtcctcactgctaccgccacaaccaccggacccgcgctttggccccctccacctcctccacaggaacagctcaccttgccaaaatgccggctcccccaacctagacactctcatcccttactgcagccccgcgatggtacacacgcttcgtccgttgaccaacacaaccaccatacccataaccaccatacccacaatcagtggttacacggcgatccgttgctgcacccaggcgaccatccccacagacagagcgccgaccatcaccaccacaactgtaccggttcaatggccaccccgtcctcctcaactcagacatctggaacccctcctagcttgactactactgcaacgaccattacagctacaggctctactacaaatccctcctctactccaggcacaacccctattacccccgttcttacatccaccgctacaacgcctgctgccacttcttccaaagctacctcctcatcctcacctaggactgccacgactctcccagtattgacttcgaccgcgactaagagcacagccacatcctttactcctattccttccccttgcggacccagaggcccatcatag

SEQ ID NO: 248961 - RNA, 561 nt, synthetic construct
  misc_feature 1..561: note = Description of Artificial Sequence: Synthetic coding sequence
  source 1..561: mol_type = other RNA
agttctacccccggcactacctggattttgaccgaacctagtaccacagctactgtcacagtgccaaccggatcaacagctactgcaagctctacccaggctacagcaggcactccacacgtctcaaccacagccacaacacctacagtaacttcttcaaaagccacccccttctcttctccagggacagccacagcactgccagccctgagaagcactgcaactacaccaacagcaacctcttttaccgccatccctagtagctgggctcccccaggccctgcataccacaggccgccccatcccaggccaccttgtcctcagccccacccccctccactgcagcgcctaagtacaccaccccaatgtctgcccccaagacctccacggggccaccgcctgtgcggacatccactgttgcatcctcggaactcatcccactaccagtcagcagactaccataatcacttcacagcgaccccatcttccagtcctggcacagcacgtaccctccctgtctggatcagcaccaccacaacccccacaacccgcggttcctag

SEQ ID NO: 248962 - RNA, 960 nt, synthetic construct
  misc_feature 1..960: note = Description of Artificial Sequence: Synthetic coding sequence
  source 1..960: mol_type = other RNA
accaaggccaccacaacaagagcaacaagctctatgtctacgcccagttctacacctggaactacatggatcctgacagaattgacgacagccgccacgacaaccgccgcaacacctcacggccatcccgtcctgcatcccagagaccatctcgacccccatagagcccaacattacacagtgaccgtccccacaggatcaaccgccaccgcttcgagcacacgcgctacagcaggaaccctcaaagtcttgactagccatcacacacacagccaccaacttcagtcccactccttgctgcagagccgggattgtaacagaccctcatcgaccgagaagcattctcatcacactcattcctaccaacgatacagccacccccttttccttccaaccgcctggactaggcttagccagacaactacccccacagcaaccatgtcaaccgccaccccttccagcacacccgagaccgtacacacgtcaaccgtcttaactacaaccactaccaccactcgtgccactctctggcctcctcccccaccaccacaagaacagctgacgctccccaagtgccggctgccgcaaccccgtcattctcaccctctcctccagcctagagacggaacccacgcatcttccgtagaccagcataatcaccatactcacaatcagcggctccacggagaccccctactccaccccacaacacacacagctacggtactgactactactactaccacccccctcgtgctttggcagcatcctcccctcgcccatagacctgttgtgcccccttcactgacaacgaccgccaccaccattaccgccaccggatctaccacaaacccctccagtacacctggtactactccgataccacccgtcctgacaacaactgcccatacttgctctcatcaacagcacagcgactctcttctatgccctcgtgactag

SEQ ID NO: 248963 - RNA, 2007 nt, synthetic construct
  misc_feature 1..2007: note = Description of Artificial Sequence: Synthetic coding sequence
  source 1..2007: mol_type = other RNA
atgagggaaattcacgcccgcttcggcaatctctccctctatctcgacaaccattattgtaccgcttctgctaccgccgccgcagccagatgtcctagagctctttctattcattataaaagtatggatattgtgttgacagtgacgatggtgcatgggaaggaggaggggctgattctgttcgatcaaatcccagtttctagcggattctccaagaatggtgtgttggtcagtgttctaggcacaacaactatgcgagtagatatccccgccctgggtgtctctgtgacttttaacggacaagtgtttcaagcccgattgccatactcgctgttccacaacaacacggaaggccaatgcggtacttgcactaacaatcagagggacgactgtttacaaagagatgggaccaccgctgcctcgtgtaaagatatggctaagacttggctggtgccggattcacggaaagacgggtgctgggccccgaccggaacaccacctactgcctcccccgccgctcctgtcagcagtactcctactccaaccccatgcccacctcaacccttgtgtgacctcatgctgagtcaggtgttcgccgaatgccacaatcttgtcccacccggacccttcttcaacgcttgtatctccgaccattgccgaggacgccttgaggtcccctgtcaatccctggaagcgtacgctgagctctgtagagctcggggagtgtgttccgactggagaggcgctacaggcggcctatgtgacctcacctgcccaccaacaaaagtatacaagccatgtggaccaattcagcctgcaacttgcaattcaaggaatcagtcgccccagctggagggtatggctgagggatgcttttgtccagaagatcaaattctgttcaatgcacacatgggcatctgtgtgcaggcctgtccttgtgtgggccctgatggcttcccaaagtttccaggagaacgctgggtatccaattgtcaatcatgcgtgtgtgatgaaggatcagtgtccgtgcagtgtaagcccctaccatgcgatgcccaaggccagcctcccccctgtaacagacccggattcgtgaccgttacccgccccagagcagaaaatccttgctgcccagagaccgtgtgcgtttgcaacactactacatgtcctcagtctctgcccgtgtgccccccgggtcaggaaagcatttgcacacaggaagagggggattgctgtcctactttccggtgtcgcccgcagctctgcagttataacggaacattttatggagttggcgcaacattccctggtgcactcccctgccacatgtgcacctgcctgtctggcgatacccaagatcccactgtccagtgccaagaggacgcttgcaataacacaacttgtccccagggattcgaatataaacgggtggccggacagtgctgcggagaatgtgtccagactgcctgcctgacccctgatggccaacctgttcaacttaacgagacttgggttaatagccatgtggacaactgtactgtatacttgtgtgaagcagagggaggcgtgcaccttctgacccctcaacccgcctcttgtcctgatgtttcttcatgtagaggttcacttcgcaagactgggtgttgctatagctgcgaggaagatagctgtcaggtccggatcaacaccaccattttatggcatcagggatgtgaaaccgaggtcaatatcacgttttgcgaaggctcttgtcctggagcctccaaatatagcgccgaggcccaagcaatgcagcatcagtgcacctgttgccaagagagaagagtccacgaggagaccgtcccacttcattgccccaatggttcagccatcctccatacttatacacatgttgacgaatgtgggtgcacccctttttgtgttcctgcccctatgtctccccccgcctgcgtgtggcaccccgccctacgcgccccagcagctcacctcggactcgcccccccctag

SEQ ID NO: 248964 - RNA, 441 nt, synthetic construct
  misc_feature 1..441: note = Description of Artificial Sequence: Synthetic coding sequence
  source 1..441: mol_type = other RNA
atgactatgcgctcactgctacgcaccccctttctgtgtggtctactttgggctttttgtgctccaggagcccgtgctgaggagcccgccgcatccttttcccagccaggatctatgggcttagacaagaacacagtgcatgatcaggaacacattatggagcacttagagggggtcattaacaaacctgaagccgaaatgtcacctcaagaattacagctccattatttcaagatgcacgactacgatgggaataatctgctggacggattagagttgagtactgcaatcacccacgttcataaagaggagggatcggaacaggcgcctttaatgagtgaagacgaactgattaatattattgacggagtcctcagagatgatgataagaataacgacgggtacatagattacgctgagttcgcgaaaagcttacagtag

SEQ ID NO: 248965 - RNA, 441 nt, synthetic construct
  misc_feature 1..441: note = Description of Artificial Sequence: Synthetic coding sequence
  source 1..441: mol_type = other RNA
atgaccatgcgatctctcctccgaacacccttcctatgcgggcttttgtgggccttctgcgcgccaggtgcacgtgcagaagagccagcggcctcgtttagtcaacctggatcaatgggcctggacaaaaatactgtgcacgatcaggaacacataatggaacacctcgagggcgtcatcaacaagcctgaagccgagatgtcaccacaagaacttcagctgcactacttcaaaatgcacgactacgacggcaacaacctgttagacggtctggaactgtcaacagccatcacacacgttcacaaagaggaaggaagtgaacaagccccacttatgtcagaagacgagcttatcaatatcattgacggcgtgctgagggacgatgacaagaacaacgatggatacatagattacgcagagtttgcaaaaagcttgcagtag

SEQ ID NO: 248966 - RNA, 285 nt, synthetic construct; identical to SEQ ID NO: 248360
  misc_feature 1..285: note = Description of Artificial Sequence: Synthetic coding sequence
  source 1..285: mol_type = other RNA

SEQ ID NO: 248967 - RNA, 441 nt, synthetic construct
  misc_feature 1..441: note = Description of Artificial Sequence: Synthetic coding sequence
  source 1..441: mol_type = other RNA
atgactatgaggagtttactgcgtactccatttctatgcggacttctatgggctttctgcgcgcccggtgctcgagccgaagagcccgcggcatccttcagccaacctgggagcatggggcttgataaaaatacagttcatgaccaggaacacattatggaacatctagagggcgtgattaataaacctgaagccgaaatgagcccccaggaattacagctacactatttcaagatgcatgattacgacggcaataacctcttggatggactggagctatccacggcaatcacacacgtccataaagaagagggaagcgagcaggcaccactcatgagcgaggacgagctgatcaacatcatagacggagtacttagggatgacgacaaaaataatgacggctatatcgactacgcggaattcgccaaatcgttacagtag

SEQ ID NO: 248968 - RNA, 441 nt, synthetic construct
  misc_feature 1..441: note = Description of Artificial Sequence: Synthetic coding sequence
  source 1..441: mol_type = other RNA
atgacgatgagaagtttgcttagaacacccttcttatgtggactgctttgggctttctgcgcccccggcgctcgcgctgaagaacctgcagctagtttctcccaacccggctcaatgggccttgacaaaaacactgtgcacgatcaggagcatattatggaacatctggagggcgtaatcaacaaacctgaagcggagatgtcaccacaagaacttcagttacattactttaagatgcacgattatgacggtaacaacctgttggatgggctcgaactctcaacagccatcacacacgtgcacaaagaggagggatccgaacaagccccactgatgtctgaggatgagttgattaacattattgacggcgtattaagggacgacgacaaaaacaacgacgggtacatagactatgcagaatttgccaaaagtctacagtag

SEQ ID NO: 248969 - RNA, 285 nt, synthetic construct; identical to SEQ ID NO: 248363
  misc_feature 1..285: note = Description of Artificial Sequence: Synthetic coding sequence
  source 1..285: mol_type = other RNA

SEQ ID NO: 248970 - RNA, 285 nt, synthetic construct; identical to SEQ ID NO: 248364
  misc_feature 1..285: note = Description of Artificial Sequence: Synthetic coding sequence
  source 1..285: mol_type = other RNA

SEQ ID NO: 248971 - RNA, 441 nt, synthetic construct
  misc_feature 1..441: note = Description of Artificial Sequence: Synthetic coding sequence
  source 1..441: mol_type = other RNA
atgacgatgaggtctctgcttcgcacacccttcctttgtggcttactctgggccttctgtgcaccaggagcacgcgctgaggagcctgctgccagcttttcacaacccgggagtatggggctcgataaaaacacagtccacgaccaagaacacattatggagcaccttgagggcgtaatcaacaaacctgaggctgaaatgagtcctcaagaactgcagcttcattattttaagatgcatgactatgacggcaataaccttctcgatggcctcgaactgtctactgcaatcacccacgttcacaaagaagaaggttctgaacaggcaccattaatgtccgaggatgagctaataaatattatcgacggcgttctgagggatgacgacaagaataacgacgggtacatcgattacgctgagtttgcaaaatccttacaatag

SEQ ID NO: 248972 - RNA, 441 nt, synthetic construct
  misc_feature 1..441: note = Description of Artificial Sequence: Synthetic coding sequence
  source 1..441: mol_type = other RNA
atgacaatgagatccttgctaaggacacccttcctctgcggtttgctttgggccttttgtgctccaggcgcccgggccgaagaacctgccgcaagtttctctcagcccggctctatgggactagacaaaaatactgttcatgatcaggaacacatcatggaacatttggagggcgtgataaataaaccggaagctgaaatgtccccccaggagctccagttacactactttaagatgcacgattacgatggaaataatctgcttgatgggctcgaattatccacagcaatcacccacgtgcacaaggaagagggatcagaacaggcacctcttatgagcgaagacgagctaatcaacattattgatggagtgttacgagacgatgataaaaataacgacggctacatagattacgcggagtttgccaaatcactccagtag

SEQ ID NO: 248973 - RNA, 186 nt, synthetic construct; identical to SEQ ID NO: 248367
  misc_feature 1..186: note = Description of Artificial Sequence: Synthetic coding sequence
  source 1..186: mol_type = other RNA

SEQ ID NO: 248974 - RNA, 384 nt, synthetic construct
  misc_feature 1..384: note = Description of Artificial Sequence: Synthetic coding sequence
  source 1..384: mol_type = other RNA
atgctatctgtgtgctcttgcaggacatcctccggaatgagatcccagtggcctagcgcacgacagcggagctctagtcttagtacttttaggcacataatggaacacctcgagggagtgattaacaaacctgaagctgagatgtccccccaggagctgcagctacattacttcaaaatgcatgactatgacggcaacaacctcttggacggccttgaactgagtaccgccattacccacgtgcataaggaagaaggaagcgaacaagcccccctgatgagcgaagacgaattgatcaacatcatcgatggagtgttgagggatgatgataaaaacaacgatggttatatagattatgccgaatttgccaaatccctgcagtag

SEQ ID NO: 248975 - RNA, 1515 nt, synthetic construct
  misc_feature 1..1515: note = Description of Artificial Sequence: Synthetic coding sequence
  source 1..1515: mol_type = other RNA
atgcggttcttctgcgcacgctgttgttcctttggccccgagatgcccgctgtacaactccttctcctcgcttgtctcgtatgggatgttggagccaggacggcacaattgagaaaagccaacgaccagagtgggcgatgtcaatataccttcagtgtggcaagcccaaatgagtcctcttgccctgagcagtcacaggccatgagcgtgatccacaacctgcagcgagattcgtctacacagcgtctcgacctggaagccacaaaggcccgcctgtcttctcttgaatctctgctccatcagctaacactggatcaggctgctagaccccaggaaactcaggaggggctacagagagagcttggcacgttgcgcagagaaagggaccagctagagacccagaccagagagctggaaaccgcatactccaatttgctgcgtgataagagtgtgctggaggaggaaaagaaacgattaaggcaagaaaacgaaaacttagcccgtcggctcgagagcagcagccaagaagttgcaagacttagaagaggtcaatgcccacagacacgcgatactgccagagcagtgccaccaggcagtcgcgaagtgagcacatggaaccttgacacactagcgtttcaggaactcaaaagcgagctgaccgaagtcccggcatctagaatcctgaaggagtcaccaagcggctacctcaggagtggtgagggggataccggatgcggagaactggtctgggtgggagaaccactaacactgaggaccgcagagactatcactggcaagtacggagtgtggatgagggacccaaagccgacctacccctacacacaggaaactacatggcgaatcgacacagtgggaaccgatgtacggcaggtatttgaatatgatctcatctcacagtttatgcagggttatccttctaaagtccacattttgcctcggcctttggaaagtactggcgccgtggtatactccggaagtctttattttcagggggcagaatccagaacagtcattcgttacgagctgaacactgagacagttaaggcggagaaggagattccaggcgcaggttatcacggacaatttccttacagttggggtggctacactgatattgacttagcggtcgacgaagcgggtctttgggtgatttatagcaccgatgaagcaaagggtgctatagttttatcaaaacttaatcccgagaatctggaactggaacaaacgtgggaaacaaacatcagaaagcagtctgtggccaatgcattcataatctgcggaaccttgtacacagttagctcctacaccagcgcagatgcaactgtgaatttcgcatacgacactggcaccggaatttctaagacgctgaccatcccctttaaaaatagatacaagtactcttcaatgatcgactataatccattagagaagaagcttttcgcctgggataatctcaacatggttacttacgatatcaagctttctaagatgtag

SEQ ID NO: 248976 - RNA, 1107 nt, synthetic construct
  misc_feature 1..1107: note = Description of Artificial Sequence: Synthetic coding sequence
  source 1..1107: mol_type = other RNA
atggggcggaaaaaaattcaaatttcacgaatcctggatcaacgcaaccgccaggtaacctttactaaaagaaaatttggactgatgaaaaaagcctatgaactcagcgtcttgtgtgattgtgaaatcgccctgatcatttttaacagcgccaatcgcctattccaatacgcgagcaccgatatggaccgcgtgctgcttaaatacaccgaatactccgaaccccatgagagtagaaccaataccgatattcttgaaactctgaaacgaagaggcatcgggttagacggccccgagctggaacctgatgagggacccgaagagcccggcgaaaaattcaggcgcctagccggggaagggggtgatccagcgttacccagacctagactgtaccccgcagcccctgccatgccatcgccggacgtagtgtacggcgctcttccaccacctggctgcgacccttctggacttggggaggcactaccagctcaatctcggcctagcccgtttagacccgcagcccctaaagccggcccccctggcctagtacaccccctgttcagcccaagccatctgacgagtaagacaccaccacccctctatcttccaacagaaggcaggagatccgatcttcctggcggtttggctggtcctaggggcggactgaacacaagtcgatcactgtacagtggactccaaaatccgtgctccactgccacgcccggcccacctttgggctcatttcccttcttaccaggcggccctcccgagtatggattgggcgaccctccaccaccacccggtctgttgcaacctcctacccttgctccctggcaaccaagcagaggagatggtccaccagccgtgagttctcaacccagtgggggacgatcgctgggcgaagagggccccccgaccagaggggcatcccccccgactccaccagtttccattaaaagcgaaagactgtcaccagcccccggagggccaggtgacttcccaaaaactttcccttatcctttgttgctcgcacgcagtttagctgagcccctgcgcccaggtcccgctctgagacggctacccttagcagatggctggccaagatag

SEQ ID NO: 248977 - RNA, 3477 nt, synthetic construct
  misc_feature 1..3477: note = Description of Artificial Sequence: Synthetic coding sequence
  source 1..3477: mol_type = other RNA
atggcagccgtcaggggagcgcctctcctcagttgcttattggcattgctcgccctgtgtccgggagggaggcctcagaccgtgctgacagatgatgagatcgaggagtttttggagggctttctttcagagcttgagcccgaaccaagagaggatgatgtggaagcccccccgccccccgaacccacgccccgagtcaggaaggcccaggccggtgggaaaccaggcaagcgaccagggacagcagcagaagtcccccctgaaaagactaaagataagggtaaaaaaggaaagaaagacaaaggacccaaggtgcctaaagaaagcctggaaggttctccacggccacccaaaaaggggaaagagaaaccgcctaaagccacaaagaaaccaaaggaaaagccaccaaaggccaccaagaaacccaaagaaaagccacccaaagccactaagaaaccaaaagaaaagcctccgaaagctaccaagaagcccccatccggtaagcggcccccgatactggcccccagcgaaaccctcgaatggccactcccacctcccccgagccccggcccagaggagttacctcaagaaggaggggcccctctaagtaataactggcagaaccccggggaggaaacacacgtcgaagcgagggagcaccagcctgaaccagaagaagagaccgagcagcctacacttgactacaacgaccagatcgagcgcgaagattacgaggactttgaatacatccggagacaaaagcaacctagaccgcccccgagccggagacgcagacccgagcgagtatggccagagccacctgaggagaaggctcccgcccctgcacccgaagaacgcattgagccgcccgtgaaacctctgctgccaccattgcctcccgactacggagatggctacgtcatacctaactatgatgatatggattactactttggaccccccccaccccagaaaccagatgctgagcgacaaactgatgaggagaaggaagaactaaagaaacccaaaaaggaagatagtagcccaaaggaagagactgataaatgggctgtggaaaaggggaaggaccacaaggagccacggaaaggtgaggaactcgaggaggaatggacacccacagagaaggtcaaatgtccgcctatcggtatggaaagtcatagaattgaagataatcaaattagggcttcctccatgctcagacatggacttggcgctcaacgcggacgactaaatatgcagacaggggctacagaggacgattattacgatggcgcttggtgtgcagaagacgatgcacggactcagtggattgaggtcgacacaagaaggactacaagattcacaggagtgattactcagggtagggactcttctattcacgatgattttgttaccacattttttgtcggattcagcaatgattctcagacctgggtgatgtatacaaacggctatgaagagatgacgtttcacgggaacgtggacaaagatacacctgtgctaagcgaattgcccgagcccgtcgtggcaagatttattagaatctacccactgacctggaatggtagtttatgtatgcgtctcgaagtcctaggatgttccgtcgcccctgtatattcatattatgcccagaacgaggtggtagccactgatgatcttgatttccggcaccacagctacaaggatatgcggcagttaatgaaggtcgtaaacgaagaatgtcctacaatcactcgcacctactctctgggaaaaagttcacggggactcaaaatctatgctatggagattagtgataacccaggagaacatgagttaggtgagcctgagttcaggtacactgcaggaattcacggaaatgaagtgctgggacgcgaactgttgctgctgcttatgcaatacctgtgcagagaataccgagacggtaatccaagggtccggtcgctggtacaggataccagaatccaccttgttcctagtttgaaccctgatggctatgaagttgctgcccaaatgggctcagaatttggaaattgggccctgggcctttggactgaggagggattcgacatctttgaagatttccccgacttgaattccgtgctgtggggagccgaggagagaaagtgggtgccatatagggtgccaaataataatctgcccattcctgagagatatctttctcctgacgccaccgtgtcaacagaggtacgagctattattgcatggatggaaaaaaacccctttgtccttggagcgaatctgaatggtggcgaacgacttgtcagttatccctatgatatggcccgcaccccgacacaggaacagttgctcgcagcagccatggcggccgctcggggcgaagatgaggacgaggtgagcgaggcccaggaaacacccgatcacgcgatatttagatggctggcgattagcttcgcgtccgcacacctgaccctgacagagccctaccgcggcgggtgccaagctcaagattatactggtggaatggggattgtgaatggcgccaagtggaatccccgcacgggaacaattaacgatttttcataccttcataccaactgcctcgaactgagcttctatcttggttgtgataagtttccgcacgaatctgaactgcccagggaatgggaaaacaataaagaggccctactgaccttcatggagcaggtacacagaggtattaaaggcgttgttactgatgagcaggggatccccattgcaaatgccactattagcgtatccggcattaaccacggcgtcaaaactgcttccgggggtgactactggagaatactcaatcctggggaataccgagtgactgcgcacgccgaaggctacacccctagtgccaaaacttgcaacgttgattacgatatcggggctacacagtgcaatttcattttggcgagatccaactggaagagaatccgcgagatcatggctatgaatggcaatcgacctatccctcacatcgacccaagcaggcctatgacccctcagcaaagaaggttacaacagaggcgcttacagcatagattgcgtcttcgggctcagatgcgcttaaggcgattaaacgccactactacattgggcccccatactgtcccccctactctaccgccggcccccgccaccaccctttcaactaccatcgagccttggggcctcatcccacccacaaccgccggatgggaggagtctgaaacagaaacatacacagaagtagtgaccgagtttggcactgaggttgaaccagagtttggaacaaaggtcgagccagaatttgaaacccagctggaacccgaattcgaaacccagctagagccagaatttgaggaagaagaagaggaggagaaggaggaggagattgctaccggacaagcctttccgtttacaaccgtagagacctacacagttaattttggcgatttttag

SEQ ID NO: 248978 - RNA, 471 nt, synthetic construct
  misc_feature 1..471: note = Description of Artificial Sequence: Synthetic coding sequence
  source 1..471: mol_type = other RNA
atggcttcccgagtgttgagtgcttacgtcagccgcctgcccgccgcctttgctccattgccaagagtaaggatgctggctgtagcccgaccattaagtaccgctttgtgctcagcaggaactcagacacgccttgggactctccagcccgccttggtgttggcccaagtaccaggcagggtcacacaactatgtcgacagtattccgatatgcccccactgacactcgagggaatccaggaccgggtgctgtatgtccttaaattatacgataaaatcgatccagagaagctttccgtgaacagtcacttcatgaaggacctgggactagactcattggaccaagtagaaataattatggcaatggaagacgaattcgggttcgagattcctgacatcgacgccgagaaactgatgtgtcctcaagagattgtggattacatagctgacaaaaaggacgtttacgagtag

SEQ ID NO: 248979 - RNA, 1707 nt, synthetic construct
  misc_feature 1..1707: note = Description of Artificial Sequence: Synthetic coding sequence
  source 1..1707: mol_type = other RNA
atgatgggatgttggatcttaaatgaaggactgtccaccatcctcgtcttgtcctggctaggtattaacttctatcttttcattgacactttttactggtacgaagaggaagaatcctttcactacacccgcgttatcttgggcagtacattggcttgggctcgagcctcagcactttgtctcaattttaattgcatgctgatccttatccctgtgagtcgcaaccttatttccttcatcagaggcacgtccatttgttgccgtgggccttggagacgccagcttgataagaacctgagattccataaactggtggcctatggcatcgcagttaacgcaaccattcacattgtcgcccactttttcaatttagaacgctaccattggtcccaaagcgaggaggcacaaggtcttcttgccgcactgtcaaagttgggtaatacaccaaacgaatcctatctcaatcctgtgaggacatttcccaccaatactactaccgaactgctgcggacaattgccggagtgactggcctagtgatctctttagccctcgtgctcattatgacgtcgtcgacggaattcatccgacaagcttcgtacgaactcttctggtacacccatcatgtcttcattgtttttttcttaagtctggctatacacgggacaggaaggattgtccgggggcaaactcaggattctctcagcctccataacattacattttgtagagataggtacgctgaatggcaaaccgtcgcccaatgtcccgttccccaattcagcgggaaagaaccttccgcctggaaatggattttggggcctgtagtattgtatgcatgcgagagaattatccgcttttggagatttcaacaggaggtggtcataacaaaggtcgtaagtcacccgtccggagtccttgagctacatatgaagaaaaggggttttaaaatggcacctggtcagtatatattagtgcagtgccctgctatatctagtctcgaatggcatccttttaccctgacttctgctcctcaggaagattttttttcagtccatataagagctgccggcgattggaccgctgccctcctggaggcctttggcgcggaaggacaggcactccaagaaccttggagcctccctcgcctggccgttgacggcccatttggaaccgcgctcaccgatgtttttcattaccccgtttgcgtgtgtgtggccgctggaatcggagtcacccccttcgcagccttgctcaaaagtatctggtacaagtgctcggaggcccagacccccctcaaactatcaaaagtctacttttattggatctgccgcgacgccagagcgttcgaatggttcgcagacctgctactgagcctcgagactaggatgagcgaacaaggtaagacccattttctctcttaccacatctttctgacaggatgggacgaaaaccaagcactccatattgctctgcattgggacgaaaatactgatgtcattaccggactgaagcaaaagacattctatggccggccgaactggaataacgagtttaagcagattgcatataaccacccatcatcatccattggcgtattcttttgcggaccaaaagccctgtcgcgtaccttgcagaagatgtgccacctttactcctccgccgatcccaggggagttcatttttactacaataaagaatctttttag

SEQ ID NO: 248980 - RNA, 2520 nt, synthetic construct
  misc_feature 1..2520: note = Description of Artificial Sequence: Synthetic coding sequence
  source 1..2520: mol_type = other RNA
atgagtattcggcggctgctcattctgatcctgaaaattggacgacggtggaccgagcttatcaggacaatggaatctagagtgctactgcgaactttttgtctcatattcggtttaggtgcagtttggggtctaggcgtggatccctccttacagatagacgtcctcactgaactagagctgggagaaagtaccaccggcgtacgacaggtgccagggctgcacaacggcacaaaagccttcctgttccaggacaccccccgaagcatcaaggcctctacagctacggccgaacagtttttccagaagttaagaaataagcacgaattcactattttggtcacacttaagcaaacacacctcaactcgggagtcatcctttcaattcatcacctggaccataggtacctggagttagaatcctctggtcaccgcaacgaggtgcggctgcactatagaagcggcagtcaccgcccccacaccgaagtttttccatacatactggcagacgataaatggcataaactatccctcgctatctccgcatcccacctgattcttcatatagactgcaataagatctacgagcgcgtcgtggagaagccctctaccgatctcccactcggaactacattttggttaggacagagaaacaacgcccatggctattttaagggaattatgcaggatgtacaacttttagtcatgccccaagggttcattgctcaatgccccgatctcaaccgaacctgtccgacatgcaatgacttccatgggctcgtgcagaaaattatggaactgcaggatatactggccaaaacctccgcaaaactaagccgggctgaacagaggatgaatagattagatcagtgttattgcgaacgtacatgcactatgaaggggacaacctatcgagaattcgagagctggatagacggttgtaaaaactgcacttgtctcaatggaaccatccaatgtgaaaccttgatctgccctaaccctgattgccctctcaaaagcgcgttggcctatgtggatggaaaatgttgcaaagagtgcaagagcatctgccaatttcaaggaagaacttacttcgaaggtgaacggaatactgtctactcaagttctggtgtctgtgtattgtacgagtgtaaggatcagaccatgaagctcgtcgagagttctggctgcccggccctagattgtcctgaaagccaccagattacgctgtcccattcctgctgtaaagtctgtaaaggatatgacttctgctccgaacgccacaattgtatggaaaactcaatttgccggaacttaaatgaccgtgctgtatgttcctgcagggacggcttccgcgctctgagagaagacaatgcctattgtgaagatatcgacgaatgtgcggagggaagacattattgtcgggagaacactatgtgtgtaaatacccccggcagctttatgtgtatctgtaaaaccggctatataagaatcgatgactatagctgcactgagcacgacgagtgcatcacaaatcaacacaattgcgatgagaatgccttatgtttcaacaccgtcggaggtcacaattgcgtgtgtaaacctggatacacaggaaatggtactacttgcaaggcattttgtaaagatggttgccgcaacggaggggcttgtatagcagccaacgtatgcgcctgtccccaaggttttaccggtccatcatgtgagactgatatcgatgagtgttccgacggcttcgttcagtgcgatagccgcgcaaattgtatcaatcttccagggtggtaccactgtgagtgtcgggacggctaccacgataacggaatgtttagcccaagtggggagagttgcgaggatattgatgagtgcgggactggccgccattcatgcgccaacgataccatctgctttaatctggatgggggctacgattgcaggtgtccacacggcaagaactgcacaggagactgcattcacgacggtaaagtgaagcataatggccaaatttgggtcttggagaatgatcgatgctcagtttgttcctgccaaaatggattcgtcatgtgtagacgtatggtttgcgattgtgaaaatccaacggtggatctgttttgctgccccgaatgtgatcccagactgtcctctcaatgcttgcaccagaatggggagaccttgtataacagcggtgacacatgggtccagaattgccaacagtgcagatgccttcagggggaagtagattgttggcctttaccctgccccgatgtcgaatgcgaattctcgattctgccagagaatgaatgttgcccacgatgtgttacagatccgtgtcaggctgacacgatccgcaacgatatcactaaaacatgtttagatgagatgaatgttgtccggtttacgggaagtagttggattaagcatggtacggaatgtacactttgccagtgtaaaaacggacatatttgctgcagtgtcgatccacagtgtcttcaggagctgtag

SEQ ID NO: 248981 - RNA, 2448 nt, synthetic construct
  misc_feature 1..2448: note = Description of Artificial Sequence: Synthetic coding sequence
  source 1..2448: mol_type = other RNA
atggaaaccggcctcggtgcccccttgttcaaagcttggctactgattagtgtttggggcctcggcgtggacccgtctctccagattgacgtactgacagaactcgaactgggtgaatcgactacaggagtcagacaggttcctggattgcataatgggaccaaggcctttctctttcaggatacaccacgctctatcaaagcttccacggcaaccgcggaacaattttttcaaaaattaagaaacaagcatgaatttactattttggtcaccctgaagcagacccacttgaactctggggtaatactttcaatacatcaccttgaccaccgctacctggagctcgaatcttccggacacagaaacgaggtcagactccactacagatctggttcccaccggccccacacagaagtcttcccctatatactggctgatgacaagtggcataagttgagtctagccatctcggcctcacacttgatcttgcatatcgactgcaacaaaatatacgagagagttgtcgagaagccatccaccgatcttccattgggcacaacattctggttgggtcagcgcaacaatgcacacggatacttcaagggaataatgcaggatgtccagctgctggttatgcctcagggttttattgcgcagtgtccagatctcaacaggacatgcccaacgtgcaacgattttcatggattggtccaaaaaataatggaactccaggacatcctggcaaaaacgagcgctaaactgtcaagagcagaacaaaggatgaaccggttagaccagtgttactgcgaaaggacttgcacaatgaagggaaccacatatagagaatttgaatcttggatcgatggatgcaaaaactgcacatgcctgaacggcactatccagtgcgagactctaatttgcccaaatcccgactgcccattaaaatccgccctcgcttatgtcgatggcaaatgttgcaaggaatgtaagagtatctgtcagttccaaggacggacgtacttcgaaggggaaagaaacaccgtttacagttcttccggggtctgtgtcctgtacgagtgtaaagaccaaaccatgaaattagttgaatccagtggttgccccgctttggactgcccggagtctcaccagatcactctaagccattcgtgttgtaaggtatgtaaggggtatgatttttgctccgaacgccacaattgtatggagaacagcatttgtaggaaccttaatgatagagcggtatgttcatgtcgggacggtttccgggcactcagagaggacaatgcatactgtgaggacatcgatgaatgcgctgaaggacggcactactgcagggaaaatacaatgtgcgtgaataccccaggatcgtttatgtgcatttgtaagactggctacattaggatcgacgactatagttgtactgagcatgatgaatgcataaccaatcaacacaactgcgatgaaaatgctctttgctttaatacagttggtgggcacaattgtgtgtgtaagccgggttacaccggcaatggaactacatgtaaagcattttgtaaagacggatgccgaaatggcggggcctgcatagctgctaatgtgtgcgcttgcccacagggcttcaccggcccaagttgcgaaaccgatatcgatgagtgttcagacgggttcgtgcaatgtgattctcgggccaattgtatcaatctgccaggatggtatcactgtgagtgtagggatggctaccacgataacggaatgttcagtccttcaggagagtcttgtgaggatatagacgagtgcggaactggccgtcatagctgtgctaatgatacaatctgctttaatttagacggcggatatgattgtcgctgcccccatggaaagaattgtactggcgactgtatccacgatggcaaagtgaaacacaacggacagatatgggtcttagagaacgaccgctgctcagtgtgttcctgtcagaacggattcgtaatgtgccgcagaatggtgtgtgactgtgaaaacccaaccgtggacctgttttgctgtcccgagtgcgatcccagactgtcctcccaatgcctgcaccaaaacggcgagacactgtacaactctggagatacatgggttcaaaattgccagcagtgcagatgcttacagggtgaagtggattgctggcccctgccttgccccgatgtggaatgtgaattttcaattctgcctgaaaatgagtgctgtccccgttgtgttacagatccgtgtcaagctgacaccatcaggaacgacatcaccaaaacatgtctcgacgaaatgaacgtggtcaggtttaccggtagttcgtggataaaacacggaacagaatgcaccctctgtcagtgtaaaaatggccacatatgttgctccgtagacccccaatgcctccaagaactgtag

SEQ ID NO: 248982 - RNA, 2451 nt, synthetic construct
  misc_feature 1..2451: note = Description of Artificial Sequence: Synthetic coding sequence
  source 1..2451: mol_type = other RNA
atggaatctagggtcctacttcgcaccttttgcttaattttcggcctgggagccgtgtggggactgggagtggatccatcactacaaatcgacgtgttgactgaacttgaactcggtgaatccaccactggcgttaggcaggtccctggactgcataacggtaccaaagccttcctttttcaggatacaccgcgctcaatcaaagcttcgaccgccacagcagagcagtttttccagaagctccggaataagcacgaattcactattttagtcacccttaagcagacccacctcaactcaggggttatactgtcaattcatcacttggatcacagatatctggaactcgagtcaagcggacaccggaacgaggtcaggctgcactatcgaagcggaagccaccgtccccatacagaagtcttcccttatatactggcagatgacaaatggcataaacttagtcttgcaatttcagcttcccacctcatccttcatatcgactgcaataagatctacgagagagtcgtggagaaaccctcgacggacttgcccctcggcacaaccttctggctgggacagcgcaacaacgcacacggatacttcaaggggatcatgcaggatgtccagctgctggtcatgcctcagggcttcattgcgcagtgcccggatctcaatcgtacttgtcccacctgcaacgactttcatggactggtccagaagatcatggagctgcaagacatactcgccaaaacgtcagccaaactgtccagagccgaacagagaatgaatagactagaccaatgttactgtgagcgaacctgcacaatgaaaggtacaacgtatcgagaattcgaatcttggatagatggatgcaaaaactgcacatgcctgaacggaaccattcaatgtgaaactttgatctgcccaaaccctgattgccctctaaagtccgcccttgcatacgttgacgggaagtgctgtaaggaatgcaaaagtatttgccaatttcaaggccgaacatacttcgagggcgagcgaaacactgtatactcatcaagcggggtgtgtgtcctatacgaatgtaaggatcagacgatgaaactcgtggaaagctctgggtgcccggcacttgattgtccagaaagtcaccaaatcacactgtcccattcttgttgcaaagtttgtaagggatatgacttttgttcagaacgccataattgcatggagaattcgatatgtaggaatcttaatgatcgagcggtttgttcatgtcgggacgggtttagagcccttagagaggataacgcgtactgtgaggatattgatgagtgcgctgaaggccggcactattgcagagaaaacacaatgtgcgtcaacacccccggaagcttcatgtgcatttgcaaaacagggtatattaggatcgatgactacagttgtactgagcacgacgaatgcatcacaaaccagcacaactgtgacgaaaatgccctatgctttaataccgttggaggccataactgcgtgtgcaaaccaggttacacaggtaacggcaccacctgcaaagctttttgcaaagatggttgtaggaacggaggcgcatgtatagccgctaacgtctgcgcctgcccacagggcttcactgggccaagctgcgaaaccgatatcgacgagtgctcagacggatttgtccagtgtgatagtagggctaattgcattaatctccctggatggtaccactgcgaatgtcgagatggctaccatgacaatggcatgttctctccttcaggtgagtcctgcgaagacatagacgagtgcgggactggacggcatagctgcgctaatgacacaatctgcttcaatctggacggaggttacgactgtcggtgtccgcacggaaagaactgcacaggtgattgtattcatgacgggaaggttaaacataatggacaaatctgggtactggagaatgaccgatgcagcgtgtgtagctgtcaaaacggtttcgtgatgtgtaggagaatggtttgtgattgtgagaacccaacggttgacttattttgctgtcccgagtgtgaccctcgcctttcatcacaatgtttgcaccagaatggagagactctgtacaatagtggagacacctgggttcagaattgtcaacaatgcaggtgcttacagggagaagtggattgctggcctctgccctgccccgatgtcgagtgcgagttcagcatcttgccagagaacgagtgttgcccccggtgtgtaacagacccgtgccaagcagacaccattcgcaacgatattacgaaaacatgtctggatgagatgaacgtcgttcgctttaccggaagcagctggatcaagcatggaactgagtgtacattgtgtcagtgtaagaacggtcacatatgctgctcagtcgaccctcagtgtttgcaggaattatag

SEQ ID NO: 248983 - RNA, 2601 nt, synthetic construct
  misc_feature 1..2601: note = Description of Artificial Sequence: Synthetic coding sequence
  source 1..2601: mol_type = other RNA
atggggttccctccgcttttgaaaggccaggcatccgctaccaggtcaagtcttgcctcctgtagttgggtagtctttttcctgtcttgtcttagtagacatgcgcctgaaattgaaggtgggcggcgatggacagagctgattcggactatggagtctcgcgtattgctgaggaccttttgtctaattttcggactgggtgctgtgtgggggttgggagtggacccttcactgcagattgacgtgctcaccgagttagagttaggagagagcactacaggagtccgccaggtcccaggcctccacaatggcacaaaagcattcctatttcaggataccccacgcagcatcaaggcttctaccgccaccgctgagcagttctttcagaaattacgcaataaacacgaattcacaatcctcgtgaccctgaagcaaacacacctaaactccggcgttattctgtctatccaccatctcgaccaccgctatttagagttggagtcttccggacaccggaatgaggtgcgcttgcattatagaagcggctctcatagaccccatactgaggtatttccatatatccttgcagacgataagtggcacaagctttcacttgctatctcagcttcgcatcttattctgcatatcgactgtaacaagatatatgagcgggtcgtggaaaagccttcaacagatctcccactcggaactacattttggcttggacagcgtaataatgctcacggctattttaaagggattatgcaggatgttcagctcttagtaatgcctcaggggtttattgcacagtgtcccgatcttaaccgaacttgtcccacatgcaacgattttcacggactggtccagaagattatggagctgcaggatatcctggcgaaaaccagtgctaagctcagcagagcggaacagaggatgaatagattggatcaatgctattgtgaacggacttgcaccatgaagggtaccacatatcgcgaatttgaatcttggatcgatggatgtaaaaattgcacatgtttaaacgggactatccagtgcgagacactaatttgccctaatcctgactgccctctgaagtctgccctcgcttatgtggatgggaaatgttgcaaagaatgtaaatccatatgtcaattccagggtcgaacgtattttgagggagagaggaatactgtctactctagctctggagtatgcgtgctgtacgaatgtaaggaccagacaatgaaacttgtagaatcttcaggctgcccagcactggactgccctgaatcccaccagatcactctctcgcacagctgttgtaaagtgtgtaaaggctacgacttctgttccgaacgacataattgtatggagaactccatttgcaggaatcttaatgacagagccgtgtgtagttgtcgcgacggctttagagcacttcgagaggacaatgcatattgcgaagacatagacgagtgtgccgagggcaggcactactgtcgggaaaacaccatgtgcgtaaatacgcctggaagctttatgtgtatatgtaagaccggttacattagaatcgacgattattcctgcacggagcacgatgaatgtatcaccaatcaacataactgtgacgaaaacgcactctgtttcaatacggtgggaggccacaactgcgtctgcaagcctggatacactggtaacggaacgacatgcaaagccttttgtaaagacggatgtcggaacgggggcgcctgtattgccgccaatgtgtgcgcttgtccacagggcttcactggccctagctgtgaaactgatattgatgagtgtagcgatggtttcgtacagtgtgactcaagggccaattgcatcaatttaccgggttggtatcattgtgagtgtagagacggataccacgacaacggtatgtttagcccttccggggaaagttgcgaagacattgatgagtgtggcacaggcagacacagctgtgccaacgacactatctgtttcaacctggacggaggttacgactgtagatgtccccatggcaagaattgcacgggagattgcattcatgacggaaaggtaaaacataacggtcagatttgggtgttggaaaacgacagatgttccgtgtgtagctgccagaacggcttcgtgatgtgccggagaatggtgtgtgactgcgagaatcccaccgtagacctgttttgctgccctgaatgcgatcctagactgtccagtcaatgtcttcaccaaaacggcgagaccctctataactcgggcgacacctgggttcagaactgtcaacaatgtcgctgccttcagggggaagtagactgctggcccttaccctgtcccgacgtggagtgtgagtttagtatcctccctgaaaacgaatgttgtcctagatgtgtaaccgatccgtgccaggcagataccattcgtaatgatattaccaaaacttgcttggatgagatgaacgtggtgagatttactggatccagttggataaaacacggaacagaatgtacactgtgtcaatgtaaaaatggacatatctgctgttcagtcgacccccagtgtctccaagaactgtag

SEQ ID NO: 248984 - RNA, 2451 nt, synthetic construct
  misc_feature 1..2451: note = Description of Artificial Sequence: Synthetic coding sequence
  source 1..2451: mol_type = other RNA
atggaatcccgggtactcctgcgcactttctgcctaatttttggactgggtgcagtgtggggcctgggagtagatccaagcctgcaaatcgatgtcttaaccgagttagaacttggagaaagcactaccggagttaggcaagtacctggtctccataacgggaccaaagcatttctctttcaagacactccccgatcaatcaaggccagtacagccacagctgaacaattcttccagaaactcagaaacaagcacgaatttactatcctggtaacgctgaagcagacgcacctgaactcaggtgtaatactatccattcaccacctggatcatcgatatctggaactggagagtagtggacatcgtaacgaggtgcggttgcactaccgaagcggatctcacagacctcacactgaagtatttccctatatcttggctgacgataaatggcacaagctgagcctagcaatttctgcatcccacttgattttacatattgactgcaacaaaatctacgaaagagtggttgagaagccctccaccgatttgcctctgggtacaacattctggttggggcaacgcaataatgcccatggatactttaaaggcatcatgcaagacgtacagctccttgttatgccccagggttttatagcacagtgtccggatctgaaccgcacctgtccaacttgcaacgacttccacggcctggttcagaagattatggaattacaagatattctggccaaaacgtcagctaagcttagcagagccgagcaaagaatgaatagattagaccaatgttattgcgaaagaacctgcacaatgaaggggaccacttatcgtgagttcgaatcatggattgatggttgcaagaattgcacctgtcttaatggaactatccagtgcgaaacccttatctgccccaacccagactgcccattaaaatctgcgctggcctacgtcgatggaaagtgttgtaaagaatgcaaaagcatatgccagttccagggccgcacatactttgaaggcgaacgcaatacagtgtactcctctagtggcgtttgtgtgctgtacgaatgtaaggatcagaccatgaagcttgtcgaatcttccggctgtcctgcgctggattgccccgaatctcatcagatcaccttaagccatagttgttgcaaagtttgcaagggctacgacttttgtagtgaacggcacaattgtatggaaaatagcatctgccggaacctcaacgatagagccgtgtgcagttgtagagatggtttcagagcattaagggaggacaatgcttactgtgaggacatagatgaatgtgcagaaggacgtcactactgtagagagaacaccatgtgcgtgaacactccaggatcttttatgtgtatatgtaagaccggatacattcgaatcgacgactactcatgtaccgagcacgacgaatgtatcaccaatcaacataattgcgatgagaacgctctttgcttcaatactgttggagggcataattgtgtctgcaaacccggttacactggaaacggaaccacctgcaaagcattctgtaaggatggctgccgtaacgggggtgcctgcatcgccgccaacgtctgtgcatgcccacaaggatttaccggaccttcctgcgagaccgatatcgatgagtgctccgatggatttgtgcaatgcgattctagggcaaactgcattaatctgcccggatggtaccattgtgagtgtagagatggataccacgacaatgggatgttcagccccagcggtgaaagttgtgaggatattgacgagtgcggaacaggaagacacagctgcgcaaacgatacgatttgctttaatttggatggtgggtatgactgtcggtgtcctcacggcaaaaattgcaccggcgattgcatccatgacggaaaggttaagcacaatggccagatttgggtcttggagaacgacagatgttcagtttgcagctgtcagaacggattcgtgatgtgtagacgaatggtgtgcgactgtgaaaacccgactgttgacttgttctgttgccccgagtgcgatccacgactgagttcccagtgtctgcaccagaacggggagaccttatataattctggcgatacctgggtgcagaattgtcagcaatgccgatgtcttcagggtgaagtcgactgctggccacttccttgtccagatgtggagtgcgaattttcaatactgcccgagaacgaatgttgtcctcgctgcgtgacagacccctgccaggctgacaccatccgcaacgatattaccaaaacgtgcctggatgaaatgaatgtcgtgcggttcaccgggagctcatggattaagcatggcactgaatgtacactatgtcaatgtaaaaatggccatatttgttgctcagtcgatcctcaatgcctccaagaactttag

SEQ ID NO: 248985 - RNA, 1734 nt, synthetic construct
  misc_feature 1..1734: note = Description of Artificial Sequence: Synthetic coding sequence
  source 1..1734: mol_type = other RNA
atggaaaccggactgggcgcccccctgttcaaagcatggttactcatctctgtatggggactcggagttgacccttccttgcagatcgacgtgctcactgagctggaacttggagagtccacaaccggggtaagacaagttcctggtctgcacaatggcacgaaggcctttctcttccaagataccccccgatcaatcaaagcatcaacggctaccgccgagcaattttttcagaaactgcgcaacaagcacgaatttactatactggtaaccttgaaacaaacacacctgaatagcggtgttattttatccatccaccatctggaccacagatacctcgaactggagtcctctggacatcggaacgaagtgcgcctgcattatagaagcggctctcaccgacctcacaccgaagtatttccatatatcttagctgacgacaaatggcataaactgagcctggccatctctgcatcccatttgattttgcatatcgattgtaataaaatctacgagcgagtggtcgaaaaaccctccaccgacctaccccttggcacaacgttctggcttggccagcggaacaatgctcacggatacttcaagggaattatgcaagacgttcagctgctggtgatgccgcagggatttattgctcagtgccccgacctgaatcggacgtgccccacttgtaatgactttcatggcctggtccaaaaaatcatggagctgcaggacatactggctaagacctctgccaaactgtctcgtgccgaacaacggatgaaccgccttgatcagtgctattgtgagcggacatgtaccatgaagggcactacatacagagaattcgagagctggattgatggctgtaaaaattgtacctgtttaaatggaactatccaatgtgaaaccttgatatgtcctaaccctgattgtccgctcaaatccgctctggcgtacgtcgatgggaagtgctgtaaggaatgtaagtcaatctgccagttccagggaagaacctatttcgaaggcgagaggaacactgtatactcatcctcgggcgtgtgcgtgctctatgaatgcaaagatcaaactatgaaactggttgaaagtagcgggtgcccagccctggactgtcctgagagccaccaaatcactctgtcccattcgtgttgtaaggtgtgtaaaggatatgatttctgttccgagagacataattgtatggagaactccatatgcaggaacctgaacgacagagccgtctgctcctgcagagatgggtttagggctttgagagaagataacgcttactgcgaagatatcgatgaatgcgcagagggacgccactactgtagagaaaacacaatgtgcgtaaacaccccaggcagtttcatgtgtatctgcaaaactggctatattcggatcgatgactattcttgtaccgaacatgatgaatgcatcactaatcaacacaactgcgatgagaacgcgctgtgctttaacacagtcggtggccataattgcgtttgtaaaccagggtatactgggaatggcacaacatgtaaggcattctgtaaggacggatgccgaaatggtggtgcttgtattgcggccaatgtgtgcgcatgccctcaaggattcacaggacccagttgcgaaactgacatcgacgaatgttcagacggattcgtgcagtgtgatagtcgcgcaaactgtatttgccttgtgccactctag

SEQ ID NO: 248986 - RNA, 333 nt, synthetic construct
  misc_feature 1..333: note = Description of Artificial Sequence: Synthetic coding sequence
  source 1..333: mol_type = other RNA
atggagaccggattaggcgctccgttgtttaaagcttggctactcatatcagtgtggggcttgggagtcgatccgtcgctgcaaatcgatgtgctgacagagctagagctgggcgagagtactaccggcgttcgtcaagttccaggactccataacggcacaaaagcgttcctgtttcaagatacccctcgctctatcaaagcatctactgccactgctgaacagttcttccagaagctcagaaataaacacgagtttacaatccttgtcaccctgaaacaaacacatcttaacagcggagtaatcctgtccattcaccaccttgaccattag

SEQ ID NO: 248987 - RNA, 2448 nt, synthetic construct
  misc_feature 1..2448: note = Description of Artificial Sequence: Synthetic coding sequence
  source 1..2448: mol_type = other RNA
atggaaactggtctcggtgctcccctgtttaaagcctggttgttgatctccgtatggggcctcggcgttgatccatctttacagattgacgtactcaccgagctggaactgggtgaatccacaacaggggtgcgtcaggtgcctggtcttcataatgggactaaggcttttctgttccaggataccccaaggtctatcaaagctagcacggcaactgctgaacagttctttcaaaaactgcgaaacaaacatgaatttactatcctagtcactctcaagcaaacacacctcaactctggggtcatcctgagtattcatcaccttgatcaccgctacctggaactggaatcctctggccaccggaacgaggtgcgattgcactaccggagcggatcgcacagaccacatactgaagtgtttccctacatcctggcggacgataaatggcacaagctttctctggctatcagcgcttcccacttaatcctgcacatcgattgtaacaaaatttacgagagagttgttgaaaagccttccacagacctaccactgggtacaaccttctggcttggtcaacgcaacaatgcccacggatatttcaaaggcatcatgcaagatgtccagcttctcgtcatgccgcagggcttcattgctcaatgtccagacctaaacagaacatgtcctacttgtaacgattttcatgggttggtccagaagatcatggagctgcaagacatcttagccaagacaagcgctaaactctcccgtgccgagcagaggatgaacagattggaccaatgttattgcgaacgaacttgtaccatgaaaggtaccacatatcgggaatttgagtcttggatcgatggctgtaaaaactgtacatgcttgaatgggacaatccagtgcgagaccctgatatgcccaaacccagactgccctctcaagagcgctcttgcatacgtggacggtaagtgttgcaaggaatgtaagtctatctgtcagttccagggtaggacgtacttcgaaggggagagaaataccgtttatagttcctccggagtgtgcgtcctgtatgagtgtaaagaccaaactatgaagctagtcgagtcttccggatgtccagctttggactgccctgagtcacatcaaataactctttctcattcttgttgtaaagtttgtaaaggctatgatttctgctccgagaggcacaactgcatggagaattctatttgcagaaaccttaacgatagggccgtttgctcatgtagagatggattcagggccttaagagaggataacgcctactgtgaagatattgacgaatgcgctgaaggcaggcactattgcagagagaacacaatgtgcgtgaatactcccggatcttttatgtgcatctgcaaaactggatatataagaatcgacgattactcgtgcaccgaacacgacgagtgcattaccaaccaacacaactgcgacgagaacgcgctttgttttaacaccgtcggcggccataattgtgtttgtaaaccaggctacaccgggaatggaaccacctgcaaagcattttgtaaggacggatgccggaacgggggtgcctgcatagctgctaatgtatgcgcctgtcctcaggggttcacggggcctagttgcgagacggatatcgacgaatgttcagatggatttgtccaatgtgatagccgagctaattgtattaacttgcccgggtggtaccactgcgaatgtagggacggttaccacgataacgggatgttcagcccctccggcgaatcctgcgaagatatcgacgagtgcggaaccggccggcattcatgtgccaatgatacaatctgctttaatctggacggaggctacgactgtaggtgtccacacggaaagaattgcacaggcgactgtatacatgatggaaaagtgaagcacaatggacagatttgggtactggaaaacgaccgctgttctgtgtgctcctgtcagaatgggtttgtgatgtgtagaagaatggtctgcgactgcgagaatcccacagtcgatctgttctgctgtccagagtgtgaccctagactctcttctcaatgcctgcaccaaaacggagaaacactatacaacagcggggacacttgggttcaaaattgtcaacagtgccgttgcttacagggtgaggttgactgctggcctttgccatgtcctgacgtggagtgcgagttctccatcctgccagagaatgaatgttgtcctagatgcgtgactgacccttgccaggccgacacaatccgaaacgatataaccaaaacgtgcctggacgaaatgaacgtggttcggtttacaggctcaagttggattaaacacggaacggaatgtactttatgccaatgcaaaaatggtcatatatgttgttccgtagatccacaatgccttcaagaactctag

SEQ ID NO: 248988 - RNA, 69 nt, synthetic construct; identical to SEQ ID NO: 248382
  misc_feature 1..69: note = Description of Artificial Sequence: Synthetic coding sequence
  source 1..69: mol_type = other RNA

SEQ ID NO: 248989 - RNA, 966 nt, synthetic construct
  misc_feature 1..966: note = Description of Artificial Sequence: Synthetic coding sequence
  source 1..966: mol_type = other RNA
atggaatctcgcgtactgctacggactttttgtttgattttcggtctgggcgctgtatgggggcttggcgtggatccttcattacaaatcgatgtgctaacggagctggagttgggcgaatctacaactggagttaggcaagttcctggtctgcacaatggaacgaaggcctttctcttccaagacacaccacggagcattaaagcatccaccgcaactgccgagcagttctttcaaaagctgcgaaacaagcacgaattcactattcttgtcaccctgaagcagacacacctcaattcaggggttattctctccattcaccatctggaccatagatacctggaactcgagagcagcgggcatagaaacgaagtccgcttacattatagatcagggagccaccgaccccacacagaggtattcccatacatcctggctgacgataaatggcataagttgtccctggctatatcagcaagtcatcttatccttcatatcgattgcaataagatctacgaacgcgtggtagaaaagcccagtacagatcttcccctgggaaccactttctggttaggccaaagaaacaacgcacacggatattttaaaggaatcatgcaggatgttcagctgctggtgatgccacaaggtttcatcgcccagtgtcccgaccttaatcggacttgtcctacatgtaatgattttcatggtctggttcaaaaaattatggagttgcaagatatcctcgctaaaacctccgccaaactctctagagctgagcaacgaatgaatcgactggatcaatgctactgtgaacggacgtgcaccatgaaaggaacaacttatcgggagtttgagtcgtggatcgatggctgtaagaattgtacctgcctgaacggaacaattcagtgtgaaacccttatctgccctaaccccgactgtcctctcaaatctgctctcgcctactag

SEQ ID NO: 248990 - RNA, 246 nt, synthetic construct; identical to SEQ ID NO: 248384
  misc_feature 1..246: note = Description of Artificial Sequence: Synthetic coding sequence
  source 1..246: mol_type = other RNA

SEQ ID NO: 248991 - RNA, 513 nt, synthetic construct
  misc_feature 1..513: note = Description of Artificial Sequence: Synthetic coding sequence
  source 1..513: mol_type = other RNA
atgatggcagggatgaaaattcaactggtgtgcatgctattactggctttctcatcttggagtctctgtagcgattcagaagaggaaatgaaggcgttagaggccgatttcctgaccaacatgcatacatctaagatttccaaagcccatgtccccagctggaagatgaccctccttaacgtctgctctctggtcaataatctcaattcaccagctgaagaaactggcgaggtccatgaagaggaactggtcgcaagacgaaaattgcccaccgccttggacggattcagcctcgaggctatgctcacaatttatcaactgcataagatctgtcactcacgagcattccaacattgggagctgattcaggaagacattttagacaccggcaatgacaagaacgggaaggaggaggtaattaagagaaaaattccatacatactaaagagacagttatatgaaaacaaaccaaggaggccatacattttaaagagagactcctattattattag

SEQ ID NO: 248992 - RNA, 348 nt, synthetic construct
  misc_feature 1..348: note = Description of Artificial Sequence: Synthetic coding sequence
  source 1..348: mol_type = other RNA
atgacgctgttaaatgtgtgctctctggtgaacaatctgaatagcccggctgaagaaacaggtgaagtacacgaggaggagctggtggcacggcgaaagcttccaactgctctcgatggcttttccctcgaggctatgctgactatctatcaactacataaaatatgccactcaagagcgttccagcactgggaactgattcaagaggatatcctggatactggcaacgataagaatggaaaggaagaggtgattaaacggaaaataccctacatcttaaaaagacaactgtacgagaacaagcccagacgcccctatatactgaaaagagactcatactactactag

SEQ ID NO: 248993 - RNA, 288 nt, synthetic construct; identical to SEQ ID NO: 248387
  misc_feature 1..288: note = Description of Artificial Sequence: Synthetic coding sequence
  source 1..288: mol_type = other RNA

SEQ ID NO: 248994 - RNA, 774 nt, synthetic construct
  misc_feature 1..774: note = Description of Artificial Sequence: Synthetic coding sequence
  source 1..774: mol_type = other RNA
atgtccattctcttttatgtcatctttctggcctacttacgcggcatccaagggaacaatatggaccagagatcattgccagaggactctctcaattcacttataattaagttgatccaggccgacattctgaaaaacaaactgagcaaacagatggtagatgtgaaggaaaattatcagagtacactccccaaggccgaggcacccagggagcctgaaaggggtggccctgctaaaagcgccttccaacctgtgatcgccatggacaccgaacttctgcgccaacagagacgatacaattcaccaagggtcctcctgtcagatagtacaccattagaaccgccccccctatatttgatggaagactacgtcgggtctccagttgtagctaataggacgtccagacggaagagatatgcagagcacaagagccatcggggtgagtactccgtgtgtgattctgaatccttgtgggttacagacaaaagttcagccattgacattaggggacaccaggtgaccgtgctcggagaaattaaaaccggcaacagtccagtgaagcagtatttttatgaaacacgctgtaaagaagctaggcccgttaagaatggctgtaggggaatcgatgataaacactggaactctcaatgtaagacatcacagacatacgtaagagccttaaccagcgaaaataacaaacttgtaggctggcggtggatcagaatagacacctcctgcgtgtgtgcactttccaggaagatcgggaggacttag

SEQ ID NO: 248995 - RNA, 813 nt, synthetic construct
  misc_feature 1..813: note = Description of Artificial Sequence: Synthetic coding sequence
  source 1..813: mol_type = other RNA
atggtcacttttgccactatactgcaggtcaataaagttatgagcatcctgttttatgtaatattcctagcctatctccgggggattcaaggtaacaacatggaccagcgcagcctgcccgaagatagcctgaatagcctgataattaagctaatccaggcagatatcctgaagaataagctctccaaacagatggtcgatgtcaaagagaactaccagagtaccctgccaaaggccgaagccccaagagaacccgaacgcggcggacccgcaaagtctgctttccaacctgtaattgccatggatacagagctccttaggcagcagagaagatacaactctccaagggttctactctccgactctaccccacttgagccaccgccactgtatcttatggaagattatgtgggttctcccgttgtggctaaccgaacatcaaggcgaaagagatatgcagagcacaaaagtcaccgtggagaatacagcgtgtgcgactccgaatctctctgggtgactgacaaatcttctgctatcgacattagaggccaccaggtaaccgtcttgggcgagataaagacgggtaattctccagtgaagcagtatttttatgagaccagatgcaaagaggcacgccctgtcaagaatggatgccgaggaatcgacgataaacattggaattcccaatgcaaaacgagccaaacctacgtcagagcattaacgtctgagaacaacaaactcgtcggatggcgctggattagaattgacacctcttgcgtgtgcgcgctgtcccgtaaaatcggaaggacttag

SEQ ID NO: 248996 - RNA, 2754 nt, synthetic construct
  misc_feature 1..2754: note = Description of Artificial Sequence: Synthetic coding sequence
  source 1..2754: mol_type = other RNA
atggctttcatacgaaaaaagcagcaagagcagcagttgcaactgtactctaaggaacgtttttcactactgctgttgaacctagaggaatactacttcgagcagcacagggcaaaccacatcctgcacaaaggatcacaccatgagaggaaaatccgtggatcactcaagatctgtagcaagtcagtgatttttgaacccgatagcatttctcaacctatcattaaaatcccattacgcgactgcattaagatcggtaaacacggtgagaatggcgcaaacagacacttcaccaaggcaaagtcgggggggattagcttaattttttcacaagtatatttcattaaagaacataacgtcgtggctccatacaagattgaacgagggaagatggaatatgtgttcgagttggacgtgcctgggaaggttgaagacgtggtggaaaccctacttcagctgcatcgcgcgtcttgcttagataaactcggggaccagacagctatgattacagccattttacagtctagacttgctagaacttccttcgataaaaatagattccagaacatttcagaaaaactgcacatggaatgcaaagcggaaatggtgacacctctcgtcacaaaccccggacatgtatgcataacagatacaaatctctatttccagcctcttaatgggtaccctaaaccagtagtccagatcacgctgcaggacgtacgtagaatctacaagaggaggcatggcctgatgccccttggcctggaagtgttttgtaccgaagacgacctgtgtagcgacatatacctcaaattctatgaaccacaggacagagacgacctgtacttttatatagctacttatctggagcatcacgttgcagaacataccgcagagagctacatgctccaatggcaacgagggcatctttctaattatcagtacttgttgcatctcaacaatctcgcagaccggtcctgtaacgatctctcacagtatcccgtgtttccttggatcatccatgactactcttcatccgagttagacttgagcaatcctggcaccttccgggacctttctaagccggtcggtgctctcaataaggaacgactcgaacgcttgttgacccgctaccaggaaatgccagagccaaaatttatgtacggatcacattacagtagcccagggtacgtgctgttttacctcgtgcgcatcgcacctgagtacatgctctgtcttcagaacgggaggttcgataacgcagaccgcatgttcaacagcattgccgagacttggaagaattgccttgatggcgcaaccgacttcaaagaactgatacctgaattctatggtgacgatgtatcttttctggttaactccttaaaactcgatctgggaaaacggcagggtggccagatggttgatgacgttgagctccccccatgggcttcctcgccagaagactttctgcaaaaaagtaaggatgcattggaatcaaactatgtatccgagcacctgcatgagtggattgacctaatcttcggatataagcagaagggatcagatgccgtcggcgctcacaatgtcttccatcctctcacctatgaaggcggcgtagatctgaactcaattcaggatcctgacgagaaagtggcaatgctcacccaaatattagaatttggacagacacctaagcagctctttgtgacaccacacccccgtcgtatcactccaaagtttaagtctttatctcagactagttcatataacgcaagtatggccgacagccccggagaagagtcattcgaggatctaactgaagaatctaaaacactggcatggaataatataactaaactgcagctccacgagcattataagatacacaaagaagctgtgacaggtatcacggtatccaggaatgggtcaagtgtgtttaccacctcccaggactccaccttaaaaatgttttctaaagaaagcaagatgctgcaacgctctatctctttttctaacatggcacttagttcatgcctcttgctcccaggagatgcaactgtcattacctcttcatgggataacaacgtctatttctattctatcgcctttggaagacgacaggacaccttgatgggacacgatgacgccgtctctaagatatgttggcatgataatcgcctgtacagcgccagttgggactccactgtgaaggtgtggtctggagtgcctgccgagatgccaggcacaaagcggcatcacttcgatctgctcgctgagctggaacatgatgtgtctgttgacactatttcgctcaacgctgcttcaacacttttggtttccggcaccaaggaagggacagtcaacatttgggatttgacaactgctacactgatgcatcaaattccttgccactcaggcattgtgtgcgacacagccttttcccctgactcacgccacgtgctttctaccggcactgacggctgtctaaatgtgattgacgtgcagactggtatgctgattagtagtatgacaagtgatgagccacagagatgcttcgtgtgggacggcaatagcgtcctgtctgggtctcagagcggggaactgctggtctgggatcttctcggagccaagataagtgaaagaatccaaggccataccggggcagttacctgtatttggatgaatgaacagtgttcttccattattacgggaggagaagatcggcaaattatcttttggaaattgcagtactag

SEQ ID NO: 248997 - RNA, 1188 nt, synthetic construct
  misc_feature 1..1188: note = Description of Artificial Sequence: Synthetic coding sequence
  source 1..1188: mol_type = other RNA
atggtgtcagccgcaggcctgtcaggtgatgggaagatgcgaggcgtcctgttagtcttacttggattgctgtattcgtccacaagctgtggcgtgcaaaaggcaagtgttttctatggtcccgatcctaaggaaggtctcgtttctagcatggagttcccctgggttgtgtcattacaggatagtcagtatacacatctggcgttcggatgcattctgtctgagttctgggtactgagcatcgcatcagccatacagaaccgcaaagacattgtagtcattgtggggattagtaacatggatccatcgaaaatcgcacataccgaatatcctgtgaacaccatcataatccacgaagacttcgataataatagcatgtccaacaatattgcacttctcaaaaccgataccgccatgcacttcggcaacctcgttcagtctatctgttttctgggacgcatgctccacacaccacctgtcctccagaactgctgggtcagcggctggaatccaacatctgcaaccggaaaccacatgactatgtccgtgctcagaaaaattttcgtgaaagatctcgacatgtgtccactatacaaactccaaaaaacagaatgcggctctcacaccaaagaagaaacaaaaaccgcttgtctgggcgacccggggagcccaatgatgtgccagctgcaacaatttgacctgtgggttttgagaggagtgctcaactttggaggcgagacctgcccaggcctgtttttatatacaaaagtggaagactatagtaagtggataacttctaaagccgagcgcgccggacctccactgtcctcactgcaccactgggaaaagctaatatctttttctcaccatggccccaacgcaactatgacacagaaaacttactcggacagcgaattgggacacgtgggctcttacctgcaggggcagagacgcacaatcacacatagccggcttggaaatagcagtagggacagtcttgacgtcagggagaaggacgtgaaagagtctggaaggagtcccgaagcctccgttcaacctctctattacgattactacggcggtgaggtgggagaaggacgcatcttcgcagggcagaacagattatatcaaccggaggaaatcatcctcgtgagcttcgtgcttgtgtttttttgttcttctatttag

SEQ ID NO: 248998 - RNA, 2085 nt, synthetic construct
  misc_feature 1..2085: note = Description of Artificial Sequence: Synthetic coding sequence
  source 1..2085: mol_type = other RNA
atgaaacatctgaagcggtggtggtcagccggtgggggactgttacacctgacccttctcttgagcctggctgggctgcgagttgacttggatttgtatctactgctccctccccccacactattacaggatgagctgctttttctcggtggacccgctagctccgcatacgccctgtcacccttttccgcctctggcggctggggccgagcaggacacctccaccccaagggcagagaactggaccccgcggccccacccgaaggtcagttattaagagaagtcagagccctgggagtcccatttgtccctagaacatcggtggatgcgtggttggtacacagcgtggctgccggatctgctgacgaggcgcatggtctgctcggagctgcagccgccagctcaacaggaggcgccggggctagcgtcgacggcgggtctcaagcagtccagggaggcggcggagacccaagagccgcaaggtctggaccactcgacgcaggtgaagaagagaaagcacctgccgagccaaccgcccaggttccggacgccggaggatgtgcatcggaagagaacggagtactgcgcgagaaacacgaggccgtggatcatagttctcaacacgaagagaatgaagaaagggtaagtgctcagaaggaaaatagtttacagcagaacgatgacgacgagaataaaatcgcagagaagcctgactgggaagccgagaagacaactgaaagccgcaacgagcgccatctcaacggcaccgatacctcttttagccttgaagatctctttcagctccttagcagccaacccgagaactcactggaaggtataagcctcggagatatccccctgcccggctccatctcagatggtatgaacagtagtgcccactaccacgtgaacttctcccaagccatttcacaagacgtcaacctacacgaagctatcttgctgtgcccgaataacactttcagacgggacccaacagccagaacgtcccagtcacaagaacccttcctgcagcttaactctcatacgaccaacccagagcagaccctgccaggcactaacctaaccggattcctgagtcctgtcgataatcacatgagaaacctgacctcacaagatctgctttacgatctggatattaacatcttcgatgagattaatctgatgtccttggccacagaagacaatttcgatcccattgatgtctcccaactgtttgacgagcctgactctgactccggattaagcctggacagctcacacaacaacacatccgtaatcaagtctaattccagccactctgtgtgcgatgagggcgctatcggatattgcaccgaccatgaatcatccagccaccacgatttagagggggcagttggggggtactacccagagcctagcaaactttgtcacctagatcagagcgactccgatttccacggcgatctgacattccaacatgtttttcacaatcatacttatcatctccagccaactgcacctgaaagcacttctgaacccttcccctggcccggcaaatcacagaagatcagaagtaggtatctggaagacacagatcgcaatcttagcagagatgaacagcgagctaaagccctacacattccgttttctgtagacgaaatcgtgggaatgcccgtcgactccttcaactccatgttgtctcggtactacctgaccgacctgcaagtgagcttgatccgcgacatcagacgacgcggaaaaaataaagtagctgctcaaaattgcagaaagagaaagctggacatcattctgaatttggaggacgacgtgtgcaatcttcaggccaagaaagagactctcaaacgtgagcaagcccagtgtaataaagccatcaatataatgaaacaaaagcttcacgacctctatcacgatattttttcacgcttaagggacgaccagggacgacccgtgaaccccaaccactacgcattgcagtgcacccatgacggatccattcttatagttccaaaggaacttgtagcctccggacataagaaggagactcagaaagggaaacggaagtag

SEQ ID NO: 248999 - RNA, 1404 nt, synthetic construct
  misc_feature 1..1404: note = Description of Artificial Sequence: Synthetic coding sequence
  source 1..1404: mol_type = other RNA
atgcctggacgctggaggtggcagcgggacatgcaccctgcccgtaagttactgtctctcctgtttctaatcttaatgggcaccgaactcacccaggtattacccaccaaccctgaggagtcttggcaagtctatagtagcgctcaagattcggaagggcgatgcatttgtaccgtcgttgcacctcagcaaaccatgtgctctcgggatgctagaacgaaacagctgcggcagctcctcgaaaaagtacagaacatgtcacaatccatcgaggttctggataggcgcacacagagggacttacagtacgtcgagaagatggagaatcagatgaagggcctggaaagtaagtttaaacaagtcgaggaatctcataagcaacaccttgcacgccagtttaaggctataaaagctaagatggacgagctgagaccactgatccctgtgttggaggagtacaaagctgacgccaagctcgtgctgcagtttaaagaggaagtgcagaacctgaccagcgtccttaacgagttgcaggaagaaatcggcgcttacgactacgatgagcttcagtcgagggtgtccaatctagaagagagacttcgcgcctgcatgcagaagctggcctgtgggaagttgaccggaatatctgacccagttaccgtaaagacatcagggtctcggttcggaagttggatgactgaccccctagcacccgagggcgacaaccgcgtatggtatatggatggatatcacaacaatcggtttgtgcgagaatataagagcatggtcgactttatgaacacagataactttacaagtcacagactgcctcatccatggagcgggaccggtcaggtggtttacaacggctccatttattttaacaagttccaatcccatataatcatccgcttcgatctaaaaaccgaaaccatcctgaaaactcgatccctggactacgcaggctataataatatgtaccattatgcctggggaggacacagtgacatagatctcatggttgatgaatctggactctgggccgtgtacgcaaccaatcagaatgccgggaacatagtcgtctctcgactggatcccgtgtccttacaaacccttcaaacgtggaacacatcctacccaaaacgatcagcaggtgaagccttcattatatgtgggacactctacgtgacaaacggctacagtgggggaactaaagttcactacgcataccagacaaacgccagtacatacgaatacattgacatcccattccagaataagtactcccacattagcatgcttgactataacccaaaggaccgcgcactgtacgcttggaacaacggccatcagatcctgtataatgtcactctgttccacgtcattagatccgacgaactctag

SEQ ID NO: 249000 - RNA, 408 nt, synthetic construct
  misc_feature 1..408: note = Description of Artificial Sequence: Synthetic coding sequence
  source 1..408: mol_type = other RNA
atgccaggcagatggaggtggcagagagatatgcatcctgctaggaagttacttagcctattgtttctgatcctgatgggaactgaacttacccaggtactgcccaccaatcccgaagaatcatggcaggtctacagcagcgctcaagatagcgaaggcaggtgtatctgtacagtcgtagcacctcaacaaaccatgtgttctcgagacgccaggacaaagcaattgcgacagctgttagagaaggtacagaacatgagccagtcaatcgaagtactcgaccggcgaacccagcgggatctacagtatgtggagaagatggagaaccagatgaaggggttagagagtaaattcaagcaggtcgaagagagtcacaagcaacacctggcgagacagtttaaagggtag

SEQ ID NO: 249001 - RNA, 1458 nt, synthetic construct
  misc_feature 1..1458: note = Description of Artificial Sequence: Synthetic coding sequence
  source 1..1458: mol_type = other RNA
atgtccgtgcctttgctgaagatcggcgtggtcctaagcaccatggccatgataacaaactggatgtcacagacactgccctcgctggtgggactgaacaccactaaactgagcgcggcgggaggaggaaccttggatcgaagcacaggggttttgcccactaaccccgaagaaagctggcaggtctattccagcgcacaagattctgaaggaagatgtatatgcacagtggtcgcgcctcagcaaactatgtgttcacgggatgctaggacaaagcaactgcgacagcttctcgaaaaggtacagaacatgtctcagagtatagaagttctggatcgtaggacgcaaagggacctccaatacgtcgagaagatggagaaccagatgaaaggactggaatctaagttcaagcaggtggaagaatctcacaagcagcacctagctagacagtttaaagctattaaagctaagatggacgagttgcggccgttgattccagtgctcgaagagtataaagctgatgccaaactcgtactccaatttaaagaagaagttcagaacctcacctccgttcttaatgaacttcaggaagaaatcggcgcttatgattatgacgagctgcaatcccgggtgtccaacctcgaagaacgactgagggcttgcatgcaaaagctcgcctgcggaaaattgactggtataagcgaccccgttaccgtgaagacctcaggatcccgattcggtagttggatgaccgaccccttagcaccggagggcgacaacagagtttggtacatggacggctaccacaacaacagattcgtgcgagagtacaaaagcatggttgactttatgaacaccgataatttcactagccataggttaccccacccttggagtggtacgggccaagtggtgtacaatggctcaatctacttcaacaaatttcagtctcacataatcatccgcttcgacctgaagacagaaaccatcttgaagacccgcagccttgactatgccggctacaacaatatgtatcactatgcatggggaggacactccgacatcgatctgatggtggacgaatctgggctctgggcagtttacgcaaccaaccaaaacgctggtaacatagtggtctcaaggctagacccagtctccctgcagacactgcagacatggaatacatcatatcctaagagaagcgccggagaagcattcatcatttgtggaactctgtatgttactaacggttactcaggtgggactaaggtacactatgcatatcagactaatgcctcaacatatgagtatattgacattccctttcagaataaatactcacatatttcaatgctcgattataaccccaaagacagggcactgtatgcctggaataatggccaccaaattttatacaatgttacactctttcatgttattaggtctgacgaactgtag

SEQ ID NO: 249002 - RNA, 1377 nt, synthetic construct
  misc_feature 1..1377: note = Description of Artificial Sequence: Synthetic coding sequence
  source 1..1377: mol_type = other RNA
atgggggaggcacccggacgggaaggtagaggaccatgcccccaactggagagcccacgcagaaggcgcgtgctgcccacaaaccctgaggaaagttggcaagtatattccagtgcacaggattcggagggccggtgcatttgtactgtagtagccccacaacagaccatgtgttccagagatgcccggactaaacaacttaggcagttattagagaaagtgcagaatatgtctcagtcaatagaggtactggatagaagaacccaacgcgacctacaatacgttgaaaagatggagaaccagatgaaaggtctggagtccaagtttaagcaggtagaggaatcccataaacagcatttagccagacagttcaaggccatcaaagcaaaaatggacgaattgagaccccttatcccagtgctggaagagtacaaagccgatgcaaaactcgtgctgcagtttaaggaagaagtccaaaatctaacttcagtcctaaacgaactccaggaagaaattggtgcttacgattatgatgagttgcagtcacgcgtcagtaatctggaagaacgcctgcgcgcttgtatgcagaaactcgcttgcggaaagctaacaggcatctccgatccagtcacagttaaaaccagtggatcgcgttttggcagctggatgacagacccactggctcctgaaggcgataatagagtgtggtatatggacggctaccataataatcgcttcgtacgggaatacaaatccatggtcgatttcatgaatacagacaattttacatcgcaccgcctgccacacccttggagcggtacggggcaagtcgtatataatggttccatctacttcaataagtttcagtcccatataataattcgattcgacctgaagacggaaactatcctgaaaacccggagccttgattacgccggctacaacaatatgtaccactacgcctggggcgggcacagcgatatcgatctcatggtggacgagtctggcctatgggcagtatacgccactaaccaaaacgccggaaatatagttgtgagcagactcgaccctgtatcactgcagacattgcagacctggaacacgagttaccctaaaaggtccgccggcgaggccttcataatttgcggcactctatatgtcactaatggttactccggtggcacaaaagtacactacgcttaccaaacaaatgctagtacctacgaatatatcgatataccatttcagaacaagtacagtcacataagtatgctggactacaaccccaaggatcgagccctctatgcatggaacaacggccatcagattctctacaacgtaactctttttcatgtcatccgctccgatgagttatag

SEQ ID NO: 249003 - RNA, 462 nt, synthetic construct
  misc_feature 1..462: note = Description of Artificial Sequence: Synthetic coding sequence
  source 1..462: mol_type = other RNA
atgtccgtccccctattaaagatcggagtcgttctgtcgacaatggctatgattactaactggatgagtcagacgctaccgtcactagtgggcctgaatactaccaagctttccgccgcaggcgggggtacactggatagatcaacaggcgtcctccccaccaaccccgaagagtcttggcaagtctactcctcagcacaagatagcgaaggccgctgtatatgcacagtggtggcaccccagcagacaatgtgctcaagagacgcgaggactaagcagctaagacaactgcttgagaaggtgcagaatatgagccaaagtattgaggtgttagacagaagaacccagcgtgacctacagtacgttgagaagatggagaatcagatgaagggcctggaatccaagttcaagcaagttgaagagtctcataagcagcatttagcaagacagttcaagggatag

SEQ ID NO: 249004 - RNA, 696 nt, synthetic construct
  misc_feature 1..696: note = Description of Artificial Sequence: Synthetic coding sequence
  source 1..696: mol_type = other RNA
atggcatctatggctgctattggatcctgctcaaaagagtatcgtgtactgctcggtcagctccagaaacagacggatctgatgcaagacacatccagactgcttgatccgtacattagaatccagggcttagacgtcccaaaactgcgggagcactgtagggagagacccggggcattcccctctgaggagaccttacgaggcttgggacggaggggctttttacagactttgaatgcgacgctcggctgtgtcctccacagactggcggacttggagcagagattacctaaggcgcaggatctcgagcgcagtggtcttaatatagaggatctggaaaaactgcaaatggcaaggccaaatatactcggtctgcggaacaatatctattgtatggcccaactgctggataactccgatacagcagaaccaactaaagcaggcagaggcgcaagccaaccccccacaccaacaccagcaagcgacgcttttcaacgtaagctcgaaggttgtcgcttcctacacgggtatcaccgattcatgcacagcgttggaagggtattctccaaatggggcgaatctcctaacagaagccgtcggcatagcccccaccaagcactcagaaaaggcgtccgcagaacccgccccagtagaaaaggaaagaggctgatgacacggggtcagttgcctcgctag

SEQ ID NO: 249005 - RNA, 849 nt, synthetic construct
  misc_feature 1..849: note = Description of Artificial Sequence: Synthetic coding sequence
  source 1..849: mol_type = other RNA
atggccctcgttctcatcctgcagcttttgaccctttggcccttatgccacacggacatcacccccagtgtacccccagcttcatatcacccaaaaccctggcttggcgctcagcccgcaacagtggtcacacctggtgtgaacgtgacattgaggtgtcgcgcacctcagcctgcctggcggtttggcttgtttaaacccggagaaatcgcccccctactcttccgggacgtctcttctgagcttgccgaattttttctggaagaggtgacccccgcacagggcggaatataccggtgttgctatcgacgaccagactggggtcctggagtttggtcgcagccgagcgacgtcctggaactgctcgtcaccgaggaactgccaaggccaagcctcgttgctctgcccggcccagttgtgggccctggagcaaacgtatctctgcgctgcgctggacgcctgcggaacatgagttttgtactatatagagaaggggttgctgcaccattacagtaccggcatagcgcccagccctgggcagacttcacattactgggcgctcgggctcccggaacttattcgtgttattatcacacaccttctgctccatacgttctaagccagcgctccgaggtactcgtgatttcctgggaaggtgaaggccctgaagcaaggcccgcctctagtgctccgggaatgcaggctcctggcccgcctccttctgatccaggggcccaggccccatctttatctagcttcagaccccgcggactggtactacagccactcttgccccagacacaagactcatgggaccccgccccccctccatccgatcctggcgtctag

SEQ ID NO: 249006 - RNA, 759 nt, synthetic construct
  misc_feature 1..759: note = Description of Artificial Sequence: Synthetic coding sequence
  source 1..759: mol_type = other RNA
atggcgctggtcctcattctccaactgctgaccctcttcccacctgccagttatcatccaaagccttggctcggtgcccagcccgcaacagttgtgaccccaggagttaacgttacgcttaggtgcagagccccacagccggcatggaggttcggtctctttaagccgggtgaaattgccccactactctttagggacgtttcaagcgagctcgcagaattcttcctcgaagaggtgacacctgcacaaggaggtatttatagatgttgttaccggcgccctgactggggacccggggtgtggagccagcccagtgatgtgctcgaactgctcgtgaccgaagaactgcccagaccttctttggttgctctccccggaccagtagttggaccaggcgctaatgtaagtctccgttgcgccggacggctcagaaatatgtcattcgtattatatagagaaggagttgccgcaccattgcagtacagacacagcgctcagccttgggccgattttacgcttcttggcgcgagggcaccaggcacgtacagctgctactatcacacccctagtgcaccttacgtactctcacagcgttcagaagtcctggtgatctcatgggaagactctggaagttcagattataccaggggaaatctcgtcagactgggcctagctggactcgtgctcattagtctcggtgccctcgtcactttcgattggcgtagccagaatcgcgccccagcaggcataaggccttag

SEQ ID NO: 249007 - RNA, 804 nt, synthetic construct
  misc_feature 1..804: note = Description of Artificial Sequence: Synthetic coding sequence
  source 1..804: mol_type = other RNA
atggcattggtgctaatactccagttgttgactctgtggccgttgtgccacactgatattactcctagcgtggccataatcgtcccacctgcctcgtatcatccaaaaccatggcttggcgcccagccagctactgtagtcaccccaggcgttaacgtgacgttacgctgtagagctccacaaccagcatggagattcgggctctttaaacccggagagattgcgcccttgttatttagagacgtgtcctcagagctagctgagtttttcctggaggaagtgactcctgcgcaggggggtatctacaggtgttgttacagacgaccagattggggaccaggggtttggtcgcaaccgagcgacgtgctggaattgcttgtcactgaagagcttcccaggccatctttggtagctttaccaggacctgttgtgggtcccggggctaacgtgtcactcagatgtgccggacgcctccggaatatgtcttttgtactgtatcgggaaggtgtggcagctcctctccagtataggcacagcgcacaaccctgggcggacttcaccttactcggcgcccgtgcaccaggcacctactcttgttactaccacaccccgtccgctccttacgtgctcagtcaaagatctgaagtgcttgtgatttcttgggaggactctggatcctctgattataccaggggcaatctcgtgcgcttaggtttagccggtttggtactcatctcccttggggccctagtgacatttgactggagatcccagaatcgcgcgcctgccggcattcgcccttag

SEQ ID NO: 249008 - RNA, 792 nt, synthetic construct
  misc_feature 1..792: note = Description of Artificial Sequence: Synthetic coding sequence
  source 1..792: mol_type = other RNA
atggccctcgtgctcatcctccaacttcttacattgtggcccctgtgtcataccgatattaccccttctgttccaccagcttcctaccaccctaaaccttggcttggcgcacagccggctactgtcgtgacccctggggtgaacgtgacattgcgctgtagagctccccaaccagcttggagatttggtctgtttaagccaggagaaattgcccccctgttgtttcgggacgtgtcgagcgaattggcagagttctttttggaagaagtgacaccggcccagggagggatttataggtgctgttaccgacgacctgattggggtcctggagtctggtcccagccttccgacgtgctcgagctgctggtcacagaagaactgccccgtccctcactcgtggctcttcctgggccagtcgttggacctggagcaaatgtatctctccgctgcgcagggagactacgcaatatgagcttcgtcctgtatagagagggcgtcgccgctcccctgcaatacaggcattcagcccagccttgggccgattttacactcctcggcgctcgcgcccctgggacttactcttgctactaccatacccccagcgccccttacgtgctctcccaaagatcagaagtgcttgtaatttcctgggaagatagtggcagcagtgattacacacgcggaaacttggtgcggctgggcctcgctggtcttgtgctaattagcctcggagcactagtgaccttcgactggagaagccaaaacagggccccagccggaatcagaccctag

SEQ ID NO: 249009 - RNA, 1716 nt, synthetic construct
  misc_feature 1..1716: note = Description of Artificial Sequence: Synthetic coding sequence
  source 1..1716: mol_type = other RNA
atgaccatccttcccaaaaaaaaaccacctccacccgatgccgacccagccaatgagccccccccacctgggcccatgccaccagcccccagacgcggaggcggcgtaggagtcggagggggcggcacaggagttgggggaggcgaccgcgatcgggatagtggtgttgtcggagcgcgaccccgagcctctcctccccctcaaggccctcttccaggtcctccaggggccctgcataggtgggccctcgccgtaccccctggcgcagtcgccggccccaggccacagcaagcgtcccccccaccatgcggaggaccggggggcccaggcggcggtccaggagacgctttaggagcggctgcagccggcgtgggggctgctggggtggtcgtgggcgttgggggagccgtaggagtcggcggatgctgttcaggtcccggtcacagcaaaagaagacgccaggcgcctggagtcggagccgtggggggtggctccccagagcgtgaggaggtcggtgctggatacaactcggaagacgagtatgaggctgccgccgccaggatcgaggctatggaccctgctacagtcgaacaacaagaacattggttcgaaaaggcactcagggataagaagggattcataataaaacagatgaaggaggatggagcgtgcctatttagagccgtagctgaccaagtgtacggtgatcaggatatgcatgaagtcgtacgtaagcactgtatggactatctgatgaagaatgcagactacttctctaactatgtaaccgaagattttaccacctacattaatcgaaagagaaagaataactgtcacgggaaccatattgaaatgcaggccatggcagagatgtacaatcggccggtggaggtttatcagtacagtactggcactagcgccgtagagccaattaacacctttcacggaatccaccagaacgaagacgagccgattcgtgtgagctaccacagaaacatccattataatagtgtagtcaatcctaacaaagctactattggagtcgggctgggcttgccttcttttaaacctggattcgccgagcagtctctgatgaaaaatgcgattaagactagtgaggaatcttggatcgagcagcagatgctggaagataaaaagagagccaccgattgggaagcaacgaatgaagcgattgaagaacaggtcgcacgcgagtcctatctgcagtggttgcgagaccaggagaagcaggcaagacaggtgcgcgggccaagtcagccgagaaaggcctctgcgacatgctcctcagctacggccgcagcatcctcaggtctcgaagagtggactagccgatcacctagacagcgttccagcgcctctagccccgagcatccagaacttcacgctgagttgggaatgaagcccccatcacccggaaccgtccttgccctcgcaaaacctccatctccctgtgcccctggcacctccagtcagttttcggccggcgctgacagagccacaagtccattggtgtctctctaccctgccttagagtgcagagccctaatccagcagatgtcacccagcgccttcggcctgaacgactgggacgatgacgaaattcttgcaagcgtgctagcagtgagtcagcaagaatacctggactcgatgaagaaaaataaggtgcaccgtgaccccccgcccgataaatcttag

SEQ ID NO: 249010 - RNA, 2529 nt, synthetic construct
  misc_feature 1..2529: note = Description of Artificial Sequence: Synthetic coding sequence
  source 1..2529: mol_type = other RNA
atggattttcaggagagagatccacccttcctacccgaaagcgctcagagcagtaagccatcaagtgcccaacaggcaagtgaactctgggaagtggtggaagaaccaagagtgcgactaggcacagagggagtgatgcccgagagacaggaaggacacctgttgaaaaagaggaaatggcccctcaaaggatggcataagaggtattttgtgctggaagacgggatcctgcattacgcaacgactaggcaggatatcacaaaaggcaagctccacggctctatcgacgttaggctaagtgtaatgtcaatcaacaaaaaggcacagcgaattgatctggatacagaggacaatatatatcacttaaagattaaaagccaagaccttttccaatcctgggtggcccagctcagagcccacagactggcacatagactggacatgccccggggatctctaccatccaccgcccatagaaaagtccccggcgctcagctccccaccgccgcaacagcttctgccctccctggcctcgggccgagagagaaagtatcttcatggctgcgggatagcgatgggcttgacaggtgctctcacgaactcagcgagtgtcaaggcaaattacaggagctccaccgcctgttgcagagtttagaatctctccaccgcattcccagcgccccagtgataccaacccaccaggcctctgtgactactgagcggcccaagaaagggaagaggacctctcgaatgtggtgtacacagagcttcgcaaaagatgatacaattggaagagtaggcagactgcacgggagcgttcctaacctgtctcgctacttggaatctagggacagttccggaacgaggggtttacctccaaccgattacgcccatctccagcgcagcttctgggccctggcccaaaaagtgcacagttcattgtcttccgttcttgctgctctgacaatggagagagaccagctacgcgacatgcatcagggcagtgaattatcaaggatgggtgtttcagaggcctctacaggccagcgacgcctacactcactctctacatctagtgacacgaccgccgactctttctcctcacttaatcctgaagagcaggaggctctgtatatgaaaggaagagaacttactcctcaattgagccagaccagtatactatcattagcagacagccatacggaattctttgacgcatgtgaagttctcctcagtgcaagtagtagcgaaaacgagggctcggaggaggaggaaagctgtacaagtgagataacaacttcccttagcgaagagatgcttgacctgagaggagccgagagatgccaaaagggagggtgtgtcccaggccggccaatgggcccccccagacgtagatgcctcccagcggctagcgggcctggtgccgatgtgtccctctggaatattcttcgcaacaatatcggtaaagaccttagcaaagtgtccatgccagttcagcttaacgaacccttgaacaccttacaaaggctgtgcgaggaattagaatattcgtccttacttgatcaggcaagtcgtatcgccgacccatgtgaacggatggtttatatcgccgccttcgccgtcagtgcatactcttccacctaccaccgcgccggatgcaagcccttcaatccagtgttgggcgaaacttacgagtgcgagcgaccagaccgtggttttagattcatctcagagcaggtgtcacaccatccacccatctctgcctgccatgcagagtcagaaaatttcgccttttggcaggatatgaagtggaaaaataagttctgggggaagtcacttgaaattgtgccagtgggaaccgtcaacgtcagtctgcctcgctttggagaccatttcgagtggaacaaggtgacaagttgcatccacaatgtgctgagtggccagagatggatagagcactatggcgaggtattaatcaggaatacacaagatagcagttgtcattgtaagattaccttttgcaaagccaaatattggtctagcaacgtccacgaagttcagggagccgttctgagtagaagcggccgggttctgcatagattgtttggaaaatggcatgaaggattgtatcggggcccaactcctggaggccagtgcatttggaagcctaactccatgccccctgatcacgagcgcaatttcggatttacgcagttcgccctggaattgaacgagctgacagcggaattaaaaagaagcctcccttctactgacactcgcctgagacctgaccagcggtacctagaggaaggtaacattcaagcagccgaagcacaaaagcgcagaatcgagcagctgcagagagatcgccggaaggtgatggaagaaaataatatcgttcatcaagcgagattcttcaggaggcagacagattctagtggtaaagaatggtgggttacgaacaatacgtattggcgcctcagagcggagcccggatacgggaatatggacggagctgtgctgtggtag

SEQ ID NO: 249011 - RNA, 816 nt, synthetic construct
  misc_feature 1..816: note = Description of Artificial Sequence: Synthetic coding sequence
  source 1..816: mol_type = other RNA
atggcctcaccgggctgcctatggttactcgccgtggcactgcttccttggacttgtgcatcacgggctttgcaacatctagatccacccgcccctctgcctcttgtgatatggcatggaatgggcagcagatatgtggcccaaactggtcttgaacttctggccagctctaacccccctgcatcttcttatcagagcgccggcatgatcggggactcttgctgtaatccacttagtatgggtgcaatcaaaaaaatggtcgagaaaaagatccctgggatctacgtactgtctctcgagataggaaaaaccttgatggaggatgttgaaaatagctttttcctcaatgtgaacagccaggttacaaccgtatgtcaggccttagcaaaagatccgaaactccagcaggggtacaacgcaatgggattcagccagggggggcagtttttgcgtgctgttgcccaacgatgcccttctccccctatgattaatctaatctccgtcggcggtcaacatcaaggcgtcttcggcctccccagatgcccaggcgaaagttcccatatatgcgatttcatccgtaagacacttaacgcaggagcatatagtaaggtggtacaggaacgtttagtacaggctgagtattggcatgaccccattaaggaagacgtctacaggaaccatagcattttcttagccgatattaatcaggagaggggcattaacgagtcatataaaaaaaacctcatggccttaaaaaaattcgtaatggttaaattccttaacgatagtattgttgatccagtagatagtgaatag

SEQ ID NO: 249012 - RNA, 921 nt, synthetic construct
  misc_feature 1..921: note = Description of Artificial Sequence: Synthetic coding sequence
  source 1..921: mol_type = other RNA
atggccagcccggggtgtttgtggcttctggcggttgcccttctgccttggacctgtgcatcaagagctcttcagcacctggacccccctgcccccctacctcttgtcatatggcatggaatgggagattcatgctgtaatcccctgtccatgggcgccatcaagaaaatggtcgagaaaaagatccccggaatttacgtcctatccctggagattggaaagacccttatggaggatgttgaaaattccttcttcctgaacgtgaatagccaggtgactaccgtgtgtcaggctttagcgaaggatcctaaactgcagcagggctataatgcgatgggttttagccagggaggccaatttctgagagcagtggcccagcgttgtccgagcccccccatgatcaaccttattagtgtgggtggtcagcaccaaggtgtatttggcctgcctagatgcccaggcgaatcctctcatatctgtgattttattcggaaaactttaaacgccggagcctacagcaaagttgtgcaagaacgccttgtgcaggccgaatattggcatgatccaattaaggaggacgtgtacagaaaccattctatattccttgcagacatcaaccaggagagaggcatcaatgaaagctacaagaaaaacctaatggctctgaaaaaattcgtgatggtaaaatttcttaacgatagcatagtggaccctgtggatagcgagtggtttggattctacagatcaggccaggctaaagaaacgattcctttacaagagaccagtctctatacccaagaccgcctgggactgaaagaaatggacaacgccggccagcttgtgtttctggccactgaaggggatcatctacagctgagtgaagaatggttttatgcccatatcatcccatttctaggttag

SEQ ID NO: 249013 - RNA, 612 nt, synthetic construct
  misc_feature 1..612: note = Description of Artificial Sequence: Synthetic coding sequence
  source 1..612: mol_type = other RNA
atggcatctcctggctgtctttggctccttgccgtcgccctgcttccctggacctgcgcatcgcgggcgctccagcacctagatccacccgcacccctacccctggttatctggcatggtatgggcgtctttgggctgcctcgttgccctggcgagagctcccacatttgcgattttatccggaaaaccctgaacgccggggcttattctaaagttgttcaagagaggctcgtacaggccgagtattggcacgatccgatcaaagaagacgtgtaccgaaaccactccatcttcctcgccgacattaaccaggagcgaggtatcaatgaatcttataaaaagaatctgatggctctcaaaaagtttgtcatggttaaattcctaaacgattctatcgtagatcccgtggatagcgaatggtttggcttttacaggagcggacaagcaaaggagacaattccactgcaagaaactagtttgtacacccaggatcgcctcggactgaaggaaatggacaatgccggccagctcgtgtttctggcaaccgaaggagaccatctgcagttgagcgaagagtggttttatgcccacattatccctttcctgggatag

SEQ ID NO: 249014 - RNA, 921 nt, synthetic construct
  misc_feature 1..921: note = Description of Artificial Sequence: Synthetic coding sequence
  source 1..921: mol_type = other RNA
atggcctcccccgggtgcctctggctgcttgctgttgcgttgctcccgtggacgtgcgcctctcgcgctctgcagcacctagaccctcctgcaccgctacctctcgtgatctggcatggaatgggggactcctgttgtaatcctctgagcatgggcgctattaaaaagatggttgaaaaaaagatacctggcatctacgtgctgtcactagagattggaaagacactgatggaggacgtggaaaattccttcttcctgaatgtaaattcccaagtgaccactgtatgtcaagctctcgcaaaagaccccaaactccagcagggatacaacgcgatgggtttcagtcaaggtgggcagttccttagggccgtggcacagagatgtccttctccacctatgatcaatctgatttctgtaggcggccagcatcagggggtgttcggactcccgagatgtccaggagagtcctctcacatttgtgattttataaggaaaactcttaacgccggtgcatattccaaagtcgtacaggagcgcctcgtgcaggcagaatactggcacgacccaatcaaagaggatgtctatcggaatcactcaatatttctggctgatataaaccaggagaggggaatcaatgaatcctacaagaaaaatctcatggctctgaaaaaatttgtgatggttaagtttctaaacgattctatcgtcgatcccgtggacagtgaatggtttggtttttacaggtccggacaagccaaggaaacaattccgcttcaggagacgtctctatacacgcaggaccgcttgggactaaaggagatggataatgccggccaattagtctttctggccaccgaaggagatcatctacaattatccgaagagtggttttatgctcacatcatcccttttctcggctag

SEQ ID NO: 249015 - RNA, 2310 nt, synthetic construct
  misc_feature 1..2310: note = Description of Artificial Sequence: Synthetic coding sequence
  source 1..2310: mol_type = other RNA
atgggctgtaatatgtgtgtcgtccagaagcctgaggaacaatacaaggtaatgctgcaagtcaatggaaaagaactgtctaaattgtcccaggaacagacacttcaggccttaagatcttcaaaggaacccctcgtgatccaggtcctgcgcaggtctcctaggcttaggggtgatagttcatgccacgatctgcaactggtggatagcggcactcagaccgatatcacatttgagcacataatggcactaggcaagctgcgcccccccacccctccaatggttatcctggaacccccccctataagccacgagtattacgaccctgctgaattcatggaagggggaccacaagaggccgaccgactggacgagctcgagtacgaagaagtcgaactgtataagagctcccatcgcgacaaactggggctcatggtttgctaccgaacagatgacgaggaggatctggggatttacgtgggtgaggttaatccaaactcaattgctgctaaagacgggaggataagagaaggtgaccggatcatacagattaatggagtagacgtacaaaacagagaagaggctgttgcaatattgtcacaagaggaaaacactaacatctccctgttggtcgcccgccccgaatcccagctggcaaagaggtggaaggactctgatagagacgattttcttgacgattttggcagcgagaacgaaggggaattacgggccagaaaactgaaatccccaccagcccagcaacccggcaatgaagaggagaagggcgcccccgacgcgggacctggtctgtcaaactcccaagaactcgacagcggtgtgggaagaactgatgaaagcacacgtaacgaagaatcgagtgaacacgacttgctcggtgatgagccccctagttccacaaataccccagggtcactccggaaattcggcctccaaggagacgcactgcagagtagggactttcatttcagtatggattcactcctggcagagggagcagggctcggggggggggatgtcccaggccttaccgatgaggaatatgagcggtatcgggagttgctggagattaaatgtcacctggaaaacggtaaccagctagggcttctttttccacgcgcctccgggggaaacagcgcgcttgacgtaaatagaaatgaatctctgggccacgaaatggccatgctcgaagaggagctgagacacctggagtttaaatgcagaaatatactgagagcacagaagatgcaacaactgagagaacgctgcatgaaggcttggttactggaggaggagagcctctacgatcttgccgcatccgaaccaaaaaagcacgagttaagcgatatcagtgaactgcccgaaaaatccgataaagattcgactagcgcgtataacacgggagaatcttgccgctctacccctctccttgtagagcctctgcccgagtcgccacttcgccgcgccatggctggcaactcgaacctaaatcgcaccccccctgggcccgcagtagccactccagcaaaagccgcaccaccacccgggagccccgcaaagtttagaagccttagtagggacccagaggcaggcagacggcaacatgccgaggaaagagggcgccgcaaccctaaaacaggcttgaccctagagcgggtaggcccagagagctcaccctatttaagtcgaagacatcgcggacagggccaagagggagagcactaccactcctgcgttcagcttgccccgacccgaggcctggaagaactcggccacggcccccttagcctggctggagggccacgcgttgggggagtggcagccgcggcgacagaagcaccccgtatggaatggaaggttaaagtacgaagcgacggcacaagatacgtggccaagagacccgttcgggacaggctgctaaaggctcgcgcgcttaaaattcgagaggaaagaagcggtatgaccacagatgacgacgcagtgtccgagatgaagatgggacggtactggtccaaagaggaacgcaagcagcatctgataagagcacgagaacagcgaaagaggagagagtttatgatgcagagtagactggaatgtttgagagagcagcagaacggagattctaaaccagaactgaatataatcgctttgagtcatcggaagaccatgaaaaaaaggaacaaaaagatcttggataattggataaccattcaggagatgctggctcacggggcaagatctgcagacgggaagagagtgtacaatcctctactgagcgtcaccactgtgtag

SEQ ID NO: 249016 - RNA, 477 nt, synthetic construct
  misc_feature 1..477: note = Description of Artificial Sequence: Synthetic coding sequence
  source 1..477: mol_type = other RNA
atgctcgaggccatggccgagcccagtcctgaagaccctcctcctacccttaagcctgaaacacaacccccagaaaaacgtagacgaactatagaggattttaataagttttgttcttttgttctcgcctacgctggatatatacccccatcaaaagaagaatctgattggcccgcctccggatcttctagtccattaaggggcgaatccgccgccgactcagacggatgggattccgcacctagtgatctacgcactatacaaacatttgtcaaaaaagcgaaatcctccaaaagaagggcagctcaagccggacctactcagcccggaccacctagaagtactttttcacggttgcaggctccagactcggccacactgctagaaaaaatgaagctgaaggactccctgtttgatctcgacgggccaaaggttgcgagcccgctcagccccccatgcgccgccaacaccccttag

SEQ ID NO: 249017 - RNA, 1665 nt, synthetic construct
  misc_feature 1..1665: note = Description of Artificial Sequence: Synthetic coding sequence
  source 1..1665: mol_type = other RNA
atgaggcgccctctttcaaagtgcggcatggagcctggaggaggagacgcatcccttacgctacacggtctccaaaacagatcgcacggcaaaattaaacttcgcaaaagaaagtcaactttatattttaacacacaagaaaaatccgcgcgccgtagaggcgacttattgggcgaaaacatctatctgcttctgttcaccatcgcgcttcggattctaaactgttttctagtccagacctccttcgtgcctgacgagtactggcagtctctcgaggtctcccaccatatggtatttaattatggctatctaacatgggagtggacggaacgactcaggtcctacacctacccccttatcttcgcctccatttataaaatcctgcatttacttgggaaagatagcgttcagttactcatttggatcccacgactggcccaagcactgctcagtgccgtcgcggatgtgcgactctactcactcatgaagcaactggagaaccaagaagtggctcgatgggtctttttctgtcagctttgttcctggtttacatggtactgctgtacgcggacgcttacaaacaccatggaaaccgtcctcaccattatcgcacttttctattacccactcgagggctcaaaatcgatgaattccgtaaagtactcctccctcgtggcactcgccttcattatcagacctacagctgtgattctctggactcctttgctgttccgtcacttctgccaggaaccaagaaaacttgacctaatattgcatcactttcttccagtgggcttcgtcacactttctctatcgttaatgatcgacaggatctttttcgggcagtggacattggtgcagttcaacttccttaaattcaacgtcctccagaattggggaacattttatgggtcccacccctggcactggtacttctctcaaggattcccagtaattctgggcacacacctaccctttttcatccatggctgctatctggctcccaagagataccgaattcttctcgtaaccgttctgtggaccctgctggtgtactcgatgctgagccacaaggaattcagatttatctaccctgtacttccgttttgcatggttttctgtggctattcactcactcatcttaaaacctggaaaaaacccgcactgtccttcttattcctttctaaccttttcctggccctttatacggggctcgtgcaccagagagggacactcgacgtaatgtcacacatacagaaggtgtgttataataatcctaacaaatcatctgcctcaatatttattatgatgccatgccactcgactccatattactcccatgtccactgcccgttgccaatgcgttttttacagtgcccccccgacctcaccggtaaatcccattatcttgatgaggccgacgtcttctatttaaatccactgaactggttacatcgagaattccatgatgacgcttctctgcccacacatctgatcaccttcagcattttagaagaggaaataagcgcctttttaatcagcagtaattataaacggaccgcagttttctttcacacccacttacctgaaggccgcattggaagccatatctacgtctatgagcgcaaactgaaaggaaaatttaatatgaaaatgaaattctag

SEQ ID NO: 249018 - RNA, 1482 nt, synthetic construct
  misc_feature 1..1482: note = Description of Artificial Sequence: Synthetic coding sequence
  source 1..1482: mol_type = other RNA
atgtggccacaggatccctctcgaaaagaggtcctccgttttgccgtcagctgtagaatcttaacccttatgctccaagccctatttaacgcaatcattccagatcaccacgccgaagccttttctccccctcggctggcaccctccggcttcgtcgaccaacttgtggaagggctgttaggggggctaagccactgggacgccgaacatttcctgtttatagcagagcacggttacctttacgagcacaatttcgccttcttccctgggttcccattggccctattggtgggtacagagcttctacgacctttgcgaggacttttgtctcttaggtcctgcctgcttatctccgtggcttccctgaatttcctattttttatgttggccgctgtcgcattgcatgacttgggatgcctggtgcttcattgtcctcaccaatcattctatgcagcccttctattctgtctaagtcctgctaacgtcttcctagccgcgggatatagtgaggctcttttcgccctcctgacgttttccgctatgggccaattagagagaggccgtgtgtggactagtgtgttgttgtttgcattcgctactggggtgaggtcaaatggattagtctcagtcggctttctgatgcattcccaatgtcaaggttttttcagctccctcaccatgcttaaccccctgagacagttgttcaaactgatggctagtctctttctctctgtttttaccctcggccttccatttgccctctttcaatactatgcctatacccagttctgtcttcccggctcagccagaccaataccagagcccttggtgcaacttgccgtcgacaaaggctacagaattgctgagggaaatgaacccccctggtgcttctgggacgtgcctttgatctattcctatatccaagatgtatattggaatgtcgggttccttaagtattatgagctcaaacaggtccccaatttcctgctagccgcacctgtcgctattctcgttgcttgggcaacatggacttacgttacaacccacccgtggctgtgccttacactgggcctccagcgatccaagaataacaagacacttgagaaaccagatctgggttttctcagccctcaggttttcgtgtatgtggtgcatgcagctgtgcttcttctgttcggtggcctgtgtatgcatgtgcaagtcttgactcgctttctcggatcatctactcccattatgtactggtttcccgcccacctactccaggaccaagaacctttgttgagatcgctaaagactgtaccttggaaaccattggctgaagacagcccaccaggtcaaaaggttccaaggaacccaatcatgggattgctctaccactggaaaacctgtagccccgtgacgcgctatattctcggctacttcctaacctactggctgctcggcctcctgctccattgtaacttccttccctggacctag

SEQ ID NO: 249019 - RNA, 2529 nt, synthetic construct
  misc_feature 1..2529: note = Description of Artificial Sequence: Synthetic coding sequence
  source 1..2529: mol_type = other RNA
atgtccagacctctgtctgatcaggagaagagaaagcagatctctgttcgaggactcgctggcgtggagaacgtgaccgagctgaagaaaaattttaatcgacacttacactttacccttgttaaagaccgcaacgtcgccactccccgcgactattatttcgccctggcacacaccgtaagagaccatctggttggcagatggataagaacccagcagcattactacgagaaagaccccaaaaggatctattacctgtcactcgaattttatatggggagaaccttgcagaacactatggtgaatctcgctctcgagaacgcctgtgacgaagcaacatatcagttaggcctggacatggaggagttagaagaaatagaggaagacgcgggacttgggaatggcggactcggcaggttggcggcgtgctttcttgattcaatggccacactcggactagctgcatacggatacgggatcaggtatgagttcggtatttttaatcagaaaattagcgggggctggcagatggaagaagccgatgattggctcaggtacggaaatccatgggagaaagctaggcctgagtttacactaccagtgcacttttacggtcatgtagagcatacctcacaaggggccaagtgggtagatacacaagtcgtgttggctatgccatatgatacaccagtgccaggttatcgaaacaatgtcgtcaatactatgagactttggagcgccaaagccccaaatgacttcaatttgaaagattttaatgtgggcggctacatccaggcagtgctggacaggaacctcgccgagaatatcagccgggtactttatcctaatgacaactttttcgagggaaaggagctgaggttaaagcaggagtatttcgtggtcgccgcaaccttgcaggacattattcgcagatttaagagctcaaaatttggctgcagagaccccgtgaggacaaattttgatgcctttccagacaaggtagcaatacaattaaacgatacacatccatccttagcaattcccgaactaatgcgcatcttagttgacctggaacgaatggactgggataaagcttgggacgttacagtaaggacatgtgcatacaccaatcacacagtgctccctgaggcactcgaaagatggcccgtgcacctgctagagactttgttgcccaggcatttgcagattatctacgaaatcaaccagcgtttcctgaatagagttgcagctgctttccccggtgatgtggatcgacttcgtaggatgtccctcgttgaggaaggagccgttaaacggataaatatggcacacctttgtatagctggaagtcacgcagtgaacggcgtcgcacggatccactccgagattctcaagaagaccatcttcaaagatttctatgagctggagcctcacaaattccagaataagacaaatggcatcacaccacgaagatggctggtactatgcaatcccgggcttgcggaggtaatcgcagagcgcatcggagaagattttataagcgacttggaccagcttcggaaactgctgagtttcgtggacgacgaagccttcattagggacgtggctaaggtcaagcaggaaaacaaactaaaatttgcagcatacttagagagagaatataaggtgcacataaatcctaactcgttgttcgacatacaagtgaagcgaattcatgagtataaaaggcagctgttaaattgcctgcacgtcattactttgtataacagaataaaacgggagcctaacaaattttttgtacctaggacagtgatgataggtgggaaggctgcccccggctatcacatggccaaaatgattatcagactggtaacagcaatcggagacgtagtaaatcacgatccagctgttggcgatagactccgcgtcatcttccttgaaaattacagggtatccttggcagagaaagttatccccgcagcagacttatccgaacagatctccaccgcgggaaccgaagcatctgggacggggaatatgaaatttatgctgaatggagcactgacaatcggcaccatggacggagctaacgtggagatggcagaggaggcaggagaggaaaatttttttatcttcgggatgagagtagaggatgtggacaagttggatcagcgtggctacaacgcacaggagtattacgatcgtatacccgaattgcgccaggttatagaacaattatcgagcggttttttctcacctaaacaacccgatctattcaaggatatcgtgaatatgcttatgcatcatgacagatttaaggtgtttgctgactacgaagattatattaaatgccaggagaaggtctcagcattgtataagaaccctagggagtggacgaggatggtcatccggaatatcgcaacctccggtaagtttagttctgatcgcaccatagcccaatatgctagggaaatttggggagtggaaccctctagacaacggctgcctgcacctgacgaggcaatttag

SEQ ID NO: 249020 - RNA, 2646 nt, synthetic construct
  misc_feature 1..2646: note = Description of Artificial Sequence: Synthetic coding sequence
  source 1..2646: mol_type = other RNA
atggcagcgcccggagccccagcagaatatggatacataagaaccgtcctgggacagcagattttgggccagctcgattccagctctctcgcactgcctagtgaggccaagctgaagttagcgggtagctcaggccgcggaggccaaaccgtgaagagcttgagaattcaagaacaggtgcagcaaacattggccagaaagggaagatcatccgtcggaaatgggaatctccatcgaactagctctgtgcctgaatacgtgtacaacctgcatctggtggaaaatgattttgtgggaggtcgcagccctgtccccaagacttacgacatgcttaaagccggcactactgcaacatacgaaggaagatggggccgaggaactgcccaatatagttcccagaaatccgtagaggagcgctccctccgccacccccttagacgactcgagatatcgcccgactccagtccagagagggctcactacacccacagtgactaccagtactcccagcgcagtcaggcaggacacacactccatcatcaggaatcacgcagggccgcattgttagtacctcctagatatgccagatccgagattgtgggtgtctcacgggccggcacaacaagtcgccagcgtcactttgatacctaccacaggcagtaccaacatggctccgtgtccgatacggtcttcgattccatccccgccaacccagctctactcacttacccaagaccaggcacctccagatccatgggcaacttacttgaaaaagaaaactacctaactgccggactgactgttgggcaggtccggccgctcgttcctctgcagccagtgacacagaatcgagcatctcgctcatcatggcatcagtcctctttccatagcacacgcaccttgcgcgaagccggtcctagtgtcgctgtggattcctcgggaaggagggcccatcttaccgtcgggcaggcagcagccggtggctccggtaacctactgactgaacgctcaaccttcactgactcgcagctcgggaacgcagatatggagatgacactggaaagagccgtcagcatgctggaagcagaccacatgctgcccagccggatttctgctgctgccacttttatacaacatgaatgctttcagaaatcagaggctcgtaagagagtaaaccaacttaggggcatattaaagttattgcaactgcttaaggtacagaatgaggatgtgcagcgcgccgtttgcggcgccctcaggaatttagtatttgaggacaacgacaacaagttagaggtggccgagttgaatggagtgcctagattactacaggttctgaagcagacccgcgacttagagacaaaaaagcagatcactgaccataccgtaaacctgaggtcccgtaatggctggcccggtgcagtggctcatgcgtgtaacccttccacactggggggacagggtggcagaataacccgatctggagtacgcgaccagcctgatcagcatggtctgctgtggaacctgtctagtaacgataaactgaagaaccttatgataaccgaggctttactgactctcaccgagaacataattatccctttctctggatggccagagggcgactacccaaaggccaacggactgctggattttgatattttttacaacgtgaccggatgtctacgaaacatgagtagcgcaggcgccgacggacgcaaagccatgagaagatgcgacggcctaattgactctctcgtacattatgtccgcggcacgatcgccgattaccagcctgacgacaaggctaccgaaaattgcgtctgtatcttacataacctgagctatcaactagaggccgaactccctgaaaaatattcccagaacatctatatccaaaatcgcaatatacaaaccgacaacaacaagtctatcggctgcttcggctctagatctagaaaggtgaaggaacagtaccaggacgtacctatgcccgaggagaagagcaatccaaagggggtcgaatggctctggcacagcatcgtaatccgcatgtatctgagtctgattgccaagagtgttagaaactacacccaggaggcttcactgggagccctgcaaaacctgacagccggttctggaccaatgcccacttcagtcgcgcaaaccgtcgtgcagaaggaatctggtttacagcacactcggaagatgctacatgtgggtgaccctagtgttaaaaaaaccgccatcagcctattacgcaatcttagcagaaatctgtcccttcagaatgagatcgcaaaagaaacactgccagatttagtgagcatcataccagacaccgtcccaagcactgatttactgattgaaactaccgcatccgcctgctacactctaaacaatatcatccagaactcctaccaaaatgcacgcgatctactgaacaccggggggatacaaaaaattatggccataagtgcaggagatgcatacgcctccaataaggcctccaaggccgccagcgtcctactctacagtttgtgggctcatacagaacttcaccatgcttacaaaaaagcacagttcaagaagacagactttgttaatagccggaccgctaaagcctaccatagccttaaagactag

SEQ ID NO: 249021 - RNA, 291 nt, synthetic construct; identical to SEQ ID NO: 248415
  misc_feature 1..291: note = Description of Artificial Sequence: Synthetic coding sequence
  source 1..291: mol_type = other RNA

SEQ ID NO: 249022 - RNA, 291 nt, synthetic construct; identical to SEQ ID NO: 248416
  misc_feature 1..291: note = Description of Artificial Sequence: Synthetic coding sequence
  source 1..291: mol_type = other RNA

SEQ ID NO: 249023 - RNA, 291 nt, synthetic construct; identical to SEQ ID NO: 248417
  misc_feature 1..291: note = Description of Artificial Sequence: Synthetic coding sequence
  source 1..291: mol_type = other RNA

SEQ ID NO: 249024 - RNA, 405 nt, synthetic construct
  misc_feature 1..405: note = Description of Artificial Sequence: Synthetic coding sequence
  source 1..405: mol_type = other RNA
atgaagagcctgacttggatcctcggattatgggctttagcggcctgctttacgccgggtgaatctcagcgtggccctcggggtccctacccccctggtcctctggcacctcccccacctccttgttttccctttggaacgggcttcgtccccccgccacacccgcctccttacggccccggcagatttcctcctcccctgagccctccatatggacctggccggatacccccgtcccccccacccccctacggaccgggcaggattcaatcacattctctcccacctccatacgggcccggttaccctcagcccccatcccagccccgcccttacccaccaggcccacctttcttccctgtaaattctccgacagaccctgccttgccaacccctgcgccctag

SEQ ID NO: 249025 - RNA, 3075 nt, synthetic construct
  misc_feature 1..3075: note = Description of Artificial Sequence: Synthetic coding sequence
  source 1..3075: mol_type = other RNA
atggcacagggggccatgcgtttctgttcagaaggggactgcgcaatcagcccccctaggtgtcctagaagatggctccccgagggcccagtacctcagtcccccccagcttccatgtacggatctaccggtagcttgctgagaagagtcgcaggtcctggccctagggggcgagaactcggccgcgttaccgccccatgtactcccttaaggggacctccttccccgagagtggcaccatcaccatgggctccctcaagcccaaccggacaaccaccccccggagcgcaaagcagtgtggttatttttagatttgttgagaaggcctcagtaaggcctttaaatggactgccggcacccggtggcctgtctcgcagctgggatctcggtggtgtctcccctcctagaccgacacctgctctcggaccgggctctaatcgcaagttacgcctggaagcttcaacaagtgacccactgccagcaagaggagggtccgccctgcccggaagcagaaatctggtacatggtccacccgcccctccacaggttggagcagatggtctatacagctccttaccaaacggactcggagggccccccgaaagactggccactttgtttggaggccccgctgataccggctttctaaatcagggagatacctggtcatctcctcgtgaggtgtcatcccacgcacaacggattgctagggcaaagtgggagtttttttacggatccctagatcctccctccagcggcgccaaacccccagaacaagctcctccaagccccccaggtgtgggctcccgccagggctctggggttgcagtgggccgggctgctaaatactctgagaccgatcttgacaccgtgccactgagatgttacagggagactgacatcgacgaggtgctggctgagagagaggaggcagattctgcgatcgagagtcagccctcatccgaaggccctcccggcacagcctatccaccggctcccaggcccgggcctttaccaggaccccatccctccctcggaagcggtaacgaagatgaagatgatgatgaagccggcggcgaggaagacgtcgacgatgaagttttcgaggctagtgaaggtgccagacccggctctaggatgccactgaagtctccagtccctttcctgcctggaacaagtccaagtgccgacggacccgatagcttctcatgcgtgttcgaggccatcctggaatctcatcgtgccaagggcacatcatacacctctctagcgtcccttgaggccttggccagtcccggaccgacccagagccccttctttacatttgagttaccgccgcagccccccgcccctagaccagatccccccgctcccgcacccctcgcacctttggaacctgactctgggacctcatctgccgccgatggcccgtggacacagagaggggaagaagaagaagccgaagcccgcgctaagctcgctcctgggcgagaaccacctagcccttgtcattccgaggactccctggggctgggagccgcacctttgggatctgaaccgcccctttcacagctcgtgtctgacagcgattccgagcttgattctaccgaaagactggcccttggcagcacagataccctctcaaacggtcagaaggcagatctggaagccgcccagagactggctaagcgattatatcgacttgacggattcaggaaagccgacgttgctcgtcacctgggaaaaaataacgatttttctaagctggtggctggagagtacctcaaattctttgtgttcactggcatgaccctcgatcaggcactcagagtcttcttaaaagagctggcactgatgggcgaaacacaggagcgagaacgagtgctggcccacttttcacaacgttattttcagtgtaatcccgaggctctgagtagcgaagatggagctcatacactcacttgcgctctgatgctccttaacaccgacctccatggacacaatattggtaaaagaatgacttgtggcgattttataggtaatttagagggcctcaatgatgggggcgacttcccgagggaattacttaaggcgttatattcgagcatcaagaacgagaagctgcagtgggctatcgatgaagaagaacttcggcgatctttaagtgagctggccgatcctaaccctaaggttataaaaaggattagtgggggaagtggttctggatcctccccattcttagacttaactcctgaaccgggggcagccgtttacaaacatggtgcactcgttagaaaggtgcacgcagatcctgattgcagaaaaactcctcgaggcaagagagggtggaagtcattccatggcatcctcaagggtatgattttgtacctgcagaaagaggaatacaaaccaggtaaagccctcagcgagaccgaactgaaaaatgcaatcagtattcaccatgccctcgccaccagagcgtctgattacagcaagcgcccacacgtcttttacctcagaaccgcagactggagagtattcctttttcaagctccgagtttagagcagatgcagtcctggataacaagaattaatgtcgtagcagccatgttcagcgctccaccgttccccgccgccgtgtcttcacagaaaaaattttctcgacctcttttacctagtgccgcgactcgactgagtcaagaagagcaagtgaggacccacgaggcgaagttaaaagctatggcatccgaattgagggagcacagagctgcgcaactgggtaagaaaggtaggggaaaggaagccgaggaacagagacagaaggaagcttacttagaattcgaaaaatcccggtactccacatacgcagctctgctgagggtgaagttgaaagctgggagcgaggagttggacgctgtggaagccgctctggctcaggccggatctactgaagatggtctgcctccatctcattcctctccaagtctgcagcctaagccgagcagtcagccaagggcacagagacatagcagcgagccgagaccaggagctgggagtgggagaagaaagccgtag

SEQ ID NO: 249026 - RNA, 2373 nt, synthetic construct
  misc_feature 1..2373: note = Description of Artificial Sequence: Synthetic coding sequence
  source 1..2373: mol_type = other RNA
atgaaagcatttggtccgcctcatgaaggccccctccaaggattagtcgcctctagaatagaaacctacggcggccgtcaccgggcgagcgctcagtctacagcaggacgactatacccccgcggatatcctgtgttagatcccagccgaagaagacttcagcaatacgttccattcgccagagggtcaggccaggctaggggcctctctccgatgcggctgagagatccagaacccgagaaaaggcacgggggacacgtgggtgccggactgctgcactctcctaaacttaaggagctgacaaaagcacacgaactggaggttagattgcataccttttccatgttcggaatgcctcgcctgccaccagaagaccggcgtcattgggaaataggagaaggaggggatagtggattaacaatcgaaaagtcctggagagagcttgttcctggccacaaagagatgtcacaggagctctgtcaccaacaggaagccttatgggaactcttgacaacagagttgatatatgtgcgcaagcttaagataatgactgacttgctagcagcgggtctgttaaatctacagagagtgggccttctgatggaggttagcgctgagactctgtttggcaacgtgcccagcttgatcaggacccatcgaagcttttgggatgaagtattgggccccaccttggaggaaaccagagcctccggtcagcccctggaccctatcggtttgcaatcaggatttttaactttcggccagcggttccatccttacgttcagtattgtctgagggtgaagcaaacaatggcttacgcacgagaacagcaggaaaccaatcctcttttccacgcattcgttcagtggtgcgagaagcataagagatctggaagacagatgctttgtgatctgcttataaaaccccaccaaaggattacaaaatatccactccttctccacgctgttctgaaaagaagcccagaggcccgggcccaggaagctctcaacgctatgatcgaagccgtagagtcctttttgagacacatcaatggccaggtacgccaaggagaagaacaggaaagtctggccgcagcagctcagagaatcggaccctatgaagtgctggagcccccctcagacgaagtcgaaaaaaatctccggccattttctacactggacctaacatcccctatgctgggcgtggcctcagagcatacccgacaactgctgctggaggggccagtaagagtgaaagagggccgagagggcaaactcgacgtctacctttttctgttttcagatgttttgctggtgactaagccacagcggaaagccgacaaggccaaagtaataagaccccccttgatgctagaaaagctggtttgtcaaccgttgcgtgaccccaattccttcttactgattcacttaactgaatttcagtgtgtgtcatctgcgttattggtacactgccccagccctaccgatagagctcagtggttagaaaagactcaacaagctcaagctgccctccaaaaactcaaggccgaggaatatgtccagcagaaacgtgagctcctcacgctgtatcgtgatcaggatagagagtctccatctacccggccttcaacgccaagtctggaaggctcccaaagtagtgctgaaggacgaacccctgaattttctaccatcatcccacacctagtcgttaccgaagatactgacgaagatgccccccttgtcccagatgacacatcagactctggatatgggaccttgattcctggcactcctacagggagtagatcaccactctcccggctcaggcagagagcgcttcgccgggaccctcggttgactttctccacactcgagctgagagatattccgctgaggcctcatccgcccgatcctcaggctccccaaagacgatcagcgcctgaattacccgagggaatcttaaaaggtggatctctccctcaggaggatccccccacatggagtgaagaggaagatggcgcttcagaacggggaaatgtagtagtagagaccctgcaccgagcgagactcagaggccaattgccaagtagtccaacccacgccgactctgccggcgagtccccatgggaatcaagtggcgaggaggaagaagagggccccttattcctgaaagcagggcacacctcactgaggccaatgcgcgccgaggacatgctgagggagattcgggaggagctggcttcccagagaattgaaggagcagaagaaccacgcgacagtaggcccaggaagctgactcgcgcacaacttcaaaggatgcgaggaccacacatcatccagctcgataccccgctgagcgcaagtgaagtgtag

SEQ ID NO: 249027 - RNA, 819 nt, synthetic construct
  misc_feature 1..819: note = Description of Artificial Sequence: Synthetic coding sequence
  source 1..819: mol_type = other RNA
atggttctattgacggctgtgcttctgttgctcgccgcgtacgccgggcccgcacaatcgctaggatcttttgtgcactgtgagccttgcgatgaaaaagcccttagtatgtgtcctccttctcctttaggctgcgagttagtgaaagagcccggctgcggttgctgtatgacttgtgccctggcagagggacaaagttgtggcgtctacacagaacgttgtgctcaaggacttcgctgcctgcctcggcaggatgaagaaaaacccctccacgcgctgttacatggacgcggtgtgtgcctcaacgaaaaatcataccgggagcaggtcaaaatagagcgggacagcagagagcatgaagagccgacgacttccgaaatggccgaagaaacatatagccctaagattttcagaccaaagcacaccagaatcagcgaactaaaggccgaagccgtaaagaaggatcggaggaaaaagctaacacagtcaaaatttgtgggaggcgccgaaaatacagcccacccaagaatcatctccgccccggaaatgcgtcaagaatctgagcaaggcccttgcaggagacacatggaagccagccttcaggaacttaaggccagtcctcgcatggtcccaagagccgtttacctacccaattgtgacagaaagggattttacaaaagaaaacagtgtaaaccctctcgaggaagaaagagagggatctgctggtgcgtggacaagtatggcatgaagctgcccgggatggagtatgtggatggggatttccaatgtcataccttcgacagttcaaatgtggaatag

SEQ ID NO: 249028 - RNA, 2031 nt, synthetic construct
  misc_feature 1..2031: note = Description of Artificial Sequence: Synthetic coding sequence
  source 1..2031: mol_type = other RNA
atggcagcagcctcatcccctcctagagctgagcggaagcgatggggttggggaagattaccaggtgctcggcgaggatctgcagggcttgcaaagaagtgtccttttagtctggagctagccgaggggggaccagccggaggggccctctacgcaccaattgccccaggagcacctggccccgctccgccagcttcccctgccgcccctgccgctcctcctgtggcttccgacctcggcccgcggcctccagtgtcactcgacccgcgtgtgtctatttattcaacccgacgccctgttcttgctcgcacacacgtccaaggacgcgtctacaatttcctggagcgtccaacaggctggaaatgttttgtctatcactttgctgtgttcctgattgttctcgtatgccttatcttttccgttttatcgacaatagaacagtacgcggcccttgctacaggaaccctattctggatggaaattgtcctcgtggtgttttttggcacagagtatgtcgtgcggttatggagtgctgggtgtcgctctaagtatgtgggcctgtggggacggcttcgttttgcgagaaagccaatttcaatcattgacctgatagtggtcgtggctagtatggtcgtgctctgcgttgggtcaaagggacaggtgtttgcaacttcagcgatcagaggtattcgatttttgcaaatactccgcatgctgcacgtggatagacagggaggtacatggcgtctactgggttcagtcgtattcatccaccgacaggaattaataactaccttatatattggctttctcggactgatcttttcaagctacttcgtctacctcgccgaaaaggacgctgtgaatgaatctggaagggttgagttcggctcttacgccgatgctctgtggtggggggtggtcaccgtgacaacaattggctatggggataaggtacctcagacgtgggttggtaagaccattgcatcatgcttctctgtattcgctattagtttcttcgctctgcctgcaggcattcttgggagcggctttgcactgaaagtacagcaaaaacaacgccagaaacactttaataggcaaatcccagctgctgcctctctgatccagactgcttggagatgctacgctgctgaaaacccggatagttcaacttggaaaatctacatcaggaaagcgccaagatctcatacccttctgtctcctagtcccaaacccaaaaaatcagtggttgttaaaaaaaagaaatttaagctggataaagacaatggtgtcacacccggcgaaaagatgctgacagtgccccatatcacctgtgaccctcctgaagaacgccgattagaccatttctcagtagatggatatgactctagcgtccgaaaatctcctacattactggaggtgagtatgcctcacttcatgcggaccaacagttttgccgaggacctggatctcgaaggcgagacactgttaaccccaatcactcatatctctcagctccgcgagcaccaccgggctaccattaaagtaatacggaggatgcagtattttgtggcaaagaagaaatttcagcaagcacgcaagccctacgacgtaagagacgttatcgaacagtactcccaaggacacctcaatttgatggtgcgcatcaaagaactccaacgtcgacttgatcagtctataggaaagcctagcctgtttatctccgttagcgagaagagtaaggacagaggttctaacactattggagctagattaaacagagtcgaagataaggtgacccagcttgatcaacgcttggcactgattacagacatgctgcaccagctcttgagtttgcatggtggttcgacgcctggctctggtgggcccccccgtgagggaggcgcacacatcactcagccttgtggatctggaggtagcgtagatccagaactgttcctcccgagcaacacacttccaacttatgaacagctgaccgtgccacgccgcggccccgacgaaggttcatag

SEQ ID NO: 249029 - RNA, 1104 nt, synthetic construct
  misc_feature 1..1104: note = Description of Artificial Sequence: Synthetic coding sequence
  source 1..1104: mol_type = other RNA
atgtacccagaaagtaccaccggaagccccgctagactttcgctacgccagaccggctcacctggcatgatatactccacgcgctacggatcccccaaaaggcaattgcaattctacaggaatctgggtaagtccggactgcgggtctcttgtctcgggttgggcacatgggtgacattcggcggccagataactgacgagatggcagagcagctaatgactcttgcgtatgataatgggatcaacctgtttgacaccgctgaagtatacgctgcaggtaaagcggaagttgtcctcggaaacattattaaaaagaagggttggaggaggtctagcttggtcatcactacgaagattttttggggcgggaaagcagaaacagagcgggggctcagtcgcaaacacattattgaaggactgaaagcttcactagagagactccaactcgaatacgtggatgtagtgttcgctaatagacctgatcctaatacaccaatggaggagacggtgcgggcaatgacacatgtcatcaatcagggaatggccatgtattggggaacgtctaggtggagtagcatggagatcatggaggcttattccgtggccaggcagtttaatctgacaccacccatttgcgaacaggcagaataccacatgtttcagagagaaaaagtcgaagtgcagctgcccgaattattccataaaatcggcgtaggagcaatgacctggtcacctttggcctgcggcattgtttctggcaagtacgacagtggaatacctccctactcgcgcgcctccttaaagggatatcagtggttgaaggataaaattctaagcgaagaaggaaggcgccagcaagctaaattaaaagaactacaggcaattgcagagagactgggatgtacactgccacagttggccatcgcttggtgtttaagaaacgagggggtgagtagcgttcttctaggcgcctcaaacgcagatcagcttatggaaaacatcggggctatccaggttctgcctaaactgagttccagcatcatccatgagatagatagcatcttgggaaataaaccctactctaaaaaagattatcgatcctag

SEQ ID NO: 249030 - RNA, 1209 nt, synthetic construct
  misc_feature 1..1209: note = Description of Artificial Sequence: Synthetic coding sequence
  source 1..1209: mol_type = other RNA
atgggcccgctgcccgcccctagttgtacacaacggattacatggaagggcctcttactcaccgcttccctgttgaacttttggaatccccctaccaccgccgaggtcacaatagaagcccagcctcctaaagttagcgaaggtaaagacgttctactgctagttcacaatcttccacagaaccttccaggctacttttggtacaaaggggaaatgactgacttataccactacatcatctcctatattgtggacggcaagatcattatctacgggcctgcttactctggaagggaaacagtatatagtaacgcaagtctcctgattcaaaatgttactagaaaagacgccggaacctacactctgcacattatcaagcggggcgacgagacccgggaagagattcggcattttacgttcacgctatacctcgaaacccccaagccatatatatcctctagcaatttaaatccgcgggaagccatggaggccgtgcgactcatttgcgaccccgaaacactagatgcatcttacctgtggtggatgaacgggcaatccttaccagtcacacatcgtctgcagctgagtaaaacaaacaggaccctgtacctgtttggcgtcacaaagtatattgcaggtccatacgagtgtgagatcaggaatccagtgtccgccagcaggagtgatccagtaaccttaaacctcctccacggtcccgatctgcccagaatttatcctagtttcacatactaccgtagcggagagaatcttgatctttcttgctttaccgaaagtaatccccctgccgagtatttttggactattaacggcaagttccagcaatctggccagaaactgttcatcccccaaattactagaaaccattccgggctgtacgcttgttccgttcataattctgctacaggcaaagaaatatcaaagtctatgacggtgaaagtcagtggtaaatggatccctgcgtcactagccgtgggattttacgttgaatccatttggttgagtgaaaaatcccaagaaaatatttttattccgtctctttgcccgatgggcacatccaaatcccagatactcttactgaatcccccaaatctctcattacagacattgttctccctcttcttttgcttccttatggctgatctggtgtcagggcttaaaaaggtggggagagggctctatcagccctag

SEQ ID NO: 249031 - RNA, 1281 nt, synthetic construct
  misc_feature 1..1281: note = Description of Artificial Sequence: Synthetic coding sequence
  source 1..1281: mol_type = other RNA
atgggccccttgcctgcgccatcttgtactcaacggatcacgtggaaaggcctgttacttactgcaagcctgctcaatttctggaacccccctactaccgcggaagtgactatcgaagctcagccaccaaaggtctctgagggaaaggatgtcctgttgttggtacacaatcttccacagaatttacccgggtacttctggtacaaaggcgaaatgacagacttataccactacataatttcgtacatagttgacgggaaaattattatctacgggccagcctattctggaagagaaacagtatactcaaacgcctctttattaatacaaaatgtcactcgcaaggacgccggcacgtatactctgcatatcattaaacggggcgacgaaaccagagaagagattcgccacttcacctttacactgtacctggaaactcctaagccctatattagttcatctaatttaaatcctagagaagccatggaagcagttagactcatctgtgaccccgaaaccttagatgcaagctatctttggtggatgaacgggcagtcactgcccgtcacacacaggctacagctgtccaaaacaaaccgcaccctatatctcttcggggtgaccaaatatattgcaggaccctacgaatgtgaaatcaggaaccccgtcagtgcttcccggtccgatcctgtcacccttaacctgctcccaaagctccccataccctatattaccattaataatcttaacccccgtgagaacaaggacgtcctagcattcacttgcgagcccaagtctgaaaactatacctacatttggtggctcaacggtcaatctctgcccgtctctccaggcgtcaaacgtccgatcgaaaatagaatccttatcttacccagcgtcacacgtaacgaaaccgggccttaccaatgcgagattagggacaggtacggcggcctgagaagcaatccagtcattttaaatgtgctatacggtcctgacctacctcgcatataccctagttttacctactatagaagtggcgagaacctggacttatcatgtttcacagaatccaatccgcccgctgagtacttttggacaatcaacggtaaattccaacaatccggtcagaaactttttatcccccagatcacccgtaatcatagcggactgtatgcctgcagcgtgcataattcagccacgggtaaagaaattagcaagtctatgacagtgaaagtatcaggaccttgccatggcgatctcacggaatcccagtcctag

SEQ ID NO: 249032 - RNA, 723 nt, synthetic construct
  misc_feature 1..723: note = Description of Artificial Sequence: Synthetic coding sequence
  source 1..723: mol_type = other RNA
atgggacctctgcctgccccctcttgtacccagcgaatcacatggaaaggcctgctgttaaccgccagcctgctcaacttctggaatccccccacaacagcggaggttactatcgaagcacaaccgccaaaggtgtcggaagggaaggacgttcttttgctagtacacaatctgccccagaatctcccaggatatttttggtataaaggcgaaatgaccgatctctaccattatattatatcttatatcgtagatggaaagattattatatacgggcctgcctattcagggcgcgaaactgtgtattccaatgccagtctcctgattcagaacgtgactagaaaagacgccggtacctacacattacatatcattaagagaggggatgagacaagagaagagataagacattttactttcacgctgtactacggtcccgacctcccgagaatttaccctagcttcacttactatcggagtggcgaaaacctagacctgagctgcttcaccgagagcaatcctcctgccgaatacttctggaccatcaatgggaagttccaacagtctggacaaaaattatttattccccagatcactagaaaccattctggactatatgcctgcagcgtccacaattcagcaaccggcaaagaaatatccaagagcatgacagttaaggtgtctggaccatgccacggagatttaacagaatctcagtcttag

SEQ ID NO: 249033 - RNA, 1164 nt, synthetic construct
  misc_feature 1..1164: note = Description of Artificial Sequence: Synthetic coding sequence
  source 1..1164: mol_type = other RNA
atgggaccactgccagctcccagttgcactcagcgtatcacatggaaaggactgctactgacagccagcctgctgaacttctggtataagggcgaaatgacagacctgtatcactacatcatctcatatatagtggacggaaagattataatatacgggccagcatattccggacgtgaaacagtctattctaacgccagtctgttgatccaaaatgttacaaggaaggacgccggcacctatactctgcatatcataaaacgaggcgatgaaacaagagaagagatcaggcacttcacatttactttatacctcgagacaccaaagccgtatatctcatcttccaacctcaaccccagggaggctatggaagccgtgcgccttatttgcgatcccgaaaccctagatgcgtcttacttgtggtggatgaacggtcaaagccttccagtgacacaccgcctgcaactttctaagactaaccgaacactttatctttttggcgtcacaaagtatatagctggtccttacgaatgcgaaatcagaaatccagtcagtgcttctagaagtgaccctgtgactctaaacctccttccaaagctgcccatcccctatataaccattaataatttgaacccacgcgaaaacaaggacgttttagccttcacatgtgagcccaagagcgaaaattacacttatatttggtggctgaatggacaatccctgcccgtctcccctggagttaagcgacctattgaaaaccgcatcctgatccttccgtctgtgacccgtaatgaaacaggcccgtatcaatgcgaaattcgagatcgttatgggggtctccgcagtaatcctgtgatactcaacgtactgtacggcccagatttgccgcgtatatacccttctttcacctactacagatccggcgagaatctcgatttatcctgctttacagaatccaacccccctgccgagtacttttggactataaacggcaagtttcagcagtctggacagaagctgtttatcccgcaaatcacacgtaatcacagcggcctctatgcctgttccgtccacaactccgctacaggtaaagaaatttctaagagcatgaccgttaaagtttctggcccctgccatggcgatcttaccgagagtcaatcctag

SEQ ID NO: 249034 - RNA, 1002 nt, synthetic construct
  misc_feature 1..1002: note = Description of Artificial Sequence: Synthetic coding sequence
  source 1..1002: mol_type = other RNA
atgggcccactgcctgctcctagttgtactcagcgcatcacatggaaagggcttctcttaactgcatcactcctgaacttctggaatcccccaaccacagcagaggtgaccatcgaagcacagccccctaaagtttcagaaggcaaagatgttttattgctggtgcataacctaccccagaacttaccggggtatttttggtataaaggagaaatgactgatctttaccactacattatttcctatattgtcgacggcaaaattattatttatggacctgcctattccgggagggaaacggtgtacagtaatgctagccttctgatccagaatgtgacccgaaaagatgctgggacctacaccttgcatattattaaaagaggagatgaaacccgagaagagatccgtcactttaccttcactttgtatagcaaactccctatcccttatatcacaatcaacaacctaaatcctcgcgaaaataaggatgtgttagccttcacctgtgaacccaagtccgagaactacacttatatctggtggctgaacggccagtccctacctgttagcccaggagtgaagagacccattgagaatcggattctcatattaccctccgttacaaggaacgaaactggcccctaccaatgcgagattcgagatcggtatggcggactgcgcagcaacccagtcatcctgaatgtcctgtacgggcctgacttaccgcgcatctacccgtcatttacctactatagatccggcgaaaatctagatctgagttgtttcaccgagtccaacccacctgctgaatatttctggacaatcaacgggaaatttcaacaatccggtcagaagctttttataccacagattactcgaaatcatagtggcctttacgcctgtagtgtccacaattcagcaacagggaaggagatcagtaagagcatgacagtaaaagtgagtggcccgtgtcatggagacttgaccgagagtcagagttag

SEQ ID NO: 249035 - RNA, 1485 nt, synthetic construct
  misc_feature 1..1485: note = Description of Artificial Sequence: Synthetic coding sequence
  source 1..1485: mol_type = other RNA
atggcacgcgctgccccactgctggccgctctcacggcactgctcgccgctgctgcagcaggaggtgacgccccccccggcaagatcgcggtggttggtgccggaatcgggggttcagctgtggcgcactttcttcaacagcatttcggtcctagagtgcagattgacgtctacgaaaaaggcacagtcggaggtaggctcgcaacaattagcgtgaacaaacagcactatgaatccggcgcagcaagcttccacagcctatctttgcacatgcaggatttcgtgaaattgctcggattaagacatcgtcgcgaggtcgttgggagatcagcaattttcggaggtgagcactttatgctcgaggagacagattggtacctgttgaacctcttcaggctttggtggcactacggcatctcattccttagacttcagatgtgggtggaagaggttatggaaaagttcatgcggatttacaaatatcaagcccatggctatgccttctctggtgtagaagagttactgtactcactgggtgaaagcacattcgtgaacatgacacaacatagcgtcgccgagagtttactgcaggtgggggtcacccaaagattcatcgacgacgtggtctcagccgtactcagagcatcatatggtcaaagcgccgccatgccagcatttgcaggggctatgagccttgccggcgcccagggcagcttatggtctgttgaaggaggcaacaaactggtatgctctggactgctaaaactcaccaaagctaatgtcatacacgcgacagtaaccagtgtcacgcttcactcaacagaaggcaaagcactttaccaggtcgcctacgaaaatgaggttggaaattcctctgacttttacgatatagtggtgatcgccaccccattgcatttagataactcatcctctaatctcacattcgcaggatttcatcctccaatcgacgatgttcaaggcagctttcaaccaaccgtggtgtctctggttcacggctacttgaacagtagctatttcggctttccagatccaaaactgtttccatttgctaacattcttaccactgattttccctcatttttctgcactttggataatatttgccctgtcaatatcagcgcttccttccgccgcaaacagccccaagaggcagccgtgtggcgcgttcagtcccccaagccgctgttcagaactcagcttaagacactattccgcagttactattccgtccagaccgcagagtggcaagcccatccgctgtatgggagtcgtcctacgctgcctagattcgccttgcatgatcaactgttctacttaaatgctctggaatgggctgcaagctccgtggaagtgatggctgtggccgccaaaaacgtcgccctgctcgcttataatagatggtaccaggacctagacaaaatcgatcaaaaagacctgatgcacaaggttaagaccgaactgtag

SEQ ID NO: 249036 - RNA, 2277 nt, synthetic construct
  misc_feature 1..2277: note = Description of Artificial Sequence: Synthetic coding sequence
  source 1..2277: mol_type = other RNA
atgggaggctgtacggttaaaccccaactgctgctattagccttagtccttcatccctggaacccatgtctgggcgcagactccgagaagccctcttctattccaaccgacaaactgctcgtcattacagttgccactaaagagagcgatgggtttcacaggttcatgcagagcgccaagtatttcaactacacggtgaaggtgttgggtcaaggggaagaatggagagggggagacggaataaacagcataggcggtgggcagaaggtcagactaatgaaagaagtcatggagcactacgccgatcaagacgatttagtagtgatgttcacagaatgcttcgacgtgatattcgccggaggcccagaggaggtgctaaaaaagttccagaaagcaaaccataaggtcgtcttcgctgctgacggtattttgtggcccgataagcggttggctgataaatatcctgtggtccatattggtaagcggtacttaaactccggtggctttatcggctacgctccatacgtgaaccgaattgtacagcagtggaatctgcaggacaacgacgatgatcagctgttctataccaaagtctacattgaccctctgaagagagaagctataaatatcacactggaccacaaatgcaagatttttcagacccttaacggggccgttgatgaagtagtgttgaagtttgaaaacgggaaagctcgcgccaaaaacactttttatgaaacactgcctgtggcgatcaatggaaatggacccactaagatcctcttgaactacttcggaaattacgtgcctaacagctggacacaggacaatggttgcaccttatgcgagtttgatactgtcgacctgagcgcggtggacgttcatcccaatgtgagtattggtgttttcatagaacagcctacgccattccttccacggtttctagacatcctgctgactctggattaccccaaggaagctcttaaattgttcatccataataaggaggtatatcatgagaaagacatcaaggttttcttcgacaaggcaaagcatgaaatcaagacaattaagatagtgggacctgaagaaaatctctcccaagcagaagcgcgcaatatgggaatggacttctgcaggcaggacgaaaaatgcgactattatttctccgtggatgctgacgtggttttgacaaatccgagaaccttgaagatactcattgagcagaaccggaaaatcatagcccctttggtaacgagacatggcaaattgtggagcaatttttggggggccctcagtcccgatggttattatgctcgtagcgaggactacgtggatattgtccaagggaacagagtaggcgtgtggaacgtaccttacatggctaatgtgtacttaatcaaaggaaaaacattaagatccgaaatgaacgaaagaaattattttgtgcgagacaagctggaccccgatatggcactgtgcaggaatgcgagagagatgacactgcagagagagaaagattccccaacaccggagacattccagatgctcagccccccgaaaggagtatttatgtacatatctaaccggcacgaatttggaagattgctcagcaccgccaactacaatacatcccactacaataacgatctgtggcagattttcgagaaccctgtagactggaaagagaagtatataaacagagactattctaagatatttaccgaaaacatcgtggaacaaccttgccccgacgtgttttggttccccattttcagcgagaaggcctgcgatgagctggtggaagaaatggagcactacggcaaatggagcggcgggaaacaccatgacagtaggattagtggaggttacgagaatgttccaactgacgatatacatatgaaacaagtcgacctcgaaaacgtttggctgcattttattcgggagttcatcgcccctgtcacccttaaggttttcgcaggctattatacaaaagggtttgctctgctaaactttgtcgtcaagtactcaccagagagacaacgaagcttgaggccacatcacgacgcgagcacattcactatcaacatcgccctgaataacgtcggcgaggattttcagggaggagggtgcaagtttctaaggtacaactgctctattgaatccccccgcaaaggttggtcatttatgcaccccggcagacttactcacttacacgaagggctgcccgtcaagaatggaactaggtacattgcagtgagttttatcgatccgtag

SEQ ID NO: 249037 - RNA, 2214 nt, synthetic construct
  misc_feature 1..2214: note = Description of Artificial Sequence: Synthetic coding sequence
  source 1..2214: mol_type = other RNA
atgggaggctgcaccgtcaaaccacaactgctgctactggccctggtcttgcacccctggaacccttgcctgggcgcggatagcgagaaaccctccagcattccaaccgataaactgctggtgattacagttgctacaaaagagtctgacggcttccacaggtttatgcagagtgccaaatattttaattacactgtgaaggtccttggtcaaggggaagagtggcgggggggcgatggtatcaatagtattgggggcggacaaaaggtaagactgatgaaagaggtgatggaacactatgcagaccaagacgacctcgttgtgatgttcaccgaatgctttgatgttatctttgccggtggccccgaggaggtccttaagaaatttcaaaaagccaatcataaagtggtatttgccgcggatggaatcctgtggcctgataagcggcttgccgataagtatcctgttgtccacatcggtaaacgctacctgaacagcggcggcttcatcggatacgccccctacgtgaatcgtatcgtgcaacagtggaatttacaagacaacgacgatgatcaactgttttataccaaagtgtacatcgacccgctaaagcgggaagccattaacatcaccctcgatcataaatgtaaaattttccagaccctgaacggagccgtggatgaagtagtgcttaaattcgagaacggcaaagcacgtgcgaaaaacacattttacgaaaccctcccagtcgcgattaatggaaatggccccacaaagattctgctaaattattttggcaattacgtcccaaatagttggacccaagacaacggatgtaccctgtgtgaattcgatactgttgacctgtctgctgttgacgtccatcccaatgtctctatcggagtgttcattgaacagcctacccccttccttccccgtttcctcgatattctcctcaccctcgattaccccaaagaggctctcaagctgttcattcataacaaggaggtgtaccacgaaaaagacataaaggtgttcttcgataaagcgaaacatgagataaagaccatcaagatcgtgggccccgaagaaaatctctcccaggctgaggccaggaacatgggaatggacttttgccggcaggatgaaaaatgcgactattacttttctgtcgacgccgatgttgttttaacaaaccctagaacactaaaaatcctgattgaacagaacaggaaaataatcgccccactggtcacacgacacggcaagctgtggtccaatttttggggggccctctcacccgatggatattatgcacggtctgaggattacgtcgacattgttcaaggtaacagagttggggtctggaatgtaccttacatggcaaatgtgtatctaataaaaggtaaaacacttcgtagcgagatgaatgaacgaaactattttgtccgggataaactggatcctgatatggccctttgtcgcaatgcacgggagatgggagtcttcatgtacatttctaatcgccacgaatttggtcgcctcctgtccaccgctaactataacacctcccattataacaacgatctgtggcaaatttttgagaacccagtcgactggaaggagaagtatattaaccgagactatagcaagatcttcacagagaatattgttgaacagccctgtccagacgtgttttggttcccgattttttcagaaaaagcctgcgatgaacttgtcgaagaaatggagcattatggcaaatggtccggcggtaagcaccacgatagccggatctccggagggtatgagaatgtgccaactgatgacatccacatgaagcaggtggatttagaaaacgtctggctccatttcatccgtgagttcatcgcacccgttacattaaaggttttcgccggttactacactaagggctttgctctgttaaatttcgtcgtgaagtacagtcctgaacgccaaagaagtctccgaccacaccacgacgcctccacctttacaattaacattgccttgaataatgtgggggaggattttcaaggaggaggttgcaagttcttgagatacaattgctccatagaaagccctagaaaaggatggtcattcatgcatccaggccgactcacccatctccatgagggcctccctgtcaaaaatggaacccgttatattgccgtgtcctttatcgacccctag

SEQ ID NO: 249038 - RNA, 1257 nt, synthetic construct
  misc_feature 1..1257: note = Description of Artificial Sequence: Synthetic coding sequence
  source 1..1257: mol_type = other RNA
atgctcgaaaaccacatcctccacaagcgcatttacattctcacattcttctcccagcagatatttatcctctgtcacgcacactttattttcttctttactgttagagacttttgtcgccaggacgagaagtgcgattattacttttcggtggatgcagatgttgtcctgaccaaccctagaaccctaaaaattttgattgaacagaaccgcaaaattatcgccccactcgttactagacatggcaaactgtggagcaatttttggggagcattaagccctgacggatactatgccagaagcgaggattacgtcgacatagttcagggaaacagagtcggcgtgtggaacgtaccgtacatggccaatgtatacttgattaaaggaaagacccttagaagcgaaatgaatgagaggaactacttcgtaagagacaagttagatccagatatggccctttgtagaaatgccagagaaatgacgctacaaagagagaaggattccccaaccccagagacattccagatgctgtccccacccaagggagtatttatgtatatcagtaaccgtcacgagttcggacggttacttagcacagccaattacaatacaagtcattacaacaacgatctgtggcaaatctttgaaaaccctgtggactggaaggaaaagtatattaaccgagattactccaagatattcaccgaaaacattgttgagcagccttgccccgacgtcttctggttcccaatattctccgaaaaggcttgcgatgagctggtggaagagatggaacattacggcaagtggtctggcggaaagcatcatgatagcagaattagcgggggatatgaaaacgttcctactgacgacattcacatgaaacaagtcgacttggaaaacgtctggttacacttcatccgcgaatttatcgctccagtgacactgaaagtctttgctggctattatacaaaaggctttgctcttctcaatttcgtcgtcaagtattccccagagaggcaaaggagtcttaggccacatcatgatgcgtccacttttactatcaatatcgccctgaacaacgtgggtgaagatttccaaggcggaggatgtaaatttttaaggtacaactgctccattgagagcccacggaagggctggtcctttatgcaccctggcagactgactcatcttcacgaaggcctacctgtaaagaatggaacccgatatatcgctgtgagcttcattgacccatag

SEQ ID NO: 249039 - RNA, 2112 nt, synthetic construct
  misc_feature 1..2112: note = Description of Artificial Sequence: Synthetic coding sequence
  source 1..2112: mol_type = other RNA
atgcaatcagctaagtacttcaactatacagtcaaggtgctgggtcagggagaagagtggcgaggtggcgatggtatcaactccattgggggtgggcaaaaggtgcgattaatgaaagaggttatggagcactatgctgatcaggatgatttggtagtcatgtttacagaatgtttcgatgtgatttttgccggtggccccgaagaagttttgaaaaaatttcagaaggctaaccacaaggtcgtctttgctgcagacggaatcctgtggcccgataagagattagccgacaaatatccagtggtgcacatcggaaagcgatacctgaactccggcggcttcataggatacgccccctacgtgaacagaatcgtacaacagtggaacctgcaggataatgacgacgatcaactcttctataccaaagtgtatatcgacccattaaagagagaagctatcaacataacacttgaccacaagtgcaaaatttttcagacactgaacggcgcggtagatgaggtggttttgaagttcgagaacgggaaagcacgagctaagaacacattttacgagaccctgcctgtagctatcaacgggaatggacccaccaagattcttctgaactactttggcaactacgttcctaactcttggacccaggacaatggctgtactttatgtgagtttgatactgtggatcttagcgctgtagatgtgcaccctaacgtctcaatcggtgtgtttattgaacagccaaccccttttctgcccagattcctcgatattttgctcacccttgactatcctaaggaagccctcaagctgtttattcataacaaagaagtctatcacgagaaggatataaaggtattctttgataaagcaaagcacgagattaaaaccattaagatagtcggaccagaagaaaatctctcacaggctgaggcgcgtaatatgggtatggacttttgccggcaggacgaaaaatgcgattactatttttcagtcgacgctgatgttgtcctcacaaatccccggaccctaaagatcctcattgaacagaacaggaagataattgctcccctggtgaccagacacggaaaactctggagtaatttttggggggcacttagccccgacggatattatgcaaggagtgaagattatgtggacatcgtgcaaggaaaccgagtgggtgtgtggaatgtcccttatatggccaacgtttacctcatcaaaggtaagaccttgcgctcagagatgaatgagcgaaactacttcgtacgggataaactggatccggatatggccctgtgtagaaacgccagggaaatgacactgcagcgcgaaaaagatagtccaacaccagaaaccttccagatgctgagccctccaaaaggtgtgtttatgtatatttccaacaggcatgaattcggtcgcctcctatcaacagcgaattacaataccagccactacaacaacgacctatggcagatctttgagaatccggtcgattggaaggagaagtatatcaatcgagactatagcaagatttttacggaaaatattgtcgagcagccctgcccagacgtgttttggtttccaatcttttcagaaaaggcatgtgacgagttagtggaggaaatggaacattatggcaaatggtcaggcgggaagcatcatgactcaagaatttctggaggttacgagaacgtaccaactgacgacattcacatgaaacaagtggatctagaaaatgtgtggttacattttattagggaatttatagctcctgttaccctgaaggtgttcgccggttattacactaaaggatttgctctgctaaatttcgtggttaagtactctcccgaaaggcagcgatccctccgacctcaccacgatgccagtacatttacaataaacattgctcttaataatgttggggaggatttccaaggtggcggctgtaagtttttgcgttataactgctccatcgagtcacctcgcaaaggctggagtttcatgcaccccggtagactgacccacttgcacgaaggattgcccgttaaaaacggcactcgatatatcgccgtgtcctttatcgacccttag

SEQ ID NO: 249040 - RNA, 1608 nt, synthetic construct
  misc_feature 1..1608: note = Description of Artificial Sequence: Synthetic coding sequence
  source 1..1608: mol_type = other RNA
atgaaactgtgggtgagtgcactgctgatggcatggttcggcgtcctttcatgcgtgcaggctgagttttttacaagtatagggcatatgaccgacttgatttatgctgagaaagagctcgttcagagtcttaaggagtacatcctggtcgaggaagctaaactctctaagatcaagtcatgggcaaacaaaatggaggctctcacctctaaatccgcagctgatgcagagggctacctggcgcaccccgttaacgcttacaaattggtcaagagattaaacaccgattggcccgctttggaggacctcgtgctccaagactctgcagccggattcatcgcaaatctgtccgtgcagaggcagttttttcccactgacgaagatgaaatcggcgcagccaaagcccttatgagactgcaagatacctacagattggaccccggaactatatcacggggcgaactgcccggcacaaagtatcaggctatgctctccgtagacgactgctttggtatgggtagatcagcatataacgaaggagattactaccataccgttctatggatggaacaagtactcaagcaactagacgccggtgaggaagccacaaccacaaagtcccaagtgttagactatctctcctacgccgtcttccagttaggagacctgcaccgagccttggagctgactcgtcgcctgctaagcctggatccatcacacgagcgcgctggcggaaacctgaggtacttcgagcaactgcttgaagaagagagagaaaaaacacttaccaaccagactgaagccgaactcgctacaccagagggaatctatgaacggcctgtggattatttacccgaacgtgatgtgtatgaatccctgtgcagaggtgaaggtgtcaagctaaccccccgtagacagaaacgcctcttctgtcggtaccatcacggaaaccgcgctccacagctgctgattgctccttttaaggaggaagacgagtgggattcccctcatattgtcaggtactatgatgtcatgtcagatgaagagatcgagcgcattaaggagatcgccaagcccaagctggcccgagcaacagttagggaccctaaaaccggagtactgacagtagcatcatacagggtgagtaaatcaagctggctggaagaagacgatgatccggttgtcgcccgcgtaaatcgccggatgcagcatataaccggcctgacagtgaagacagccgaacttctccaggtagcaaattacggcgttggcgggcaatatgaacctcatttcgacttttctagaaatgatgaaagggatacattcaagcatcttggaaccgggaatagggtcgccacatttcttaattatatgagtgatgtcgaagctggtggcgccaccgtgtttcccgacctgggcgcggctatatggcccaaaaaaggcacagcagtattctggtataatttattacggagtggcgagggagattacaggacacgccatgccgcctgtccagtgctggtgggctgtaagtgggttagtaataagtggttccatgaacgcggacaggagtttcttcgaccttgcggatcaactgaagtggattag

SEQ ID NO: 249041 - RNA, 1635 nt, synthetic construct
  misc_feature 1..1635: note = Description of Artificial Sequence: Synthetic coding sequence
  source 1..1635: mol_type = other RNA
atgggccctggtgcaagactggccgcattgctggctgtgctggccctggggactggtgatcccgaaagagccgcagcacggggagatacgttttcagccctaacctcagtggccagagcactcgcgccagaaagaagacttcttggcctgttgagacggtatctgcgcggcgaagaagctcgcctccgcgatctgacaagattctatgataaagtcctctcccttcacgaggatagcacaacgcctgttgccaacccattactcgccttcacactgatcaagcggctgcagagcgattggaggaacgttgtgcatagcctcgaagctagcgaaaacataagagccctgaaggacggatacgaaaaggtcgaacaggatttgccagcatttgaagacctggagggtgccgctcgcgccctgatgcggctgcaggatgtctatatgttgaatgtgaaaggactagcacgtggagtgtttcaaagggttacagggtctgccattactgacctgtatagtcctaagagactgttcagcctgactggggatgactgttttcaggtcggcaaggtagcctatgacatgggggattattatcacgctattccatggctagaggaggctgttagcctgtttcgaggatcttatggcgaatggaaaactgaggatgaagcatccctcgaggatgcgcttgatcacctggcatttgcttacttcagagctggcaacgtttcatgtgcgctcagcctctctcgtgaattccttctttattccccagacaacaaacgcatggcaagaaacgttctgaaatacgagcgtctccttgctgaatcgcccaaccatgtcgttgcagaggcggtcatacaaaggcccaatatcccgcaccttcaaacccgagacacctatgaagggttgtgtcaaaccctaggcagccaacctaccctgtatcagataccctccctgtactgttcgtacgaaacaaactctaacgcatacctgttgttgcagcccataagaaaagaagtgatccacctagagccttacatagccttataccacgatttcgtctcagattccgaagcccagaagataagagagctggcggagccatggcttcagcggtctgtcgtcgctagcggggaaaaacaactccaggtggagtatagaatttctaagtcagcctggttgaaagacactgttgatccgaagctggtgaccttgaatcatcggatcgctgcactgaccggattggacgtgcgaccaccatacgctgaatatctccaagtcgtgaattacggcatcggcggacactacgaaccccactttgatcacgctacatccccaagcagccctttatatagaatgaaaagcggaaaccgcgtggccactttcatgatctacctcagctcagtggaggcaggaggcgcgacggcgtttatctatgcaaacctaagcgtgccagttgtccgaaacgccgccctgttttggtggaacttacatagatctggagaaggtgattctgataccctacatgctggatgtccagttctcgtcggcgacaaatgggtagcaaacaagtggatacacgaatacggccaagaattccggcgcccctgtagtagctctcctgaggactag

SEQ ID NO: 249042 - RNA, 1815 nt, synthetic construct
  misc_feature 1..1815: note = Description of Artificial Sequence: Synthetic coding sequence
  source 1..1815: mol_type = other RNA
atgggcccaggcgcccgccttgctgcactgctggccgtgctagcacttggtacgggggatcctgaaagagctgccgccagaggagacaccttttccgcactgacttccgttgctcgagcccttgcgcccgaaaggcgcttgctaggccttctgcgcaggtatctgagaggagaagaagccagattacgtgatctgactcggttctacgacaaagttctcagcctgcacgaagactctaccactccagtcgccaaccctttactggcttttacgctgatcaaacggcttcagtccgactggagaaacgtggtgcatagcttggaggcatccgaaaacatcagagcattgaaagacgggtacgaaaaagtggagcaagatttaccggctttcgaggacttagagggagccgcacgggcacttatgagacttcaagacgtgtacatgcttaatgtgaaagggctggcccggggagtgttccaaagagtgacaggcagtgccatcactgacctctacagcccaaaacgactgttttctttaaccggtgatgactgtttccaagtcggaaaggtggcatacgacatgggcgactattatcacgccatcccatggctggaggaggccgtgtcactgtttcgagggagctatggagaatggaaaacagaagacgaagcgtccttggaagacgctcttgaccaccttgccttcgcctactttcgcgccggaaatgttagctgcgctctgagcctgtctagagagtttctcttgtactcacccgataacaagcgaatggcccggaacgtcctgaaatatgaacgactccttgctgagagccccaaccacgtggtagccgaggcggtcatccagaggccgaatattccccacttacagacacgagacacttacgaaggcctatgtcagacgctgggaagccaaccaacgctgtatcagatcccatccttgtattgctcctacgaaaccaattccaacgcctacctacttttgcagccaattagaaaggaagtgattcatttagaaccatacatagccctctatcatgactttgtgtctgatagcgaagcacaaaagattagggaactcgcagagccgtggctgcagcgctctgtcgttgcgtccggtgaaaagcaattacaagtggaatacaggattagtaagtcagcctggctcaaagacactgttgaccccaagctggtcacgcttaatcatcgaatcgccgccctcaccgggctagatgtgcgccctccctatgccgagtatctgcaggtggtcaattacggcatcggaggacactacgaaccccactttgaccatgccacctcaccttcaagtccactgtatagaatgaaaagcggtaatagagtagcgacattcatgatctacctgtccagcgtcgaagccgggggagctactgctttcatctacgcaaacctgtccgtgccagttgtgcggcattgttttggaggcacatgtactggggttgtgaagggcaccgttactcactttatgctagccgttctgtcttggtgggaaatatccgggtggccaacatcaggatatatgtcaatggaccggaattccgctgatcccgctgcaccagccctcaagactgaacttttggcagagcgttcatggtggtctccggtagcgttccagcgctcccaggaacctaaagctggagttggtgaagagaaagctgaacaaccccctggcaggaggccttgtcagctgtgtctatgcctagccaaccaaagacaggggcgaggctgttatcaaggaacacttaggatgtacatatag

SEQ ID NO: 249043 - RNA, 417 nt, synthetic construct
  misc_feature 1..417: note = Description of Artificial Sequence: Synthetic coding sequence
  source 1..417: mol_type = other RNA
aatataagcctgtgtcccgaaatttgctttcagaaaattgagtcacaagtttacttcgttagagtggatagtggaattcagccaggctctgatatctcgatttactacgaccccatgataagcaaactaataacttacgggtctgaccgcactgaggctcttaaaaggatggccgacgcgctcgataattacgtaataaggggggtcacccataatatagcactgcttagagaagtgattattaattctagattcgtgaagggcgatatatctactaaatttttatcagacgtctatcccgacgggtttaaaggacacatgctcactaagtcagaaaaaaatcagctcctagctatcgcctcttccctgtttgttgcattccaattgagagcccagcatttccaggagaacagctag

SEQ ID NO: 249044 - RNA, 363 nt, synthetic construct
  misc_feature 1..363: note = Description of Artificial Sequence: Synthetic coding sequence
  source 1..363: mol_type = other RNA
atgtccatccaatttcttgggactgtgtacaaggtcaatattctcactagacttgcagccgaattgaacaaatttatgcttgagaaagttacggaggacacatctagcgtgctgcgaagtccaatgcctggagtggtggtggccgtttctgttaagcctggcgatgcagcgacaagtagcctgagcgttgagatttgcctgttttggaccttccaggttgcggagggccaggagatttgtgtgattgaagcaatgaaaatgcagaatagcatgactgctggcaagactggaaccgtcaaatcagtgcactgtcaggctggggacacagtcggggaaggcgatttgttagtagaactcgagtag

SEQ ID NO: 249045 - RNA, 2046 nt, synthetic construct
  misc_feature 1..2046: note = Description of Artificial Sequence: Synthetic coding sequence
  source 1..2046: mol_type = other RNA
atggcaggcttctgggttggtacagcacccctagtggccgcaggtagacgcgggaggtggcctcctcagcaactcatgctatctgcagctctccggacactgaagcatgtactgtactacagccgacagtgcctgatggtttctcggaacctcggcagtgtggggtacgatccaaatgagaagacctttgataagatcctggtggccaatcgaggtgagattgcctgtagagtgattagaacatgcaagaagatgggaattaaaacggtggctattcacagcgacgttgacgcttctagcgtgcacgtaaagatggcggacgaagccgtgtgcgtgggacctgcccctacatcgaaatcttatttaaatatggatgcaatcatggaagctatcaagaagacgcgcgctcaggccgttcatcccggatacggtttcctctccgagaacaaagaatttgcccgatgcctggccgccgaagatgttgtatttattggccccgatacacatgccatacaggccatgggtgataagatcgagtcgaagctgctggccaaaaaggccgaggtaaacaccattccaggttttgatggagtcgttaaagacgccgaggaggcagtgagaattgctcgggagattggctaccctgtcatgattaaggccagcgccggcgggggggggaagggcatgcgtatagcttgggatgacgaggaaacacgtgacgggtttaggctgagttcacaggaagccgcatcctctttcggggacgaccggctgctgattgagaaatttatagacaaccccagacacatcgagattcaggtactcggggataaacatggcaatgcgttgtggttaaatgagagggaatgtagtatacagaggaggaaccagaaggtagtggaggaggctcctagcatattccttgatgccgaaacccgcagagcgatgggcgaacaggcagtggccctcgcacgcgctgtcaagtattcatctgctggtaccgtcgagttccttgtagacagcaaaaaaaacttttatttcctagagatgaacacaaggctgcaagtggaacatccagtcaccgaatgcattaccgggctcgacctggtacaagagatgatccgtgtcgcgaaaggatatcccctgaggcataagcaagctgacatcagaattaatggctgggccgtggagtgccgagtctatgctgaggatccttataagagtttcggacttccttccattggacgactgtcccagtaccaggagccacttcatttgcctggtgtccgggtcgactcggggattcagcccggctccgacatctcaatttactatgaccctatgatatcaaaactaatcacttatgggagcgataggaccgaagccctgaaaagaatggctgacgcattagataattatgtgattcggggcgtgacacataacattgcactgctgagagaggtcattataaatagtcgtttcgtcaagggcgacatctccaccaaattcttgagcgatgtgtacccagacggattcaaagggcacatgcttacaaaatcagagaagaatcagctccttgccattgctagcagcctcttcgtggcttttcagcttagagctcagcactttcaagaaaattccagaatgcctgttataaagccggatatcgccaattgggaactgagtgtcaagttacatgacaaggtgcataccgtagtagcctcaaacaacggaagtgtgttcagcgtggaagtggatggcagcaaattgaatgtcacttcaacatggaatttagcctcccctcttctgtccgtgagcgttgatggcacacagcgaacggttcaatgtttatcgcgagaagccggtggcaatatgagcatccaattcttggggaccgtggtggcggaggggcaggaaatctgtgtgatcgaggctatgaagatgcagaactctatgacagccgggaaaacaggaactgtaaagtcggtccactgccaggctggtgataccgtaggagagggcgacttgctagtggagctggaatag

SEQ ID NO: 249046 - RNA, 2187 nt, synthetic construct
  misc_feature 1..2187: note = Description of Artificial Sequence: Synthetic coding sequence
  source 1..2187: mol_type = other RNA
atggcaggattctgggtggggaccgccccactggtggcggccggtcgacggggtagatggccaccccagcaactcatgctaagtgcagctttacggacattgaagcacgtgctctactattcaaggcagtgcctgatggtatcacgaaacctcggcagtgtaggatatgatcccaacgaaaaaacatttgataaaatcttggtggcaaacagaggagagatcgcctgcagggtcatccgaacttgtaagaagatgggcatcaaaactgtcgccatacactctgatgttgatgccagcagcgttcacgttaaaatggccgacgaagcagtgtgcgtgggacccgctccaacctccaagagttacctgaatatggacgctatcatggaggccataaaaaaaacaagagctcaggccgtacaccccggatatggttttctcagcgagaataaggagtttgcgaggtgcctggccgccgaagatgtcgtgtttattggtccagatactcatgccatccaggccatgggagataaaattgagtctaagttattagctaaaaaagccgaggttaacaccatcccgggcttcgacggggtagtaaaagacgccgaagaagctgtgagaatagcaagggagattggctatcctgtgatgatcaaagcctcagctggaggcggcggcaagggtatgcgaattgcatgggacgacgaagaaacaagggacgggttcagactaagtagtcaggaggcagcctcatcctttggcgatgaccgtctgcttattgagaagttcatcgataatccccgacatatcgaaatacaggtactgggcgacaaacatggaaatgccttatggcttaacgaacgcgagtgtagcatacagcgtaggaatcagaaagttgtggaagaggccccatcaatctttctcgatgctgagactcgccgagctatgggggagcaggccgtggcccttgcccgagcagtcaagtattcgagtgccggaaccgtggagttcctcgtggattcaaaaaaaaacttctactttctggaaatgaatacacgcctgcaagtcgagcaccccgtcaccgagtgtattactgggttggatctggttcaggaaatgattagagtggcaaaagggtaccccctcagacacaaacaggctgacatcaggattaacggatgggcagttgaatgtagggtatacgccgaagatccatacaagagtttcgggctgccatctataggacgtctttctcaataccaagagcccctgcacctgcctggcgtacgggtcgacagtggaatccagcctggctccgacatctccatttactatgatccaatgattagcaaattgatcacttacgggtcggacaggaccgaagcattaaagagaatggccgatgcccttgataactacgtcatcagaggcgtgacacacaacattgctttgcttagagaggtgataatcaatagtcgttttgtgaagggggacatctccaccaaatttcttagtgatgtgtatccggacggattcaagggccatatgctgaccaagagcgagaaaaatcaactccttgcaatcgcttcatccctgtttgtggcttttcagctccgcgctcagcatttccaggaaaacagtagaatgccagttatcaagcccgacatcgcaaactgggaattgtctgtcaaactgcatgataaggtgcacaccgtggttgcttctaataatggttctgtattctccgtggaggttgacgggtctaaactcaatgtcacatctacatggaacctagcttcccctttactgagcgtgtctgtggacggaacacagaggactgtgcaatgccttagcagagaggcagggggaaacatgagtatccagtttctgggcactgtgtacaaagtcaacattcttacacgtctggccgctgagctgaataagtttatgttagagaaagtcaccgaggatacgtcatctgtcctgaggtccccaatgcctggcgtggtcgttgccgtaagtgttaagcccggagatgcagtggcagaagggcaggagatttgtgtgatagaagccatgaagatgcagaatagtatgacagcgggaaagacgggaacagtgaaatctgtgcattgccaggcaggcgatacagttggtgaaggggatctcttggtagagcttgagtag

SEQ ID NO: 249047 - RNA, 2109 nt, synthetic construct
  misc_feature 1..2109: note = Description of Artificial Sequence: Synthetic coding sequence
  source 1..2109: mol_type = other RNA
atggctgggttctgggtgggtacagctcctctcgtggcggctgggcggagaggcagatggccgccacagcagttgatgttatccgccgccttgcgcactctcaaaacatttgataaaatactggttgcgaaccggggcgaaattgcatgcagggtaatcaggacttgtaaaaagatgggcatcaagaccgtagctattcattccgatgtcgacgcttcttccgtgcacgtgaaaatggctgacgaggcagtctgtgtggggcctgcaccaacgtctaaaagttacctgaacatggatgctataatggaagctataaaaaagacaagagctcaggcagtccatccaggatacggttttctgagcgagaacaaggaattcgcccggtgcctcgccgcggaggatgttgtatttattggccctgatacccacgccatccaggcaatgggagataaaatcgagtcaaaattgctggcaaaaaaagccgaggtcaacacgatacctggcttcgacggagttgtgaaggacgcagaagaggccgtgagaatagcccgagagataggttaccctgtaatgatcaaagcctcggccgggggggggggtaaaggaatgcgaattgcatgggatgatgaagagacaagggacgggttcagactgagttcacaggaagccgcgagcagctttggagatgaccgtctgcttatagaaaaatttattgacaaccccaggcatatcgagatacaagtgctgggggataaacatggcaacgctctctggcttaatgagcgggagtgtagtatacagagacgcaatcagaaggtcgtggaagaagccccttccattttcttggatgcagaaacaagaagggcaatgggcgagcaggcagtcgcgctggccagggccgtaaaatattcctctgcgggcacggttgaattcctcgtggacagcaagaagaacttttactttctggaaatgaatacacggctacaggttgaacatccagtgacagagtgcatcactggcctggacctcgtgcaagagatgataagggtagcaaagggatatccactgagacacaaacaggctgacattagaataaatggatgggcagtggaatgccgcgtgtatgccgaggacccatacaagtcatttggacttccttctatcggtagattatcccagtatcaagagcccctccatctgcccggcgttagggtagactccggtatccaacctggttccgatataagcatatactatgatcccatgataagcaaactaataacgtacgggagtgatcgtacagaggccctgaaacgcatggctgacgcccttgataattacgtgatccgtggtgtcactcacaatattgccctgctccgtgaagtgattatcaattctagatttgtaaaaggggacatctctaccaagttcttatctgacgtatacccagacgggttcaagggacacatgctcaccaagagcgaaaaaaaccaactcttagcaattgcctcaagcctttttgtcgcattccaactgcgtgcccagcactttcaggaaaacagtagaatgcctgttattaaaccagacatagccaattgggagctgagcgttaaactgcacgataaagtacacactgtggttgcctctaacaatggctcggtttttagcgttgaggtagatggaagcaaattgaacgtgactagtacatggaatttagcgtcacctttactttccgtgagcgtcgacggtacgcaacggaccgtacagtgtctatctcgagaggcaggcggtaatatgtcaattcagtttttaggaaccgtttacaaagtcaatattctcacaaggcttgctgcagagctcaacaagttcatgctggagaaagttacagaagacacaagctccgtactgagaagtcccatgcccggggtggtggtcgccgtctcagtgaaaccaggggacgccgttgcagaaggacaagagatttgtgtgatcgaggctatgaaaatgcagaacagcatgactgccggtaaaacaggcaccgtgaagagcgtacactgccaggctggggacacagtgggggaaggcgacctgctggtggagctggaatag

SEQ ID NO: 249048 - RNA, 255 nt, synthetic construct; identical to SEQ ID NO: 248442
  misc_feature 1..255: note = Description of Artificial Sequence: Synthetic coding sequence
  source 1..255: mol_type = other RNA

SEQ ID NO: 249049 - RNA, 336 nt, synthetic construct
  misc_feature 1..336: note = Description of Artificial Sequence: Synthetic coding sequence
  source 1..336: mol_type = other RNA
tataaagttaatattcttacacgactggccgctgagctcaataagtttatgctagaaaaagtgacagaagatacgtcaagcgtcctcagatcccctatgcctggtgtagtcgttgcggttagcgtaaaacccggagacgcagcaacttcctccctatctgtcgagatctgtctgttttggacttttcaagtagcggaaggacaggaaatttgcgtgatcgaggcgatgaagatgcagaatagcatgacagcgggcaagacgggaaccgtgaaatcagtgcattgccaggcaggggacaccgtgggagagggcgatctgttggtggagttggaatag

SEQ ID NO: 249050 - RNA, 405 nt, synthetic construct
  misc_feature 1..405: note = Description of Artificial Sequence: Synthetic coding sequence
  source 1..405: mol_type = other RNA
tagatgccagtgataaagccagacattgctaactgggaattatcggttaaattacacgacaaggtccacacagtggtggcatctaataatggatctgtcttctccgtcgaagtggatggctccaaacttaatgtgacaagtacttggaacctcgcctcacctctactcagtgtgtcagtggatggaactcagagaacagtccagtgcctgtctagggaggccggagggaatatgagtattcagttcctcggcacagtggtcgccgaaggtcaagaaatttgcgtaattgaagcaatgaagatgcaaaactccatgaccgcaggcaagaccggaacagttaaaagtgtgcattgccaggccggagacacagtcggggaaggagatttactcgtagagcttgaatag

SEQ ID NO: 249051 - RNA, 309 nt, synthetic construct
  misc_feature 1..309: note = Description of Artificial Sequence: Synthetic coding sequence
  source 1..309: mol_type = other RNA
tcagatgtttatcccgacggtttcaaaggccacatgctgaccaaaagcgaaaaaaaccagttgctggcaatcgcatcttcactgttcgttgccttccagcttagagcacagcattttcaggagaattcgcggatgccagttataaagccagatatagcgaattgggaactgtctgttaagctgcatgacaaagtacacactgtggtggcgtccaacaacggttccgttttttcagtggaggtggatggatccaaactgaacgtcacttcaacatggaacttatttgctctcattgtttgtcagcgatag

SEQ ID NO: 249052 - RNA, 483 nt, synthetic construct
  misc_feature 1..483: note = Description of Artificial Sequence: Synthetic coding sequence
  source 1..483: mol_type = other RNA
atggcaacccatcacaccctttggatgggcttagctttgctgggagtgcttggggatttgcaggcagcccccgaagcccaggtgagcgtgcagcctaactttcaacaggacaagttcctcggtcgatggttctccgctggactggcctccaacagcagctggctcagagaaaagaaggccgccctttcgatgtgtaaatctgtagtcgcccccgccactgacggtggtttaaacctgacgagtaccttcctgaggaagaatcagtgcgagactaggactatgctcttgcaacccgctgggagcctcggctcatattcataccgttccccaagagagtggggactgcaccgaccaccaggcccttccctaggagcaaccttggccggtacaaccttaggtcaaccccccgctgcagaaatccatggagttggaggcgacggttgcccaacatccgtcagaggaaagggccaggcatgggcatag

SEQ ID NO: 249053 - RNA, 573 nt, synthetic construct
  misc_feature 1..573: note = Description of Artificial Sequence: Synthetic coding sequence
  source 1..573: mol_type = other RNA
atggccacacatcacactctttggatgggattggctttactcggggtcctcggggaccttcaggcagcccctgaagcgcaggttagcgttcaaccaaattttcagcaggataagtttctaggacggtggttcagcgcaggccttgcatccaatagttcatggctgagagaaaagaaagcagccctttctatgtgtaagagtgttgtcgccccggctacagatggcggactgaatctgactagtaccttcctgaggaaaaatcagtgtgagactcggacaatgctacttcagccagcaggctcactgggctcatactcatacagatcgccacactggggctctacctatagcgtgagcgttgtcgaaaccgattacgaccagtacgccctcctttattcccaaggcagcaaaggccctggcgaagacttccggatggcaactctctactctcggacacaaacaccgcgagcagagttaaaagaaaagtttacagcgttttgtaaagcacagggatttaccgaggacaccattgtgtttctgcctcagacagacaaatgcatgaccgagcagtag

SEQ ID NO: 249054 - RNA, 189 nt, synthetic construct; identical to SEQ ID NO: 248448
  misc_feature 1..189: note = Description of Artificial Sequence: Synthetic coding sequence
  source 1..189: mol_type = other RNA

SEQ ID NO: 249055 - RNA, 642 nt, synthetic construct
  misc_feature 1..642: note = Description of Artificial Sequence: Synthetic coding sequence
  source 1..642: mol_type = other RNA
tagctgaggggaggtgggcagtttctaggaaggggcgtgcgcggtgtggccgcgagagggattggacggggagggggcgcggggttagaaacaggcggagtggatggccggggcgcacctgcagggcgcaggagatgggtgcgcagagttctggcagatgcgggcggcggacgaagtccacaatttttgggaagatggtttagcgctggcctggcctcgaatagcagctggctgcgggagaagaaggcggctctgtccatgtgtaaatccgtggtggcgccagctacagacggcgggttgaatctgaccagcacattcctgcgaaagaatcagtgcgagacccgcaccatgctactacagcccgccggcagtttgggctcttacagctacaggtccccgcattggggctccacatattccgtttccgtcgtcgaaactgactacgatcaatatgccctcctgtactcccaaggatccaagggaccaggcgaagactttcgcatggccacattatattcccggactcagactccaagagcagagttaaaagagaaattcaccgcattttgtaaagcgcaaggcttcacagaggacaccatcgtcttccttccccagaccgataagtgtatgaccgaacaatag

SEQ ID NO: 249056 - RNA, 588 nt, synthetic construct
  misc_feature 1..588: note = Description of Artificial Sequence: Synthetic coding sequence
  source 1..588: mol_type = other RNA
atggcaactcaccataccctgtggatgggtttagctctcctgggagtattgggtgacctacaggcagcaccagaagcccaagttagcgtacagccgaacttccagcaggataaatttctcgggcggtggttcagcgccggactggccagtaactcctcgtggcttcgggaaaaaaaggcagcactcagtatgtgtaagtccgtcgtagcgcccgccaccgatggaggcctgaatttgacgtctaccttcctgcgaaaaaaccaatgcgagaccagaacaatgttactgcagcctgcaggaagtcttggtagctattcatataggagcccaagagagtggggattgcaccgacctccaggcccttccttgggtgcaactctggccggcacaacgttggggcaaccaccagccgcagaaattcatggcgtgggcgactggggcagcacttacagtgtctccgtggtcgaaactgactacgaccaatatgctttattatatagccaaggatccaaaggacccggggaggattttaggatggcaactctgtattccagaacccaaactccacgcgctgagttgaaagagtag

SEQ ID NO: 249057 - RNA, 573 nt, synthetic construct
  misc_feature 1..573: note = Description of Artificial Sequence: Synthetic coding sequence
  source 1..573: mol_type = other RNA
atggccactcaccataccctctggatgggcctagcccttctcggagttctgggcgacctgcaagccgcacccgaggcgcaggtgtcagttcagccaaacttccagcaagataaatttctgggaagatggttctccgccgggctcgcctctaactcttcatggctcagggagaagaaggccgctctcagtatgtgcaagtctgtcgtagcaccagccaccgatggcggcctaaacctgacttctacattcctacgcaagaatcagtgcgaaacaagaacaatgctcctccaacctgcaggatcactgggctcctattcctatcgctcgccacattggggaagcacttactcggtatctgtcgttgagaccgactacgaccaatatgccctcctgtattcgcagggcagtaaaggtcctggcgaagactttcgcatggccaccctgtactcacgtacccagacccctcgagcagaattaaaggagaagttcactgcattttgcaaggcacaagggttcaccgaggatacgatcgttttcctgcctcagactgataaatgtatgacagaacaatag

SEQ ID NO: 249058 - RNA, 489 nt, synthetic construct
  misc_feature 1..489: note = Description of Artificial Sequence: Synthetic coding sequence
  source 1..489: mol_type = other RNA
atgaagggcttcaccgccacactattcctgtggaccctgatattcccatcttgctctggcggaggcggcggcaaagcttggccaacacatgttgtttgctcagattccggattggaggtgctctaccaaagttgcgatccgctccaagacttcggattttccgttgaaaagtgttccaaacagttgaaatctaatatcaacatcagatttgggattattctcagagaggatattaaggaactttttttggatttggctttgatgtcacagggctcatccgtacttaacttctcttacccgatatgcgaggctgctctacccaaattctcattttgcggacgacgaaaaggcgaacagatttattatgcaggtcctgttaacaaccccgaattcacaatcccgcaaggagagtaccaagtcttacttgaactatacactgagaagaggagtacagttgcatgcgcaaacgcaaccattatgtgttcttag

SEQ ID NO: 249059 - RNA, 945 nt, synthetic construct
  misc_feature 1..945: note = Description of Artificial Sequence: Synthetic coding sequence
  source 1..945: mol_type = other RNA
atgggcgcaaggggtgcactcctcttggccctgctcctggctcgcgcgggactgaggaaacccgagtcacaagaggctgcccctctaagtggcccttgcggcagaagagtgataacttcccgtattgtgggcggagaggacgcggaactgggcagatggccttggcagggaagtctgagactatgggattcacacgtctgcggcgtgtccctcttaagtcatcgatgggctcttacggctgcacattgctttgaaacctacagcgatctttcagatccatcgggctggatggtacagttcggacaactgacaagcatgcccagcttttggtctctccaggcttactatacgcgttatttcgtgagtaacatctacctcagtccgcgctatctcggcaatagtccgtatgacatagcactggtcaagctttctgccccagtgacctataccaaacatattcaaccaatctgcctccaagcttctacctttgagttcgagaacagaacagactgctgggtgacaggatggggctatattaaggaagacgaagctctgcccagcccacacacccttcaagaagttcaagtggccataatcaacaactcaatgtgtaatcacttgttcctgaaatactcctttagaaaagatatttttggcgatatggtttgtgctggaaatgctcagggaggaaaagatgcctgtttcggtgacagcggggggccgttggcatgcaacaagaacgggttgtggtaccaaattggcgtggtctcctggggggttggctgcggtagacctaacaggcctggcgtatataccaatatttcacaccattttgagtggatccagaagttgatggcacaaagcggtatgagtcagccagatccatcatggcctctcctctttttccccctgttgtgggctcttcctcttttaggtcccgtctag

SEQ ID NO: 249060 - RNA, 954 nt, synthetic construct
  misc_feature 1..954: note = Description of Artificial Sequence: Synthetic coding sequence
  source 1..954: mol_type = other RNA
atggtggtttcaggggctccacccgccttgggcggaggatgtctgggaacttttacatcactgctgctccttgcatcaacagctatccttaatgcggctaggataccggtgccgcctgcatgtgggaaacctcaacagttaaatagagtcgtcgggggcgaagacagtaccgattctgaatggccatggattgtgagtatccaaaaaaatgggacccaccactgcgccggctccctacttactagccgatgggtcattactgccgcccactgctttaaggacaatttgaataaaccgtacctgttttctgtcttgcttggtgcctggcagctgggtaatcccgggtcccgctcgcagaaagttggcgtcgcatgggttgaacctcacccagtctactcatggaaggaaggtgcgtgcgctgacattgcattggttaggttagagcgctctattcaattctctgaaagggtcctgcccatatgtttgcctgacgcttctattcacctccccccaaatacacactgttggatctccggatgggggtctatccaggacggagtgcctctgccccacccccagacattacaaaagctgaaagttccaatcattgatagcgaagtgtgttcccatttgtactggcggggagcgggtcagggtcccatcaccgaggatatgctgtgcgccggatacctggaaggggaaagagacgcctgtctgggagatagtggaggaccactgatgtgccaggtcgacggagcttggctcctggccggtatcataagttggggagaaggttgtgccgaaagaaaccgtccaggcgtgtacatctctctgagcgctcatagaagctgggtggaaaagatcgtccagggggtgcagttacgaggaagggcacagggcggaggtgctcttcgcgcaccgagccaggggagtggagctgctgctagaagttag

SEQ ID NO: 249061 - RNA, 1257 nt, synthetic construct
  misc_feature 1..1257: note = Description of Artificial Sequence: Synthetic coding sequence
  source 1..1257: mol_type = other RNA
atggaagagatcggaattctggtcgagaaagcacaagacgaaatccccgctctttctgtgtctcggccccaaacaggcttgtcttttttaggccccgaacctgaagatctcgaagatctgtactcccgttacaaaaaactccagcaggagctggaatttctagaagtccaagaggaatatatcaaagatgaacagaaaaacctgaaaaaagagttcttgcacgcccaggaggaggtgaagcgcattcagtctattccccttgtcatcggacagtttctcgaagcagttgaccaaaatacggcaatagttggatccaccaccgggagtaattattacgttcgaatactcagcactatcgatagggagctcctgaaacctaacgcttctgtcgccctgcataaacattccaatgctctggtggacgtgctgccccctgaagctgattctagcattatgatgcttacctctgaccaaaaacctgacgtaatgtacgccgatattggcggcatggatatccagaagcaggaagtccgagaagctgtggaactacccctcacacactttgaactctataaacagatcggcattgaccccccacgcggcgtactcatgtacggaccaccaggctgcggaaaaacaatgttagcaaaggcagttgctcatcacaccaccgccgcattcattagggttgtcggctcagagttcgtgcagaagtacttaggagagggcccccgcatggtgcgtgacgtattcagacttgccaaggagaatgcaccagcaatcatttttatcgacgaaatagacgccatcgctactaaacgattcgacgctcaaactggcgcagaccgtgaggtacaaaggattctgctcgaactgttaaaccagatggacggcttcgaccagaacgtgaatgttaaggtcatcatggccacaaaccgagctgatactcttgatccggccctccttagacctggacgcctcgatagaaagatcgaatttccactccccgatagaagacagaaacgacttatcttcagcactattaccagtaaaatgaacttatccgaagaggttgaccttgaagactatgtggcccgacctgacaagatatccggcgcagatatcaactccatttgtcaagaaagcggcatgctggccgtgagagagaaccggtacattgtgcttgccaaagattttgaaaaggcctataaaacagttattaagaaggacgagcaagaacacgaattttacaagtag

SEQ ID NO: 249062 - RNA, 786 nt, synthetic construct
  misc_feature 1..786: note = Description of Artificial Sequence: Synthetic coding sequence
  source 1..786: mol_type = other RNA
atgagccgaagatatgattcccggacgaccattttctcccccgaagggcgtctctaccaggttgaatatgcaatggaggcaatcggacatgcagggacttgcctgggaatcttggctaatgatggtgtgctgctggcagcagagaggcgaaatatacataagctacttgacgaagttttcttttccgagaagatatataagttaaacgaggacatggcatgttcagtcgcagggatcactagtgacgcaaatgttctgacgaacgagttgcgactgatcgcccagagatacttgctacaatatcaagaacctatcccctgcgagcaactcgtgaccgccctgtgtgacataaagcaggcctatactcagtttggtgggaagaggccttttggagtgtccttactgtacatcggatgggataaacactatgggtttcagctgtatcagtccgacccatctggcaattatggaggatggaaagcaacttgcatcggcaacaatagtgcagccgcagtgagcatgctaaagcaagactacaaagaaggcgaaatgacacttaaaagtgcacttgccctggctatcaaagtgctcaataaaactatggatgtatctaaacttagcgctgagaaggtagagatcgcaaccctgacccgggaaaacggtaagacagtgatccgcgttctaaagcaaaaagaggtggaacagttgatcaagaaacacgaagaagaagaggctaaagcagaaagagagaaaaaagaaaaggagcaaaaggagaaggataaatag

SEQ ID NO: 249063 - RNA, 4551 nt, synthetic construct
  misc_feature 1..4551: note = Description of Artificial Sequence: Synthetic coding sequence
  source 1..4551: mol_type = other RNA
atggataatcaacaggataaagctatagttgcctccgccaacggagagaatacactgatcaacggagtaaaggagaacgacagtgaggaccaggatgtcgcaatgaaatccttcgccgcattagaggcagcggcccccattcaacctacgcccgtggcccaaaaggagactctcatgtacccccgcggactcttacctctgccctctaaaaagccctgtatgcaaagccccccatcccctctgggactgattgaggccccggaacatgctgccaatagtgcttcggtaaatgccatctcactgacgagcggcatcgcgaaaggcttgaacacctggagcctcccaaatgaatgtgaaaaggcaccctttgccataatggaacccgccggtatgagcgccctcaacggcgactgtctcatgcaaccttctcgtacctgcctgggctgttttatggaaagtaaagatgctgtcgatccagagcccggcatttccctcaaagtaggtgatcttaaccgggattatgaaacctgtgccgtttccgacatcggcatccaatgtattaatgcaggggagaacatgaagtacggtgagcaacttctgagcgaccagttgttggggttccctcttcataaatccagggccggggaccgccgagaaaccgaaaagcccgatattgatctcgaggatcctgcccagaagtcttactacgaagccttactgcttgataagtgtaataccgaagaagccttgctggccaacagtaatcaggactggggatacttcgagaccttcatatctgagtcaaaaatagaactgttagatctctgtagcaaaaatgagctttcagtcaatttattcagcgaggaggacgtggataattatatgtttgatgacgacgaatctacactgggctcggacgtctgtagcttaaagatccggtatgaatcgttccaggacaacgtgagagacaagaccactctgttaatgcaggaagatgctcaattcaacttctttcctagtgtattcaccacatgtccaaaacgagagagtaagtcaggagctcttaaacagagtagcgatttcagccaattcaaagtaccggacgttagtataatctggggtgaagaagataaaaatctcgacaagaagaaagggaaggaggagggacaagaagataagggggtggaaaagaaagatgggaaagataatggcgagaaacccgctctgaataaaccatgcagcggcacagaggttgagcagttgaaaaaccccaaacagggacatttggccaatagtctggaaacatctggatcgttctcagacgacagttctttcattgaaatttcctacgacgccatgggagagatcaaagattgttctcgatatatggccagggataccaatagcgggtcaagttcatcacaacagaactatgggctgagggcaaagagaaaggtaagatacagcgaagactatctatacgatgtagacagcctggaaggggagaaagtgaacgagcggaaagaatggctccccgtgggaagtaaagaagaagacgatgatgagtggtgcccaaagaagagaaggaaagtgacgcgcaaggagccccccgtgattattaaatatattatcatcaatagatttaagggcgaaaagaacatgctagtgaagctcggcaaagtggacgcgagtgaaacgacagtgaatctttccgaaaaccaactcaacaagtacgccaaactggctcctttaaagggtttctggcagaagaagaagaagcagaggaacacaaatactgatagcatcaaaactccattctcacagaagcagtcatttgaaccgggttcatttgaagtgagttttctgccacctgcgaggaagaggaaatcaaagctcggtaaccgacacagaatccagagaataccatctatcgagatctctgcatcatccaaacaaatctctctctgcaacgatcaacgtcacgctagcaaccataaagaggatggcggtctgaaagggacactcaagtccgcacccctgggggcaccttcatgcgcaaacggttcgcacttgaacgatataacaggaccggattctgttaaggtgaaagctcaggatacagagttcaaaggccccgagaggaaagtgctgaataagattaagtttaagagtgaggcgagactcaagtcaaagaaggtcaaggctgccggacaagaaagcaaaccgatcgtgcagatgtccccccttttagagaaccaaagtagtaaagcaaaccttaagaatgaagtgatacccggcactagcaactcttcaagactgagcgaattccacgaagccaaggctgccaaaagctctacattcctcccaactacatgtagctccgagatgcccctgtccagtgccaacgtgactaccaacataccagtgattcctggcggctatctccagacccttctcgatgctagcgatttaagcaacaatacttccatatcctacttttcacatcatagtccagaacagaacgagggatccctgacccagacagaaaaatcattcgtgccattgcagcctactcaggattgtgtactgacctctagctctgactctgagctacagcaaagctctcataactttaaaatggaatcttctaattataggaatgtgtggcctaacaaggctacgagtggaacccaagaatttatggctgaagtgtctagagagatcgcgcctactcagtcatcagaatttggggcttcccaggtggttagcatggaaaataacttgaccccaacgacgtacaatcctatttgcctgaactctggtggttccaactgcaataaggtcctatacgatagtatgcaagacacgcaactaccatccgatgattcctaccagctgtgtcatttcaataatggagaaatctgcttccccttccagcagggccccgtaaacatggatgacggacgtctttttagctttgacagcatggcccccctcagcgtctcctcttcgaactactgctctctctcactgaagtcttgtgaaaaggatggtgatgacgacataaccgatgacttcctcgcccactgttccccgaagctggtaattcaacagtctatagacgagattgcaccgctcaaggagtccactgatctgttggacattagtaacttcacccctgacaaattcaggcactcttccctctccgaaatgtctccccccgatacaccatctctaagtcctcaaattaccaggtgtgagtctatgaaaaccttgggaacccttaagggattccaggagggcgtacccggccccctcgattccgtggagaaaattaaatgggactgtagcactctgtcccgacaagttcaaatggaagacgggttcactttgaataaccatcaatttcagttccacatgtttaacgacgaagattcagtttccctgttgcagaaaaatccatgtttgagtaccttcaacgacccatctggacaaataagtacaaataacaaagtgtctaagagccgcaaaaaaagctctccttcaaaaagcggagcgatgaaccagtcttcctcacagaaaaataccagaaagaagagtctgaagggaaataacaagggaatcgaaaagccgccaggaaagaattctcgacaggtcccaaaaagtacaaagaaaggtaagtatatggctgcaattaatggcgagaaaatgcaaatcgggataggaagaggtggtagtcagacgaatacaattagctccactggtaaaactctcgcagaatgcattcaacacggtggaccaatggcaagtatgaaaatgcccagtcagaagggcctctcaggcgattgggctttaggaaaagagtctagtcccggctggtcggacatgagtatgggcactaacacaaattccctcttagatgatgaccagcgcgagttccaagagccctcctatatactgagtaatatcgcctcgggcatggccgatgtccaaagatttatgatggcaagtattgaacctttgtgggaacctatggagcatcatggagatcctaatattttctacagcccagaatccaatagcttgaaactgaaaacattaaagatcctggccggaaccccacaggaaagcaagaaaaagatcaacagcggatcacaaggggccaccaaaaatcatcggtcaattaagggtgtatccaagagcaatggaaaaacagccatcggcgatccgggacgagctaacatgccggggtacaacgaagactcgcggtctaccttctttgacaaaaaatactctaatatgtcgacgcttggtaacaacggacccacccacaaaaagctctaccgacataagtcctcttctaaggccctccgtgatgaaaaatgtaaaggcaaacatatggagcgcgaacaggtacataaagatgagagtgggacagcttcatttgaaaagttgcgagattccgactacaaccttctgaaagctgaaactactttttgggtactacccgtgttcgaagaagaaaccagaatttttcaaaaagatatatag

SEQ ID NO: 249064 - RNA, 1494 nt, synthetic construct
  misc_feature 1..1494: note = Description of Artificial Sequence: Synthetic coding sequence
  source 1..1494: mol_type = other RNA
atggagactaaactcccacccgcatccacccccacttctccgagctcccccgggctcagccctgtaccgccaccagataaagttgatgggttttccagaagatctctgcgacgggcacggccccgaagatcgcactcttcatcccaattccggtatcaatcaaaccaacaagaacttactcccttacctctccttaaagacgttccagcctcggagctgcacgaactcctttctcgcaagctggcccaatgtggcgttatgttcgactttttggactgcgtcgccgatctgaaagggaaagaggttaagcgggccgcgctgaatgaattggtggaatgcgtgggctcaactcggggagtgctgatcgagccagtttacccagatataatacgaatgatttctgtgaacatctttagaactctgccaccatctgaaaaccccgagtttgatccggaagaagatgaacctaatctcgaaccctcttggcctcatctgcaattggtctatgaattcttcttgagattcctggaaagtcccgattttcaacctagtgtcgcgaaaaggtacgtcgatcagaagtttgtcttaatgctgctcgaactgtttgactcagaagaccccagagagcgtgaatatcttaagactatactccaccgcgtctacggtaaatttctcggtcttagagcgtatattcgaaagcagtgtaatcatatattccttcgtttcatatacgagtttgaacacttcaacggtgtagcagagctcctggagatacttggatctataattaatggcttcgcactgcccctgaaaactgaacataaacaatttctggtcagagtgcttatccctttgcattccgtgaaatccctatccgtgttccacgcccagttggcttattgtgtggtgcagtttctggaaaaagacgccacactcactgagcacgtgatccgaggtctgctgaagtattggcccaaaacctgtacccaaaaggaagtgatgttcctgggagaaatggaggaaattctcgacgtgatagaaccgtcccaatttgtgaaaatacaggagcccctttttaaacaagtcgcacgctgcgtgagttctccacacttccaagtggctgaaagagcactgtacttttggaataatgaatatatactttctctcatcgaagacaattgccatacagttctcccagccgtgtttggaacactctaccaagtttcaaaagagcactggaaccaaaccatagtgtcattgatctacaatgtgttgaagacctttatggagatgaacggcaaactgtttgatgaactcactgcctcgtataaacttgaaaaacagcaggaacagcaaaaggctcaggaacgacaggaattgtggcaaggtttggaggagctacgtcttaggaggctgcagggcactcagggagcaaaagaggctcccctccagaggcttacaccgcaagtagccgctagtggcgggcagtcctag

SEQ ID NO: 249065 - RNA, 1500 nt, synthetic construct
  misc_feature 1..1500: note = Description of Artificial Sequence: Synthetic coding sequence
  source 1..1500: mol_type = other RNA
atggctatggctgaaggggaacgtaccgagtgcgccgagccgcccagagacgaaccccctgctgacggtgcgttaaaacgggctgaggaactaaaaacacaagctaacgactactttaaggcaaaagattacgagaacgccattaaattttacagtcaggctatcgagctgaatccgtccaacgctatttactatgggaacagatcactagcctatctccggacggaatgttacggatatgccctgggagacgccacacgtgcaattgaattggacaaaaaatatatcaaaggatactacagaagagcagctagtaacatggctctgggaaaatttagggccgctcttcgggattacgaaaccgtggtgaaggtcaagccacatgacaaggatgccaagatgaaatatcaggaatgtaataaaatcgttaaacagaaggctttcgaacgcgctatcgcgggggatgaacacaaacgaagcgtggttgattcactagacatcgaatctatgactattgaggatgaatacagcgggcccaagttggaggatgggaaggtcacaataagtttcatgaaagagttgatgcaatggtacaaagaccagaagaaattacacagaaaatgcgcctatcaaatcctagtgcaagtgaaggaagtcttgtcgaaactcagcaccctcgtcgaaactaccctcaaggagaccgagaaaattacagtatgcggggatactcatggacagttttacgatttactgaatattttcgaactcaatggcctcccaagtgagactaacccctacatattcaatggcgacttcgtggacaggggttccttcagtgtagaagtcatccttactctcttcggctttaagctcctgtaccctgaccatttccacctgttgcggggcaatcatgaaaccgataatatgaatcagatttacggatttgagggcgaagttaaggccaagtacacagctcagatgtacgaactcttcagtgaagtgttcgagtggttgcctctcgctcagtgcattaatggtaaagtgcttatcatgcatggaggacttttttccgaggacggtgtcactttagacgacattagaaaaatcgaacgaaatcgacaaccacccgactccggtcccatgtgcgaccttctttggagcgacccccagccccagaacgggcgttctatcagcaaacgcggagtgtcctgccaatttggtccagatgtcacaaaagcatttctggaagaaaataatttagactatatcatccggtcacacgaggtgaaggctgaaggatatgaagtggcacacgggggcagatgcgtaacagtttttagcgcaccaaattactgcgatcaaatgggcaacaaggcaagctacatacacttacaaggcagcgacctgagaccgcagtttcaccaattcactgctgtgccccaccctaatgtaaagccaatggcctacgcaaatacacttctgcagctgggcatgatgtag

SEQ ID NO: 249066 - RNA, 696 nt, synthetic construct
  misc_feature 1..696: note = Description of Artificial Sequence: Synthetic coding sequence
  source 1..696: mol_type = other RNA
atgcgggtcctcggaggacgatgcggtgcgctgcttgcctgcctgttacttgtgctgcccgtgtcggaagccaatttttgcctgtacttccgtaacgattttatctataatcgcgcttgtattagtgtcctggtcggtttgtccggatgcaacttcttttattcaatatgttttctgtccaagcagcaggcctcccaggttctggtccggaagcgccgcgcgaacagcctcctcgaagaaactaaacaggggaatctagaacgcgaatgcattgaggaattgtgcaacaaggaggaagcgagagaagttttcgaaaacgatcccgagaccgactatttttaccccaaatacttggtttgtctgagatccttccaaaccgggctctttacagccgccagacaatcaaccaacgcttatccggacctaaggtcctgtgtgaatgcgatccccgaccagtgtagccctctcccatgcaatgaggacggttatatgagctgtaaagacggaaaagcatccttcacttgcacatgcaaacccggatggcagggcgaaaaatgtgagtttgatatcaacgagtgcaaggatccctccaatatcaatggtggctgtagtcagatatgtgacaacactccaggatcctaccactgctcttgtaaaaatggttttgtcatgttgagtaataagaaagattgttag

SEQ ID NO: 249067 - RNA, 2031 nt, synthetic construct
  misc_feature 1..2031: note = Description of Artificial Sequence: Synthetic coding sequence
  source 1..2031: mol_type = other RNA
atgagagtattaggcggccggtgtggcgctttgcttgcttgcctcttacttgttcttccagtgtccgaagccaatttcctgtcgaagcaacaggcaagccaggttctcgtgcgaaagcgtcgagcaaactcgctcttagaagagacaaaacagggaaatctcgagcgcgagtgtattgaggaactgtgtaacaaggaggaagcaagagaagtatttgaaaatgatccagaaaccgactatttttaccctaagtaccttgtatgcctgcgctccttccagacaggcctgttcactgctgcacggcaatctaccaatgcttaccctgaccttaggagttgtgttaatgccatcccagaccagtgctcaccactcccctgcaatgaagacggatacatgtcatgtaaggacggtaaggcatcgttcacgtgtacttgcaagccgggttggcagggcgaaaaatgcgaatttgacataaatgaatgtaaggatccatccaatatcaacggaggctgctcccagatctgcgataatactccaggaagctatcattgcagttgcaaaaatgggtttgtcatgctcagtaataaaaaggactgtaaggatgtggacgaatgctcgcttaagccctcaatttgcggaaccgccgtttgtaaaaatattcccggcgacttcgaatgcgagtgccccgaaggctatcgatacaatctgaaatcaaagtcttgtgaggatattgacgaatgcagtgagaatatgtgcgcacaactatgtgttaattacccgggcggctatacctgttattgcgacgggaaaaaaggtttcaaattagcccaagaccaaaaatcctgcgaggtggttagcgtgtgtcttcccttaaacctggataccaagtacgagctcttgtaccttgcagaacaattcgccggggtcgtgctgtacttaaaatttcggctgcccgagatttccagattttctgccgagttcgacttcagaacttatgacagcgaaggcgtgattctttatgcagaaagcatagaccacagcgcctggctcctgattgccctgaggggagggaaaattgaagtacagttaaagaatgaacatacctcgaaaatcaccacgggcggagatgtcatcaataatggactgtggaatatggtaagcgtggaggaattagagcacagtataagtatcaagattgccaaggaggcggtgatggatataaataaaccgggccctctcttcaaacccgaaaacgggctacttgagacaaaagtttacttcgctggcttcccccgcaaagttgagtctgaactaatcaaacccattaacccccggctcgatggctgcattaggtcatggaacctaatgaaacagggcgcgtcaggtatcaaagaaattattcaggagaagcagaacaaacattgtctagtcaccgttgagaaaggaagctattatcctggatcaggcatcgctcagttccacatcgactacaacaacgtctcatctgccgagggctggcatgtcaacgtaactctgaatattagaccatcaaccggaactggcgtcatgctggcacttgtatctggaaacaacactgtcccatttgccgtctccctcgtcgacagtacctctgagaaatcccaagacatcctcctgtcagtggagaatacggtaatctataggatccaagcattatcactatgctccgaccaacaatctcatctggagtttagggtgaaccggaataatctcgagctgagcacccctctcaagatagaaacaatctctcatgaagatctgcagagacagctagcagttcttgataaggctatgaaggcaaaagtggccacttacctaggcgggctcccagacgtcccatttagcgctactccggtcaatgcattctacaatgggtgtatggaggtcaacataaacggcgtgcagctggacttagacgaagctatttcaaaacataatgatatcagggcgcactcatgtcccagcgtgtggaaaaaaacaaaaaacagttag

SEQ ID NO: 249068 - RNA, 1269 nt, synthetic construct
  misc_feature 1..1269: note = Description of Artificial Sequence: Synthetic coding sequence
  source 1..1269: mol_type = other RNA
atggctgggtgcgtgcctctgttgcaaggtttggtattagtcttggcccttcaccgcgttgaaccttccgctacatccctgaaagagaggcacggcttacattccgatagcgcctgtaccggagtccaggagagtctgtttctgcccgccagcaaagccaatgatgtgctggtacgctggaagagagccggtagttacttactggaggaactgtttgaaggaaatctggaaaaggaatgctacgaagaaatttgcgtttatgaagaagctagagaagtgtttgagaatgaggtggtaaccgacgagttttggcgacggtataaaggaggatcaccatgtatttcacaaccctgcctccacaatggttcctgccaagattccatttggggatacacctgtacatgctcccctggctacgaaggatcgaattgtgagctcgctaagaatgaatgccatccagaaagaaccgatgggtgtcagcacttttgcctgcccggacaggaaagctatacttgttcctgcgcccagggataccgactgggagaagatcataaacagtgcgtccctcacgaccagtgcgcttgtggggtcctgaccagcgaaaaaagagcccccgatctgcaggacctgccatggcaagtgaaactaacaaattctgagggaaaggacttttgcgggggcgtgatcatccgcgagaacttcgtattaacaaccgcaaagtgtagtcttctgcaccgcaacattaccgtgaagacttattttaatcgtacttctcaggacccgctcatgattaagatcacccacgtccacgtacacatgagatacgatgcagacgccggagagaatgacctttcgctgttggaactggaatggccgattcagtgccccggcgcaggactgcccgtttgcacacctgagaaagatttcgctgaacacctgctcatcccaagaaccagaggattgctgtcaggctgggcaaggaatggcactgatctgggaaactcactgacaaccagacctgtgactcttgtcgagggagaagagtgcggccaggtccttaatgttaccgttaccaccagaacatattgcgagaggtcaagcgtggcagccatgcattggatggatggctcagtggttacccgagagcatcgggggtcatggttcttaactggagtccttggtagtcagccagtgggaggacaagcccatatggtgttagtaacgaaggtcagtcggtattccttatggttcaaacaaattatgaattag

SEQ ID NO: 249069 - RNA, 1203 nt, synthetic construct
  misc_feature 1..1203: note = Description of Artificial Sequence: Synthetic coding sequence
  source 1..1203: mol_type = other RNA
atggctggctgcgtgcctctgctgcaaggattagtgctggtgttagcactgcaccgcgtcgaaccttctgtctttctaccagcaagcaaagccaatgatgtgctcgtaagatggaagagggccggatcatatctgctagaggagctttttgaagggaacctcgagaaagaatgctacgaagagatttgtgtttacgaggaggcccgagaggtgtttgaaaacgaggtggttacagacgaattttggagacgctataagggagggagcccatgtatatctcagccgtgcctccataatggctcttgtcaagactcaatttgggggtatacctgcacatgttcccccggctacgaagggtcaaactgcgaactagccaagaatgagtgtcacccggaaagaaccgatggatgccagcacttttgtctgccaggccaagaatcgtatacttgctcctgtgcacaagggtatagactgggagaagatcacaagcaatgcgtcccccacgatcagtgtgcttgtggggtgctaaccagtgaaaagagagcccctgacctccaggacctcccctggcaggtgaaattgaccaattccgagggtaaagatttctgcggtggagtgattatccgagagaatttcgttttgacaactgctaagtgctctctacttcatcggaacattactgtgaagacatactttaaccggacttcccaagaccccctaatgatcaaaatcacccacgtgcacgtgcatatgagatatgatgctgatgccggcgaaaacgacctgtccctactggaacttgaatggccgatacagtgtccgggcgcgggcttgcctgtgtgcacccccgaaaaagactttgctgaacatttattgatcccacgcacccgcggcctgctctcaggttgggccagaaacggtacagacctgggtaatagccttaccaccagacctgtgaccctggtcgaaggagaggagtgtggacaggtgctgaatgtgaccgtaactacaagaacttattgtgagcggtccagtgttgctgccatgcattggatggatggaagcgtcgtaactcgagagcatagaggctcctggtttctgacaggggtgctgggatcacagcccgtgggaggacaagcccacatggtactcgttacaaaagttagcaggtatagcctgtggtttaaacaaattatgaattag

SEQ ID NO: 249070 - RNA, 1053 nt, synthetic construct
  misc_feature 1..1053: note = Description of Artificial Sequence: Synthetic coding sequence
  source 1..1053: mol_type = other RNA
atggagccaaagagaattagggagggatatttagttaagaagggatcagtatttaacacatggaagccaatgtgggtggtactgcttgaagacggcatagaattctacaagaagaagagcgataactctcccaaaggtatgatccctcttaagggtagtactcttacatccccatgccaagactttggaaagcggatgtttgtgttcaagattacaaccaccaaacaacaagatcatttcttccaagcagccttcctggaggagcgagacgcatgggtgcgcgacatcaaaaaagccatcaagtgcatcgaggggggacagaagtttgctagaaagagtacacgaagatctatcaggctgcccgaaacaattgacctcggcgccctctacctttctatgaaagatactgagaagggcatcaaagagctaaacctggaaaaggataaaaaaatttttaatcattgcttcaccgggaactgcgtgatcgactggcttgtctcaaatcaaagcgttagaaataggcaggagggtctgatgatagccagcagcttgcttaatgaagggtacttgcagccagccggagatatgtcgaagtctgctgtggacgggaccgccgaaaaccccttcctggacaatcctgatgcgttctattatttcccagacagcggctttttctgtgaagaaaatagttccgacgacgatgtgattttgaaagaggagtttagaggcgtgatcattaaacaggggtgtctgttgaaacaggggcacagaaggaagaattggaaagtccgtaaattcatcctgcgggaggaccccgcttacctgcactattacgatccagcaggcgcagaggatcccttaggcgcgatccatctaagaggatgcgtggtaactagtgtagagagcaatagtaacggacgaaagagcgaagaagaaaacttattcgagataatcacagcagatgaagtgcattacttcctccaggccgctacacccaaggaaagaacagaatggataagggctatccagatggcttcacgcacaggtaagtag

SEQ ID NO: 249071 - RNA, 1236 nt, synthetic construct
  misc_feature 1..1236: note = Description of Artificial Sequence: Synthetic coding sequence
  source 1..1236: mol_type = other RNA
atgaaggccgcccgtttcgtactccgaagcgccgggagtctgaatggtgcaggactcgttcctcgcgaggtggagcatttctctcgttactcgccatcccccctctccatgaaacaattgcttgattttggtagtgaaaatgcctgcgagagaacctcatttgccttccttagacaagagctacccgtccggctggccaacatccttaaagagattgatatattgcccacccagctagtgaacacttcttccgtgcagctggtgaaatcatggtacatccaaagcctgatggacctggtggagttccacgaaaagtccccagacgaccaaaaggccctaagcgattttgttgacacgttgattaaggttagaaatcgccatcataatgtagttcccactatggcacaaggtattatcgagtataaggatgcttgcaccgttgacccagttacaaaccagaaccttcagtattttctcgatcgattttacatgaataggatcagcacgagaatgctgatgaatcagcacatcctgatcttttccgactcacagacaggcaacccctcccacatcggttctatcgatcctaattgcgacgtcgtggctgtggtgcaggacgctttcgagtgctcccggatgctttgtgatcaatactacctgtccagccctgagcttaaactaacacaggtcaacggcaaatttccagatcagcctatccatatcgtttatgtaccctcccatctacatcatatgttatttgagttatttaaaaacgccatgcgggcaaccgtggagcatcaggaaaaccagcccagcttaacccctatcgaggtgatcgtcgtccttggaaaagaggatcttactataaaaattagcgacagaggcggaggcgtgcccttgaggataattgacaggctcttttcttacacatactctactgctcccactcccgtcatggataattcccggaacgctcctctggctggatttggatatggactgccaatctctagactgtacgcaaaatatttccaaggggatctcaacctttattctctcagcggctacggcacagatgccattatctacctcaaagccttaagttccgaatctattgagaagctaccagtgttcaataagtccgcattcaagcactatcaaatgtctagcgaagcggatgattggtgtataccaagcagggaacccaaaaatctcgcgaaggaagtagccatgtag

SEQ ID NO: 249072 - RNA, 1968 nt, synthetic construct
  misc_feature 1..1968: note = Description of Artificial Sequence: Synthetic coding sequence
  source 1..1968: mol_type = other RNA
atgacagaatgttttttgccccctaccagttcaccctctgaacataggcgtgtggaacacggatcaggtctaacccggacccccagctccgaagaaattagtcctacgaaatttcccgggctgtaccggacaggagaaccatcgccccctcatgatattcttcacgaacctcccgacgtagtctcagatgacgagaaagatcacggaaagaaaaagggcaaatttaaaaagaaagagaagcgcaccgagggatacgcagccttccaggaagacagttcaggcgatgaagctgaatcccccagcaaaatgaaaaggtctaaggggattcacgtttttaagaagcccagctttagcaaaaagaaagagaaggattttaaaattaaggagaagcccaaggaagaaaaacacaaagaagaaaaacacaaggaggagaaacacaaagagaagaagtcaaaagatcttacagccgccgacgtggtgaagcaatggaaagaaaagaaaaagaagaaaaagccgattcaagaaccagaagtcccacagatcgacgtgcccaacttgaaacctatcttcggcatcccactggctgacgcagtcgagaggacaatgatgtatgatgggatcagactgcccgccgtgttccgcgaatgtatagactatgttgagaaatatggaatgaagtgtgagggtatttatcgcgtgtcgggaatcaaatctaaagttgatgagctcaaggccgcctacgatcgagaagagagtacaaatctggaagattacgaacctaatacggtggcctcactcctcaaacaatacctcagagatttaccagaaaacctcctgactaaagaattaatgccacggtttgaagaggcctgcgggaggaccacagagacggagaaggtccaggaatttcagaggctattaaaggaattaccggagtgcaactatctcctgatttcgtggcttatcgtacatatggaccatgtgatcgccaaagaactcgagacaaaaatgaacatccagaacattagcattgtacttagtcccactgtgcagatctccaacagagtgttatatgtttttttcacacacgtgcaggagttattcggtaatgtggtgctgaaacaggtaatgaaaccacttagatggagtaatatggccacaatgccaaccctacccgaaacccaggcaggcatcaaagaggaaataagacggcaggagtttcttttgaactgcttgcaccgtgatttacagggcggtattaaggacttatcgaaggaggagaggttgtgggaagttcagcggatactaacggcattgaaaaggaagttgcgggaggctaaacggcaggagtgtgagacgaagattgcacaggagatcgctagtctcagtaaggaggatgtttcaaaggaggagatgaatgaaaatgaggaggtgattaatattctgcttgcgcaggaaaatgaaattctgaccgaacaagaagagctgctagcaatggagcaatttttaagaaggcagatagcttctgagaaggaagagatagaaaggcttagagctgagatagcagagatccagtccagacagcagcacgggagaagcgaaaccgaagagtactcctcagagtctgagtcagagtcagaagacgaagaggaattgcagatcatcctggaggacttgcagcgtcagaatgaagagctcgaaataaagaataatcacctcaaccaggcgatccatgaggaaagggaggctatcatcgaactgcgcgtccaactaagattgcttcagatgcaacgcgccaaagcagaacagcaggctcaggaagacgaagaacccgagtggcggggcggcgctgtacagccaccacgcgacggagtactggaaccaaaagctgctaaagaacagcctaaggctggcaaagaacccgcgaagccaagtccttctagagacagaaaagagaccagcatctag

SEQ ID NO: 249073 - RNA, 1500 nt, synthetic construct
  misc_feature 1..1500: note = Description of Artificial Sequence: Synthetic coding sequence
  source 1..1500: mol_type = other RNA
atggccgatctagcaaatgaggagaaaccagccatagcaccgcccgtgtttgtgtttcaaaaagataagggacagaaacggagcgccggaggcagttcacccgaaggtggtgaggactcagatcgtgaggacggaaattattgcccccccgtaaaacgcgaaagaaccagctcactgacccagtttcctccaagtcagagtgaagagcgtagctccggatttagacttaagcccccaacccttatccatggacaggccccaagcgcaggtctaccaagtcagaagccaaaggagcagcagaggtccgtgctgagaccggcagtcctgcaagccccacagcccaaggccctctcgcagaccgtgccctccagcggcacaaacggcgtgtccttacccgcagattgcaccggtgcggtccctgccgccagccctgatacagctgcttggcgatctcccagtgaagcagcagacgaagtgtgtgcccttgaggagaaggaaccacagaagaacgagtcctctaatgcctccgaggaagaagcgtgcgaaaagaaagacccagctacacagcaggcattcgtgttcggccagaacctcagagatagagtaaagctgataaacgagagcgtggatgaggcagatatggagaatgctggccacccgagtgcggacactccaactgcaacaaactatttccttcagtacatttcatcgtctctcgaaaattcgacgaacagtgccgatgcctcttcaaataaatttgtgtttggacaaaatatgagcgagagagtcttgagtcctcccaaactgaacgaagtcagctcggatgcaaatcgagaaaacgctgccgcagagtctgggtctgaatcaagtagtcaggaagccacccccgagaaggagtcactagccgaatccgccgcggcttatacaaaagctactgcaagaaaatgcttgttggagaaagtagaggtgattacaggagaagaggctgaaagtaatgtgctccagatgcaatgtaaattgttcgtgtttgacaaaacatcccagagctgggtcgaacgtggcagaggccttcttaggctgaatgatatggcctcaacagacgatggaaccctccagtccagactcgtgatgcggactcaaggcagtcttaggctgatactcaacacaaaactgtgggcccagatgcagattgataaggcctccgaaaaatcaatcagaatcactgccatggacactgaagaccaaggcgtgaaggtcttcctgatttcagcatctagcaaagataccggacagctgtatgcagcccttcaccaccggatcctcgcccttagatctagagtcgaacaagagcaggaggctaagatgcccgccccagaacccggagctgccccatcaaatgaggaggatgattccgacgatgatgatgtgctggcacccagtggagcaacggccgccggagcgggagacgaaggtgatggacaaacaactgggtctacgtag

SEQ ID NO: 249074 - RNA, 2190 nt, synthetic construct
  misc_feature 1..2190: note = Description of Artificial Sequence: Synthetic coding sequence
  source 1..2190: mol_type = other RNA
atgagtggccagccaccccccccgccacctcagcagcaacagcaacagcagcagctgtcacctcctccgcccgccgctctcgcccccgtctcaggagtggtattaccagcccccccagctgtttccgccgggtcatcccctgcaggcagccccggaggaggcgccggcggagaaggacttggagcagctgccgcggccctccttctacaccctccccccccgcctcccccagcaaccgctgcgcctcctccgcctccaccccctcccccaccaccagcttcagcagcagcgcccgcatcaggcccacctgccccacctggattagctgccggacctggaccagctggaggggccccaactccagcactggttgctggctccagtgccgctgcaccctttccacacggcgacagtgctcttaatgaacaggaaaaggagctgcagagacgtctcaagaggttgtacccagctgtggatgagcaggagacgccgctgccacgaagttggtctcctaaggacaaattttcctacatcggcctgtcacagaacaacctacgggtccactataaaggacacggtaaaactcccaaggatgccgcctctgtacgtgcaacccatcccattcctgcagcttgcggcatatattacttcgaggtcaagatagtctccaagggaagagacggatacatgggaatcggattgtctgcacaaggagttaatatgaaccgccttcctggctgggataagcacagctacgggtatcacggggatgacgggcacagtttctgctcctctggcactggtcagccctacggaccgacattcactactggagacgtgattggctgctgtgtgaatctgatcaataacacctgcttttatactaaaaatggccatagcctgggaatcgcctttaccgacttgcctcctaacttataccccaccgttggacttcagacacccggcgaggtggtcgacgccaattttggacagcatcctttcgtgttcgacatcgaggattatatgcgagaatggcgcactaaaattcaagctcagatcgataggttccccattggggatcgcgagggagagtggcagactatgatccagaagatggtctctagttatctagttcaccatggttactgcgctaccgctgaagctttcgcccgctctactgaccagaccgtccttgaagaactagcatcaatcaagaatcgccagagaatccaaaagcttgttctagccggacgtatgggcgaggccattgaaaccacccagcaactttatccttccctcctcgagaggaatccgaatctactttttacactcaaagtccggcaatttatcgagatggttaacggcaccgactcagaagttagatgcttgggcggcaggtcaccaaaaagtcaggacagctatccggtgtctccacggcctttctcaagcccttctatgagcccttcacatggtatgaacatccacaatctggctagcggtaaggggagcactgctcatttttccggattcgaaagttgctctaacggcgtcatatccaacaaggcccaccaaagttattgccactccaataagcaccaaagtagtaacctcaacgtccccgaactgaatagtatcaatatgtcacggtcccagcaggtgaacaactttacgagtaacgacgtcgacatggagacagaccactacagcaacggcgttggcgaaacatcctctaatggcttcctcaacggatccagcaaacacgatcacgaaatggaggactgtgataccgagatggaagtggattcttctcagctcaggcggcagctctgcggaggtagtcaagcggctattgagaggatgatacactttggccgagagttacaggcaatgtcagaacagctcagacgtgattgcggtaagaatacagcaaataaaaagatgcttaaagatgctttcagtctcctggcttatagcgatccttggaattcacccgtcggaaaccagcttgacccaatacagcgagaacctgtctgctcggcattaaattctgcgatactggaaacgcacaatctgcccaagcagccacctttagcccttgcaatgggacaagccacacagtgcctcggcctcatggctagatccggaataggctcgtgcgcttttgcaacagttgaggactacctacactag

SEQ ID NO: 249075 - RNA, 5298 nt, synthetic construct
  misc_feature 1..5298: note = Description of Artificial Sequence: Synthetic coding sequence
  source 1..5298: mol_type = other RNA
atgcggcggagcaaagctgatgtagaacggtatgtggcttcagtccttggtctgacacctagccctcgacagaagtccatgaaaggcttttatttcgccaagctatattatgaagccaaggaatacgatttagcaaaaaaatatatctgcacttacatcaacgtacaggaaagggatccaaaggcacatagatttctcggactgttatatgagcttgaagaaaacacagagaaggctgttgaatgctaccgtcggagcgttgagttgaatcccacccaaaaggaccttgtgctgaagatcgcagaactattgtgtaagaacgacgtaaccgacgggcgggccaaatactgggtcgagcgagccgcaaaacttttcccaggttctccggccatttataaactaaaggagcaactgttggattgcgagggggaggatgggtggaacaaattatttgacttaatccaaagtgagctgtatgtgcgtccggacgatgtccacgtcaacatcagacttgttgaactgtatagaagtactaagcgcttgaaggacgctgttgcccactgccatgaagctgaaaggaatattgcgctccgcagttcattggaatggaacagctgcgtcgtacaaacactaaaggagtacctggaatctttacagtgcctagagtccgacaaaagtgattggcaggccaccaatactgacttactgctcgcctacgcaaatctgatgcttctgacactctctactcgggacgtgcaggaaaatagagaactgctggagtcttttgactctgctttacagagcgccaaatccagcctcggagggaacgacgaattgagcgccactttcctcgaaatgaaagggcatttttacatgtatgccggatcattgctgctgaaaatgggacaacacggcaataatgtacaatggcgggctctgtccgaattggcagcactgtgctaccttatcgcttttcaggtccccaggccaaagattaagctgcgcgaagggaaggctgggcagaatttactggaaatgatggcttgcgatcgtctaagccagtcaggacacatgctgttatcgctctctcgaggcaagcaggatttcctaaaggaggtggtggaaacattcgcaaacaagatcggccaaagcgcgttatatgatgctctctttagctcccaatcccccaaggacacatcatttttgggatctgacgacattgggaagatcgacgtacaggaacctgagctggaagaccttgcccgttacgatgtcggcgccatcagagcgcataatggctccttgcagcacctaacatggctgggactgcaatggaactccctgccagcactgccaggtatcaggaagtggctcaaacagcttttccaccgcctgcctcatgagacctctagattagaaacaaatgcccccgagagtatctgcatcttagacctggaggtgttcctccttggcgttgtatacacaagccatctccaactgaaagaaaaatgcaactctcatcacagcagctaccagcctttgtgtctccctttccctgtctgcaaacagctttgtactgagcgtcagaaatcatggtgggacgccgtttgcactctgattcatagaaaagccgtgccaggtaacctcgccaaactgcggctactggtgcagcacgagatcaacactttgcgggctcaggagaaacacgggctccagccggcactgctcgtacattgggccaaatacctacaaaaaacagggagcgggctgaattcgttttatggacaattggaatatatcggtaggtcagtgcactactggaaaaaggtcctgcctctacttaaaatcataaagaagaactcaattccggagccgatcgatcccttgtttaaacacttccatagcgtggatatacaagcctctgagatagtggagtacgaggaagatgcccacatcacatttgcaatgctagacgcagtgaatggcaacattgaggatgctgtaaccgcctttgagtcaataaaatctgttgtatcgtactggaatctggctctaatctttcaccgcaaagctgaagatatagaaaacgacgctttatcacccgaagagcaggaagagtgtcgcaactacctgacaaagacacgagactacttaatcaaaattatcgatgatggcgatagtaacctctctgtcgtcaaaaagctccctgtacccctcgaaagcgtgaagcaaatgttgaatagtgtcatgcaggagttggaagattattcagaaggtggacctctttataagaatggctctctgcgaaacgccgacagcgaaattaaacactccactccttcacctaccaagtattctttgagtccaagcaaatcctacaagtattccccagagactccaccaagatggaccgaagaccgtaattcattattgaacatgatctgccagcaggttgaggctatcaaaaaggaaatgcaagagttgaagttaaactcgtccaaatccgcgtcaaggcaccggtggccaactgaaaactacgggcctgattccgtgcctgacggctatcaaggttcccaaacattccatggcgctcctctaaccgtcgccacaactgggccttctgtctactacagtcaatctcctgcttataatagccagtatctgttacgacccgctgccaacgtcactccaaccaaagggtcatctaataccgagtttaagagtactaaggagggattctccatcccggtatcagcggatggttttaaatttggcataagtgaacccggtaatcaggagaagaagagggagaagcccttagagaacgatacaggtttccaggcacaggacattagtggacgaaaaaagggccgcggagtgatctttggtcaaacatcttcaacatttacgtttgcggacgtagccaagtctacaagtggcgaaggatttcagttcggaaagaaggatctaaattttaaaggttttagcggcgccggcgagaagctgttcagctccaggtacgggaaaatggcaaacaaagctaatacaagtggcgacttcgaaaaagacgatgatgcttacaaaacagaagatagcgacgatatccatttcgagcctgtggtgcaaatgcctgagaaagtggagctcgtgaccggggaggaaggggaaaaagtgttatacagccagggggtgaaactttttaggtttgacgctgaggtgaggcaatggaaagagcggggtttgggcaacctcaagattctgaaaaacgaagtcaatggcaagctcaggatgctaatgaggcgtgagcaggttctgaaagtctgcgccaatcactggataaccaccactatgaatctgaagcccctcagtgggtccgacagggcttggatgtggagcgctagcgatttctcagacggggatgcgaaactggagcgcttagcagcaaaatttaaaacccccgaacttgccgaagaatttaaacagaaatttgaggagtgtcaacgcttactgctggatatccccttacagacaccacacaagctcgtagacaccggtcgtgcagccaagctgatccaaagagccgaagagatgaaatccggactgaaggatttcaagacctttctgaccaacgaccaaacgaaagtgacagaagaagagaataaaggttcaggtacaggggccgccggagcatcagatacgacgattaaaccgaatgccgagaatactggccctaccctggagtgggataactacgacctcagagaagacgccctcgatgactcagtgtcctcatcctccgtgcacgcttctcctctggcttcttctcccgtgcgtaaaaacctgtttcgctttgatgaatctactaccgggagtaatttcagctttaagagcgccttatctttgagtaaatctccggcaaaactgaatcaatctgggacttctgttggaaccgatgaggaatccgttgtgacacaggaggaagagcgagacggtcaatattttgaaccggttgtaccactgcccgacttggtggaagtgagctccggggaagagaatgagcaggtagtgtttagtcaccgcgcagaaatctaccgctacgacaaagacgtgggccaatggaaggagaggggtatcggcgacataaaaattctgcagaattacgacaacaagcaggtcagaattgtaatgaggcgggaccaggttttaaagctatgcgctaatcatcgcatcactcccgatatgagcctgcaaaacatgaagggtacagaaagagtgtgggtctggacagcttgtgatttcgcagacggagaacggaaggtggagcatctggccgtgcgattcaagctccaggacgtggcagattcctttaagaaaatatttgatgaagccaaaaccgcccaggaaaaagactcactgattactcctcacgtctcaagatcatccaccccgcgcgaaagtccttgcggcaagatagcagtagccattctcgaagagaccacacgcgagcgtaccgacgtgatccagggtgacgatgtcgcagatgcagctagtgaggtagaagtctcgagcacaagcgaaacgacaacaaaggccgtggtctcaccccccaaattcgtgtttgtcagtgagagtgtgaagcgaattttcagcagcgaaaagtcaaaaccattcgtctttggcaattccagtgctaccggctctctcttcggtttctctttcaacgcgcctctgaaaagtaataattctgagactagttcagtggcccagagcgggtcagaatctaaagtagaaccaaagaagtgcgagctgagtaaaaattccgacattgaacaatccagcgactctaaagttaaaaatctgtcagcttccttcccgacggaggaatcgagcattaattacacatttaagacaccagagaaggaacccccgttatggcatgcagaatttacgaaagaagaacttgtccagaagctgcgatctacaacaaagtcagccgaccatctgaatgggctgcttcgagagatcgaggctacgaacgccgtgctgatggaacaaatcaaactgctaaagtccgaaataagaagacttgaaagaaaccaggaacgggaaaaatccgccgcaaacctcgaatatctcaagaacgttcttcttcagtttatttttttgaagcccggatctgagcgagaaagactgcttcccgttattaacactatgcttcagctgagtcccgaagagaaaggcaagctggctgccgttgctcaggacgaggaggaaaatgcatcaaggtcatctggttag

SEQ ID NO: 249076 - RNA, 447 nt, synthetic construct
  misc_feature 1..447: note = Description of Artificial Sequence: Synthetic coding sequence
  source 1..447: mol_type = other RNA
atggcccgcgcactgtgtagactgccgcgcagaggactttggctcttgttagctcaccaccttttcatgaccacagcatgccaggaggcgaactacggtgccctgctccgcgaattgtgtcttactcagtttcaggttgatatggaggcagtaggcgaaaccctgtggtgcgactggggacggacaattagatcctatcgagagttagcggattgcacctggcacatggccgaaaaattggggtgcttctggcctaacgcagaggtggatagattcttcctcgctgtgcacggaagatatttccggagttgccctatcagtggccgcgccgtaagggacccacccggatcaatcctgtacccctttattgtcgttcccatcacagtgacacttctggttaccgctctcgttgtttggcagtctaagaggactgaagggatcgtgtag

SEQ ID NO: 249077 - RNA, 381 nt, synthetic construct
  misc_feature 1..381: note = Description of Artificial Sequence: Synthetic coding sequence
  source 1..381: mol_type = other RNA
atgaccactgcctgccaggaagcgaactacggagcactcctcagagagttatgcttaacacagtttcaagtggacatggaggccgtaggcgaaactctctggtgtgattggggaagaactattcgtagttatcgggagctggctgattgcacttggcacatggcagaaaagcttggatgtttctggcctaacgccgaagtggataggtttttcctcgctgtccatggaagatattttcgcagttgtcccatctcaggaagagcagttcgtgaccccccagggagtatcctgtatccattcattgtagttcccataaccgtaacccttttagtgaccgcgttagttgtctggcagtccaagcgtaccgagggcatagtgtag

SEQ ID NO: 249078 - RNA, 381 nt, synthetic construct
  misc_feature 1..381: note = Description of Artificial Sequence: Synthetic coding sequence
  source 1..381: mol_type = other RNA
atgactactgcctgtcaagaggccaattacggtgcgctcctgcgggaactctgtttaacacagtttcaggttgacatggaagccgtgggtgagaccctgtggtgtgattggggaaggactatcagaagttaccgtgagctcgcagactgtacctggcatatggccgagaaactcggatgtttctggcctaacgctgaggtggatcgcttcttcctggcagttcatggcaggtactttcgcagctgtccaatatccggcagagcagtgagagacccacctggaagcatactataccctttcatcgtggtaccaatcaccgttacactgttggtcacagcattggtcgtatggcagtccaagcgcacagagggaatcgtatag

SEQ ID NO: 249079 - RNA, 381 nt, synthetic construct
  misc_feature 1..381: note = Description of Artificial Sequence: Synthetic coding sequence
  source 1..381: mol_type = other RNA
atgacaacagcctgccaggaagccaattacggcgctttgttgagagagctatgtctaacccagtttcaagtggatatggaggctgtaggggagactctgtggtgcgactggggccgcactatccgatcatatcgtgagcttgcagattgcacatggcacatggctgagaaactcggttgtttttggcccaacgcagaagtagataggtttttccttgcagtgcacggaagatactttaggtcttgtcctatctctggcagagccgtccgagatccccctggcagtatactatacccgttcatcgtggttcctataacagtgactctgctggttaccgccctcgtcgtctggcaaagcaagagaacagaaggaatagtatag

SEQ ID NO: 249080 - RNA, 606 nt, synthetic construct
  misc_feature 1..606: note = Description of Artificial Sequence: Synthetic coding sequence
  source 1..606: mol_type = other RNA
atggtaagctggattatcagtagacttgtcgtgcttatcttcggaactttgtaccccgcatattactcatacaaagcagtgaaaagcaaggacattaaagaatatgtgaagtggatgatgtactggatcatctttgcactttttaccacagccgaaacgtttacggacatcttcctgtgttggttccctttttattatgagcttaagattgcgtttgtagcctggctcctctctccgtacaccaagggctccagccttttatatagaaaattcgttcatcctaccctgagctctaaggagaaggagatagacgactgtctggtgcaggcaaaggatagatcatacgatgctcttgttcacttcgggaagagaggactcaatgtcgccgccacagcagccgtgatggcagctagcaaagggcaaggcgctctgtctgaacgcctgagatcgttttcaatgcaggatttaacaacaattcgcggagatggcgcacccgctccatcaggaccccctccgcccggcagcggcagggcttcaggcaaacacggtcagcccaaaatgtctcgcagcgcctcggagagcgctagttcctcagggacagcatag

SEQ ID NO: 249081 - RNA, 1293 nt, synthetic construct
  misc_feature 1..1293: note = Description of Artificial Sequence: Synthetic coding sequence
  source 1..1293: mol_type = other RNA
atgaagccttctcttttatgcagacctctctcttgttttctgatgctccttccatggcccctggctactctaacatcgactacactctggcaatgccccccaggcgaggagcccgatctggacccaggacaaggcactctttgccgcccatgtcctcctggcacattttcagctgcttggggaagttccccctgccagcctcatgctcggtgttcactttggcgacgattggaggctcaagtgggcatggcaactcgcgatactttgtgcggagattgctggccaggctggttcggaccatggggagttccgagggtgccatgccagccatgtagttgggcacctctgggcacacacggctgcgacgaatgggggagaagagctcgaaggggagtggaagtagcagctggtgccagcagcgggggtgaaacgcgacaacccggtaacggaacccgggccggaggccccgaagaaaccgcggcccagtacgctgtcatcgcgattgttccggtgttctgtctgatgggcttacttggcatactggtgtgcaatttactgaagcgaaaagggtaccattgcactgcccataaggaggtgggaccaggtcctggtgggggcggcagcggaatcaaccccgcttatcgaaccgaagacgccaacgaagataccattggtgtgctcgttagactcatcacagaaaaaaaggagaatgctgccgctttggaggaactactgaaagagtatcatagtaagcagctcgtacaaacctcccaccgccctgtttcgaagttgccacccgccccacctaacgtaccacacatttgcccacataggcatcatctacacactgtccaaggactcgcatctctgtctggaccctgttgttcacgatgcagtcagaaaaaatggcctgaagtgctgctcagccccgaagctgtggcagccaccacccctgtaccttcattactgccgaaccccactcgggtgccaaaagcaggggcgaaagctggtagacaaggagagattacaatactcagcgtcggtcggttcagagtggcccggatccctgagcaacggacaagcagcatggtttctgaggtgaagaccattaccgaggctggtccttcctggggagaccttcccgattccccgcagcctggcctccccccagaacaacaagccttactcggctccggcggcagtcggacaaagtggctcaagccccccgcagaaaataaagctgaagagaacagatacgtcgtacgcctgtcagaatccaatctggtgatctag

SEQ ID NO: 249082 - RNA, 1065 nt, synthetic construct
  misc_feature 1..1065: note = Description of Artificial Sequence: Synthetic coding sequence
  source 1..1065: mol_type = other RNA
atggaggtagaagccgtgtgcggtggagcaggcgaagtcgaagcccaggattcggaccccgcgccagcctttagcaaagccccaggaagtgctggccactacgaactaccctgggttgaaaagtatagacctgtgaaattaaacgaaatagtggggaatgaagacaccgtctcacgcctagaagtgttcgcacgggaaggaaatgtgcctaacatcataatcgcagggccaccggggaccggaaaaactaccagtattctgtgtttggcccgcgccttactgggacctgccctgaaagatgcaatgctcgagctcaatgcctccaatgatagaggtatcgacgttgtgagaaataaaatcaagatgtttgcacagcagaaagtaactctccccaaaggcaggcacaaaatcatcattctggacgaggctgacagtatgaccgatggagctcagcaggctctccgccggactatggaaatttattcaaaaaccacacggttcgcgcttgcatgtaacgcctccgataagatcatcgaaccaatccaaagtagatgtgctgtgctcagatatacaaagcttacagatgcccagatccttacccgtctgatgaatgtgatcgagaaagagcgggttccctatacagacgacggacttgaggctatcatcttcaccgcccagggagatatgcgccaggcccttaataatctacagagcactttcagcggttttggattcatcaacagtgaaaacgtgtttaaggtgtgtgatgagccccatcctttattagtaaaagaaatgatccaacattgtgttaatgccaacatcgacgaagcctataagattctggcacacctctggcatttgggctattccccagaggacatcattggcaatatatttagagtttgtaaaacttttcagatggctgagtacttgaagctggaatttatcaaggagattgggtatacacatatgaagatcgctgaaggagtcaattccttactccagatggcaggattgctggccaggctgtgtcagaagaccatggcgcccgtagcttcctag

SEQ ID NO: 249083 - RNA, 996 nt, synthetic construct
  misc_feature 1..996: note = Description of Artificial Sequence: Synthetic coding sequence
  source 1..996: mol_type = other RNA
atggcacggggtgggaggggaaggaggctcggcctcgctctgggtctactactcgctcttgttctggctccaagagtcctacgtgcgaagcctacagtccgtaaagagagagtggtgcggccagacagcgaactgggagagagaccgcctgaagataaccagagtttccagtacgaccacgaggctttcctgggcaaagaagactccaaaacctttgatcagctgacacctgacgagtccaaggagcgtctcggtaagattgtggataggatcgacaacgatggtgatgggtttgtgaccactgaagagctcaagacatggatcaaaagggtacagaaaagatacatcttcgacaacgtggcgaaggtctggaaggactacgaccgggacaaggacgacaaaataagctgggaggagtacaaacaagctacctatggatactatttgggaaatccagctgagttccacgatagctcagaccaccatacctttaaaaaaatgctgcctcgggacgaacgtagattcaaggccgccgacttgaacggggacttaactgcaactagagaggagttcaccgccttcctccatcctgaagaattcgaacacatgaaggaaatcgtggtcctggaaaccctggaagatattgacaaaaatggggatggtttcgtcgatcaggatgaatacattgctgacatgttttcgcacgaggagaacggccctgagccagactgggtattaagcgaaagggagcaatttaacgagttcagggatctgaataaggatggtaaactggataaggacgagataaggcattggatccttccgcaagactacgatcatgcccaggccgaagctcgccacctggtatacgaaagtgataaaaataaagatgaaaaactaaccaaggaagaaatactggagaattggaatatgtttgtagggagtcaggccacaaattatggagaggacttaaccaaaaatcacgatgaattatag

SEQ ID NO: 249084 - RNA, 1422 nt, synthetic construct
  misc_feature 1..1422: note = Description of Artificial Sequence: Synthetic coding sequence
  source 1..1422: mol_type = other RNA
atgaagagggcatcagctggcggaagccgattactagcatgggtgctgtggcttcaagcctggcaagtggctgctccatgcccaggcgcctgtgtgtgttataacgaacctaaagttactacgagttgcccccagcagggattgcaggccgtgcccgtaggcattcctgccgccagccaacgaatatttctgcacggtaataggatttcgcacgtccccgccgcctcatttagagcctgtaggaacttgaccatcctgtggctgcatagcaacgtgcttgcccgcattgacgctgcagcttttacaggactcgctctgttagaacaactggatctgtccgataacgctcagctgcggtccgtcgatcccgcaacctttcacggcttaggccgcttacatacacttcatctggatagatgcggacttcaggagctgggaccaggactgtttagaggactggcggccttacaatacctgtacctccaggacaacgcactgcaggctttgcccgatgatactttccgagatctaggcaatctgactcatctgttcttacacggaaaccgaatctccagcgtacccgaacgcgcgtttaggggacttcatagcttagaccgactgctattgcatcagaatagagtggcccacgttcatccccatgctttcagagacctcggaagactgatgacactgtacctcttcgctaacaacttgtccgctctgccaacagaggcactggcaccattgcgtgcattgcagtacttgagactcaacgacaatccatgggtttgcgactgtcgtgcccgacccctgtgggcctggctgcagaaattccggggcagctcaagtgaagtgccatgtagcctcccccagcgcctggccggccgggacctcaaacgccttgcggctaacgacctccaggggtgcgccgtagccacgggcccttaccatccaatctggacaggcagagctacggacgaggagccactgggccttcctaagtgctgccaacctgacgctgccgataaagcatccgtgctcgaacccggcagaccagcctcagcggggaatgccctgaagggacgcgtgccaccaggagacagccccccaggaaatggatcaggtccaagacacatcaatgattctcccttcggaactctgcccgggagcgctgaacctccattaaccgcggttcgtcctgagggatcagagccacccggtttccctacatccggaccacggaggcgtccaggatgctcgagaaagaatcgcaccaggagccactgccggctagggcaggcgggcagtggaggcggcggaactggtgactccgaaggttcgggcgcacttccttctttaacttgctctcttacccctctaggactggctcttgtgttatggactgtgctgggaccttgttag

SEQ ID NO: 249085 - RNA, 2949 nt, synthetic construct
  misc_feature 1..2949: note = Description of Artificial Sequence: Synthetic coding sequence
  source 1..2949: mol_type = other RNA
atgctcccctcctccagttggggcaagcgcaaattaaggggtagattgggttgggtgcgctctgatgcccgcggcgttatgtgggctaggcaggagggtcttcatcacccacacccgcacgctgtgatcagatgccccagtagtagctctagctctgtatcatgttcgggggattcagaggaagaagacatgggattactggaggtgagcgtctccgacatcaaacctcccgcccccgagctgggtcctatgccagaggggctctccccgcaacaagtagttcgcagacacattttagggagcatcgtgcagtccgaaggctcatacgtagagagcttaaaaagaatactgcaggactacagaaacccgctgatggagatggaacctaaagcactcagcgcccgcaaatgccaggtggtgtttttcagagtgaaggaaatattgcactgtcactccatgtttcagatcgcactatccagccgggtcgccgaatgggacagcactgaaaaaatcggggatttgtttgtcgcctcggatatgcttaagaataccccacgcgggcacccagaccgcctgagcttacaactggcccttaccgaattagagacacttgccgaaaagctgaatgagcagaaaaggctcgccgaccaggtggcagagatccaacaattaaccaaatccgtcagtgaccgatcctcgctaaataagctcttaacatctgggcaaaggcagctgctgctgtgcgaaaccttaactgagacagtctatggcgatagaggacagctcatcaaatcaaaagagcgcagggtcttcctgttaaacgacatgttagtttgcgccaacattaactttaagggccagctggagattagttcactggtgcctctgggccctaagtacgttgtgaaatggaacacggcattaccacaggtccaggtggtcgaggtcggacaagatggaggtacgtatgacaaggataatgttctcatacagcatagtggtgctaagaaagcgtccgcttcaggccaggcccaaaataaagtgtacctcgggcctccccgtctgtttcaagagctgcaggatttacagaaagacctggcagtggtcgagcaaatcacattattgatctccactctgcacggaacataccagaatctcaatatgactgtggctcaggactggtgtcttgccctacaaaggctgatgcgcgtgaaagaggaagaaatccatagtgccaataaatgccgactccgacttctcctgcccggtaaacctgataagtctgggcggcctatctccttcatggtcgtttttataactccgaaccccctgtcaaaaatcagttgggtgaaccgtctccacctcgccaagatcggactcagggaagagaaccagcccgggtggctctgccccgatgaggacaaaaagtccaaagcacctttctggtgtccaatccttgcctgctgtattcctgcattcagctccagggccctgtcccttcagttgggcgctttagtgcattcccccgtcaactgtcccttattaggttttagtgccgtctccacctccctgccacaaggttacttatgggtggggggaggtcaggagggagccggcggtcaagtcgagatttttagcctgaatagaccctcccctagaacagtgaagagcttccctcttgcagcccccgtactgtgtatggaatatattcctgaactcgaggaggaagccgaatccagagacgagtccccaaccgtcgcggatcccagtgcaacagttcatcccacaatttgcttaggactccaggatggatctattctgctgtattcaagcgttgatactggaacccagtgtcttgtctcttgccgaagtcctggccttcaaccggtactgtgccttcgacactccccgtttcatctgctggcagggttgcaagatggaaccttggcggcctaccccagaacgagtggcggcgtactgtgggatctggaaagcccccctgtgtgcctgactgtgggacctggacctgttagaacgcttttgtccctagaggatgctgtgtgggcgagctgtggtccatgggttaccgtgctagaagccacgacgctgcagccccagcaatctttcgaagcacaccaagatgaagccgtgagcgtcacccatatggtcaaggctggcagtggtgtctggatggccttttcctcaggtacatctatcagactgtttcacaccgagacccttgagcatctgcaagaaataaatattgctacccgcacaaccttcctgctgcctgggcaaaaacacctgtgcgtgacgtctttgttgatatgccaaggactgctttgggtgggaactgaccagggcgtgatagtgctgcttcccgtgcctagactggaagggatccctaagatcactggcaagggtatggtaagtctcaatggccactgtggacctgttgcatttcttgccgtcgcaacctccattttggcccccgacatcctcagatccgaccaagaggaagcagagggccctagggccgaggaggacaaacccgacggacaagcacacgaaccaatgcccgatagccatgtaggcagagaactgacaagaaaaaaggggattctcttacagtatcggctccgctccaccgcacacctgcctggaccccttctttcgatgagagaaccggcgccagcagatggtgcagcactggagcatagtgaggaggatggttcaatatacgaaatggcagatgatcccgacatatgggtgagaagtagaccctgcgctagggatgctcacagaaaagagatttgttcagttgccatcattagcggcggccaggggtataggaactttggatctgccctggggagctccggcagacaggccccctgtggagagaccgacagcaccctcctgatatggcaggttcccttgatgttgtag

SEQ ID NO: 249086 - RNA, 4794 nt, synthetic construct
  misc_feature 1..4794: note = Description of Artificial Sequence: Synthetic coding sequence
  source 1..4794: mol_type = other RNA
atggaagccgaagaggcccagcgcggtgcttcaccccccatcagcgctatcgaagaattcagtataatcccagaagctccgatgcgttccagccaggtctccgccctaggattagaagctcaggaagacgaggacccatcatacaaatggcgagaggagcatcgccttagtgcgacccagcagagcgagctgagagacgtctgcgattatgccattgagactatgccgagctttcctaaagagggttctgcagacgttgaaccaaaccaagagtcactggtggccgaggcttgcgacactcccgagcactgggaggccgtaccacagagcctcgccggcaggcaagcaagaactcttgccccccccgaactatgggcgtgccctatacagtcagaacatcttgacatggcaccattctcaagcgatttaggatccgaagaagaagaagtagagttttggcccggcctgacatcattgactttgggtagcggacaggcggaggaggaggaggaaacatccagcgacaatagtggacaaacgcgctactattcaccctgcgaggaacaccccgctgaaactaaccaaaacgaaggcagcgaatccggaaccatacggcagggggaggaactccccccagaggaactccaagagagccaggggttgctgcatccacaagaagtacaggtcctggaggagcaaggacaacaggaagccggatttcggggcgaaggtactctcagggaagacgtgtgcgccgatggacttttgggcgaggaacaaatgatcgagcaggtgaatgatgaaaaaggagaacagaagcaaaaacaagaacaggtacaggatgtaatgttaggtagacagggcgagcggatgggactcaccggagagccggaagggctaaacgatggagagtgggaacaagaggacatggagagaaaggcccagggacaaggaggccccgaacagggcgaggagaggaaaagagagttgcaagtacccgaagagaaccgggccgatagccaagatgaaaagtcacagacatttctggggaagtctgaggaggtcacaggcaaacaagaagaccacggtatcaaagaaaagggcgtgcccgtttcaggtcaggaggcaaaggagcccgaatcttgggatggagggcgattaggcgcagttggcagggcgagaagtagggaagaagagaatgagcaccatggcccgtcgatgcccgcccttatagcccccgaagattccccacactgtgacctgttcccaggagctagctacctcatgacacagatcccaggaacccaaaccgagtctagagccgaggaactgagcccggctgctctgagcccatccctggaacccatccgctgtagccaccagcccatatctctcttggggtctttcctgaccgaggaatctcccgacaaggaaatagaccaaaacagccagcaagaagaatccaggctgagaaaaggtaccgtatcatcacaagggaccgaagttgtctttgctagcgccagcgtgacacctcctcgcacacctgattctgccccaccttcccctgcggaggcatacccgattacccctgcaagcgtttctgcacgtcctcccgtcgcatttcccagaagagaaactagctgcgccgcgcgggcccccgaaactgcttctgctccactatctatggacgatcccagcccatgcgggacttcagaaatgtgccctgccgccctttacggcttccctagcacaggtactagccctccacgccccccagccaactcaacaggcaccgtgcagcacctacgttctgactccttccccggatctcatagaactgaacagacgccagacctggtcggtatgttgttaagctattcacacagcgagcttccacagaggcctccaaaaccagccatctacagttcggttacaccacgccgggacagacggtccggtcgtgattactctacagtctcagcaagtccgacagccctgtcaaccctaaaacaagattctcaggaatccatatccaaccttgagagaccctcctctccgccctctatccaaccgtgggtttcaccgcacaatcccgctttcgccacagagagcccagcttatgggtcatctcccagtttcgtgtcgatggaagatgtacggatccatgaacctttacccccacctcccccccagaggcgcgatacccaccctagcgttgttgagactgacggccacgctagagtcgtggtgcccacacttaagcagcacagtcacccaccaccattagctctgggtagtggcctccacgccccacataaagggccccttccacaagccagcgatcccgccgtcgcccgccagcaccgacccctaccctccacccctgattccagtcaccatgcacaggccacaccacgatggaggtacaataagcccctccctccaactcccgatcttccccagccccacctacctcccatctcagccccaggctcaagtaggatttacagaccccttcctccactgcctataatcgatcccccaacagagccaccccctcttccccccaaatccagaggacggtcaaggtccaccagaggcggacacatgaatagtggcggccatgctaagaccagacccgcttgccaggactggaccgttccattgcccgcctcggcaggacgcactagttggcccccggcgacggcaaggtctacagaaagttttacatcaacctcccgatctaaatctgaggtaagtccaggaatggcatttagtaacatgacaaattttctgtgtcccagtagtccaacaactccgtggaccccagaactccagggacccacctcaaaagatgaagccggcgttagcgaacaccccgaagctccagcccgagagccactgaggaggacaactccacaacagggagcctccggaccaggacgaagtccagtcggtcaagccagacagcctgagaaaccatcacacttacacctcgaaaaagcctcttcatggcctcacagaagagattcgggccgaccccctggagactcctcaggccaagctgtggccccaagcgaaggggccaataaacacaaggggtggtcccgacagggactgagaaggccatccatcctccctgaaggaagttccgactccagaggccccgctgtggaaaagcatccagggcccagcgacaccgtggtatttagggaaaagaaaccaaaggaagtgatgggcgggttcagtagaagatgttctaaacttatcaattcctcccaactgctgtatcaggaatactctgatgtagtcctgaataaagagatccagagccagcaacgattggaatcacttagtgagacacccggaccaagctccccccgtcagccccggaaagcactagtgagttcagaatcttatctgcaaagactgagcatggcgtcttcaggatcactgtggcaggaaatacctgttgttaggaattcaaccgtgctgctgtccatgacccatgaagatcaaaaactccaggaggttaagtttgagcttattgtctccgaagccagctatttaagatcactgaacattgccgtggaccacttccagctgtcaacatccctacgagccaccctgtcaaaccaggaacaccaatggctcttctccagacttcaggatgtgagagacgtttcagcaactttcttatcagatctagaggaaaatttcgagaacaatatcttctcttttcaggtgtgtgacgtagtgctcaatcacgctcccgactttaggcgggtctaccttccttatgtgactaaccagacttatcaagaaagaacatttcaaagcttgatgaactccaacagcaacttcagagaagtgctcgagaagctcgagtccgatcccgtgtgccagagactgtcgctcaaatcatttcttattctgccatttcaaagaattactcggttaaagttattgctgcagaatattcttaaacgtacacagcccggaagtagcgaagaagctgaagccactaaagctcaccatgcactcgaacagcttattcgggattgcaataacaacgtgcagagcatgaggcgcaccgaagaactgatttatttgtcgcaaaagatcgagttcgaatgtaaaattttccctctgatttcccagtcccgctggttggttaaaagcggcgagctcaccgctctcgaattctccgcgagccccggcctgaggaggaagcttaacacacgaccagttcacctacacctattcaatgactgcctgctgctttcccgacccagggagggatcccgattccttgtgtttgaccacgcgccattttcttccatacggggcgaaaaatgtgaaatgaagttgcacggacctcacaagaacctctttagactctttttaagacagaacacccagggcgcccaggccgagttcctctttcggaccgaaactcaatccgaaaaactgagatggattagcgcccttgccatgccccgagaggaacttgacctgctagagtgctataacagccctcaagtgcagtgcctgcgggcttacaagccaagagaaaatgatgaactcgccctcgagaaggccgatgtagtgatggtaacccagcagtcgagtgacggctggttggaaggggttagactgtcagatggtgagagaggttggtttccagtacagcaagtagagtttatatccaacccagaagttagggcccagaacttgaaggaggctcatagagtgaaaacggccaagctgcaattggttgagcaacaggcatag

SEQ ID NO: 249087 - RNA, 573 nt, synthetic construct
  misc_feature 1..573: note = Description of Artificial Sequence: Synthetic coding sequence
  source 1..573: mol_type = other RNA
taaccacaaggtgttgacattagacataacaaggatagaaaggttcgccgaaaagaaccaaaatcgcaggacatctatttgcgtctattagtgaaattataccgatttttggccagaagaacgaattcgaccttcaatcaggtagtgctgaagcgcttgtttatgtccagaactaatcggccccccttgtccctttcacgtatgatacgcaagatgaagctccctggcagagagaataaaaccgctgtcgtcgtaggcaccattacagatgacgtacgggtccaggaggtccccaaactgaaagtctgcgcactccgggtcacctcgcgagcaagaagtaggatcctaagggcaggcggcaagattctcaccttcgatcaattagctctggatagccctaaaggctgtggtactgtgttgttaagtggcccccgcaaaggacgcgaggtatatagacatttcggcaaggcgccgggtaccccacattcccacaccaagccttacgttcgcagtaaggggaggaaatttgagcgagctagaggcagacgtgcttcccggggctacaagaactag

SEQ ID NO: 249088 - RNA, 360 nt, synthetic construct
  misc_feature 1..360: note = Description of Artificial Sequence: Synthetic coding sequence
  source 1..360: mol_type = other RNA
atggctttcaaagatacaggcaagactccagttgaacctgaagtagccatccaccgcattaggatcactcttacctcaagaaacgtaaaaagcttggaaaaagtgtgcgcagacttaataaggggcgcgaaagaaaagaatctgaaagtgaagggtccggtgaggatgcccacaaaaactcttagaataacaacacgcaagaccccctgcggcgaaggaagtaagacatgggaccggtttcagatgaggatccacaaacgactgatagacctgcactcaccttcagaaatagtgaaacaaattaccagtatttcaatagaacccggagtggaagttgaagtaactattgcagatgcatag

SEQ ID NO: 249089 - RNA, 1998 nt, synthetic construct
  misc_feature 1..1998: note = Description of Artificial Sequence: Synthetic coding sequence
  source 1..1998: mol_type = other RNA
atgactagcgcaaacaaagctattgaacttcagctgcaggttaagcagaacgcagaggagctacaagattttatgcgagatctggagaactgggagaaggacataaaacagaaggatatggagttgcgaagacagaatggcgtccccgaggagaatctgcctccaataagaaacggtaatttcaggaagaagaaaaagggcaaggctaaagagagctcaaagaagacccgggaagagaacactaaaaacaggattaagtcatatgattacgaggcctgggcaaaacttgacgtggacaggatactcgacgagttagataaggacgacagcactcatgaaagtctatctcaagagtccgagtctgaagaagatggcatccacgtggattcccaaaaagcgttagttctgaaggagaaaggcaataaatacttcaagcagggtaaatacgacgaggccattgattgctataccaaaggcatggatgctgacccctataatcctgtcctgccaactaatagagcctcagcttatttccgtcttaagaagttcgccgtcgctgagtccgattgcaacctcgccgtcgcactgaatcgtagctataccaaggcctactccaggcgaggtgccgcccgatttgctcttcaaaagttggaagaagcaaagaaggactatgagagagtattagagctggaaccaaataattttgaggccaccaacgaattacggaaaatttcacaggctctggcaagcaaagagaatagttaccctaaagaagcggatatcgtgattaagagcaccgaaggagagcggaaacagattgaagcacagcaaaacaaacagcaggccattagcgaaaaagatcggggcaatggtttctttaaagaaggtaaatacgagagggctattgaatgctacaccagaggaattgccgcagacggcgcaaacgcactgttacccgccaatagagccatggcctacctaaagatacaaaaatacgaagaggcagagaaggactgcacacaggctatccttttggatggcagttatagtaaggcatttgctagaaggggtacggccagaacctttctcggtaagcttaacgaggctaaacaggatttcgaaactgtgctgctcttggagccaggtaataaacaggcagttaccgagctctcgaaaatcaagaaagaactgatagaaaagggccattgggacgatgtgttcttagactctacccagagacagaacgttgtaaaacctatcgacaatcctccacatcccggtagtactaagcctctaaagaaggttataatagaagaaactgggaacctgattcaaaccattgatgtccctgatagcacaactgccgccgccccagaaaataaccccatcaatctggctaacgtgattgcagctaccggaaccaccagtaagaagaatagctcccaagacgaccttttccctacaagcgataccccccgcgcaaaagtgttaaaaatagaggaggtatcagacacatcctcccttcagcctcaggcctccttaaaacaggatgtgtgtcagtcctatagtgagaaaatgcctatagagatcgaacagaaacctgcccagtttgccactaccgtcctcccacccataccagccaattcgtttcagcttgagtccgattttcgccagctcaagtctagcccagacatgttgtatcagtaccttaagcagatcgagccgtccctgtacccaaagctctttcagaaaaatctagaccccgatgtgttcaatcagatcgtgaaaatactccatgacttttatattgaaaaggagaaacccctcctaatatttgagattctgcagcgtttaagtgaattgaaacgattcgacatggctgtcatgtttatgagtgagactgagaagaaaattgccagagctctttttaatcatattgacaaatctggactaaaagattcaagcgttgaggagctgaaaaaaagatatggaggatag

SEQ ID NO: 249090 - RNA, 636 nt, synthetic construct
  misc_feature 1..636: note = Description of Artificial Sequence: Synthetic coding sequence
  source 1..636: mol_type = other RNA
atgatcagtcgtatggaaaagatgaccatgatgatgaaaatactgataatgtttgcccttggtatgaattattggagttgtagcggctttcccgtgtatgactacgacccctcaagcctccgagacgcattatcagccagtgtggtgaaggtgaactctcagtccctgtccccctacctcttccgtgccttccggagttcgcttaaacgggtcgaagttctcgatgaaaataatctggtaatgaatttggagttttccatccgcgaaaccacctgtcggaaagattcaggagaggaccccgccacatgcgccttccaacgggactactacgtctctacagccgtctgtcgttctaccgtaaaggtatcggcccagcaagtacaaggggttcatgcgcgctgttcctggtcctcttccacctcagaaagctattctagtgaggagatgatttttggagacatgttgggctctcacaagtggaggaataattacctttttggcctcataagtgacgaaagcattagcgaacagttttacgatcgtagcctgggtatcatgcgacgcgttctacctcctggaaacagaaggtatcctaatcatagacacagggccagaattaacaccgacttcgaatag

SEQ ID NO: 249091 - RNA, 1323 nt, synthetic construct
  misc_feature 1..1323: note = Description of Artificial Sequence: Synthetic coding sequence
  source 1..1323: mol_type = other RNA
atgcgccctcatctctccccaccgttgcagcagctcctactacctgtgctgctggcgtgcgctgcacactccacaggcgctctaccccgcctatgcgatgtcctacaggtgctctgggaagaacaagatcagtgcctgcaagagctttctcgggaacaaacaggcgatctcggtactgaacaacccgtgcctggatgtgaggggatgtgggacaatatcagctgctggcccagctcagtgcccggaagaatggtggaagtggaatgcccccgattcttgagaatgctgacctctcgtaatggctcgctttttagaaactgcacccaagacggctggtcggaaacattccctcgtccgaatttggcatgcggggtcaacgttaacgactcaagcaatgaaaaacgccactcttacctgctcaagttgaaggtgatgtataccgtaggctattcctcatccctggttatgcttctggtggcactcggcatactgtgcgcttttagacgactgcactgtacccgtaactacatccacatgcatctgtttgtgagttttatacttcgcgctctgtccaattttatcaaggacgccgtcctattttctagtgacgatgtgacctactgcgatgcccaccgcgccgggtgcaaacttgtgatggtactctttcagtattgtataatggcaaactattcatggcttctcgtggaaggactatacctccatacattactcgctattagcttttttagtgagcggaaatatctgcagggcttcgttgcatttggatggggtagcccggctatattcgtagctctttgggcgattgcccgacattttctggaagacgtcggctgctgggatatcaacgccaacgcttctatctggtggattattcgtggcccagttatactatccattctgatcaatttcatactgtttataaatatcctccggatcctcatgagaaaattgcggactcaggaaacaagaggaaacgaggtgtcccattataagcgattagctagatcaacattactcctgattccattatttggaattcattatatcgtatttgcattcagccctgaggacgccatggagattcagctgtttttcgaactcgcattaggcagctttcaaggccttgtggtagcggtcttgtattgcttcttaaatggagaggtccaattggaagtgcaaaaaaaatggcagcagtggcatctacgggaatttccactccatcctgtcgcttcattcagcaactccacaaaagcttcacatttggaacaatcacagggaacatgtagaactagcattatatag

SEQ ID NO: 249092 - RNA, 363 nt, synthetic construct
  misc_feature 1..363: note = Description of Artificial Sequence: Synthetic coding sequence
  source 1..363: mol_type = other RNA
atgaaacttttaatggtcctgatgctcgccgccctcagtcagcactgctatgccggctccggatgtcccctcctcgaaaacgtaattagtaaaaccatcaatccccaggtttccaaaaccgagtataaggaactgttgcaagaattcattgatgataatgcaacaacaaacgcgatcgacgagctcaaggaatgctttctcaatcagaccgacgaaaccctatcaaacgtcgaggtgtttatggtcatctcattttcatcatacaagctttttaagtctcccgatcaaggtcaggtgggttcctctttccttactgataacgcaaaagccacctccgagcaggccttttcttacataggttag

SEQ ID NO: 249093 - RNA, 1092 nt, synthetic construct
  misc_feature 1..1092: note = Description of Artificial Sequence: Synthetic coding sequence
  source 1..1092: mol_type = other RNA
atggcaatgagacagacaccactcacatgcagcggtcatacaagacctgtggtcgatttggcatttagtggaatcacaccttacggttatttcctgatttctgcatgcaaaggcgcaggacagcatctccctcgcttatctggacagcatgatggtaaacccatgctacgccagggcgataccggcgactggataggaaccttcctgggtcacaaaggggccgtgtggggcgctacattgaataaggatgcaacaaaagccgcaacagccgctgccgacttcactgccaaggtgtgggacgcggtgtctggggacgagctaatgacgttagcacataagcacattgtgaagacggtagattttacccaggacagcaactaccttctgaccggcggacaagacaaactgctgcgcatctatgatttgaacaaacccgaagccgaacccaaagaaatcagtggtcacacttccggaattaaaaaagctctgtggtgttctgaagataagcaaattctgtcagctgacgataaaactgtccggttgtgggaccacgcgaccatgaccgaagttaagtctctcaatttcaatatgagcgtgtccagcatggaatacatccctgagggcgaaatcctagttattacatacggcaggtctatagcctttcacagcgctgtcagtctggacccaatcaaatcattcgaggctcctgctacaataaactcagccagcttacatcccgaaaaggaattcttagtggccggaggtgaggactttaagctctataaatacgattataacagcggcgaggaactcgaaagctataaaggtcactttggcccgatacattgcgtgcgcttttcacctgatggcgaattgtatgcttctggtagtgaggacggaactctcagattatggcagactgttgttggaaagacctacggactgtggaaatgcgtactaccagaggaagactcaggtgagctagctaagccaaaaatcggcttcccagagaccacagaagaggagcttgaggaaatcgcatctgaaaactcggattgtatcttcccatccgcgccagacgtaaaggcctag

SEQ ID NO: 249094 - RNA, 1335 nt, synthetic construct
  misc_feature 1..1335: note = Description of Artificial Sequence: Synthetic coding sequence
  source 1..1335: mol_type = other RNA
atgaaagtcgtcccatccctcctattgagcgtactccttgctcaagtttggctggtcccgggtctggcacccagccctcagagtcccgaaacacccgcaccacagaaccagacgtcaagggtggtacaagcacccaaagaagaagaggaagatgaacaggaggcttcagaagagaaagcaagtgaggaagagaaagcatggctgatggcctctcgccaacaactggccaaggaaacatccaacttcgggttctctctgctgcgcaagattagtatgcgccacgatggaaatatggtgttctccccattcggaatgtcccttgccatgaccggattgatgttaggggctaccggtcccaccgaaacacagattaagcgtggcctacatctccaggccttgaagcctaccaagccggggttactcccatctttgtttaagggtctaagagaaaccttgtctcgaaacctggagctcggcttaacccaaggaagcttcgccttcatccacaaagactttgatgtgaaagagacgttttttaacttgagcaagcgctatttcgatactgaatgcgtaccaatgaatttcaggaacgccagccaggccaaaagactgatgaatcattatattaacaaggagaccagaggaaaaatacctaaactcttcgacgaaataaaccccgagacgaagctcatccttgtggattatatcttatttaaagggaaatggctaacaccgtttgatccagtcttcacagaagtggatacctttcatctcgacaagtacaagacgatcaaggtacctatgatgtacggagccggtaaattcgcaagcacctttgataaaaacttccgatgccatgtccttaaactgccataccagggaaacgctacaatgctcgtggtgctgatggaaaagatgggcgatcatctggccctcgaggactatcttaccaccgacttagttgagacctggctgcgcaatatgaagacccgcaatatggaagtcttttttcccaaattcaagctagaccagaagtatgagatgcacgaattactcaggcagatgggcattcgtcggattttctctccctttgcagacctgtcggagctgagcgcaacaggaagaaacttgcaggtcagtagggtgcttcaacgcacagtaatcgaagtagatgaaaggggtacagaagccgtggctggcattttgagtgagattactgcttacagcatgcccccagtgattaaagtggatagaccctttcatttcatgatatacgaggagacctccggaatgttactttttttaggcagagttgtgaacccgaccctcttgtag

SEQ ID NO: 249095 - RNA, 1335 nt, synthetic construct
  misc_feature 1..1335: note = Description of Artificial Sequence: Synthetic coding sequence
  source 1..1335: mol_type = other RNA
atgaaggtggttccctcactgcttctgagcgtactattagcccaagtgtggctggttcccggacttgctccttcaccccagagtcccgagacacccgctccacagaaccaaacctcgcgcgttgtgcaagcacccaaagaagaagaggaagatgaacaggaagcttcagaggagaaggcatcagaagaagagaaagcctggctaatggcctcgcggcagcagcttgccaaagaaacatccaatttcggcttcagcctgcttagaaagataagcatgcgccatgatgggaatatggtgttctccccttttggaatgtctctggccatgaccggattgatgcttggcgcaacgggcccgacagaaacacagattaagcggggactccatttgcaagccctcaaacctaccaagcccggcctgctcccttctcttttcaaaggactccgagagacccttagccgcaaccttgagcttgggctgacacagggatctttcgctttcattcataaggactttgatgttaaagagaccttctttaacttgagtaaacgttatttcgacactgaatgtgttccaatgaatttccgaaatgcctcccaggcaaaacgactcatgaaccattacattaacaaagaaacccgcggcaagatccccaagctatttgatgagatcaatccagagacgaagctaatcctggtagattacatcctgtttaaaggtaagtggttaacccctttcgatccagtgttcactgaagttgacacattccacttggacaaatataagacaatcaaagtgccgatgatgtacggagccggaaaattcgcttccacatttgataaaaatttcaggtgccatgtgctgaaactcccctaccagggaaacgctacaatgttggtcgtgctaatggagaaaatgggggatcacctagccctcgaggattatctcaccacagacctagtagaaacctggctgcgtaatatgaagactcggaatatggaggtcttcttccccaagtttaaactggaccaaaaatatgagatgcatgaactgctgcgacaaatgggaatcaggagaatcttttcgcctttcgctgacctgagcgaattgagtgctactggccggaacctgcaggtatctagagtgctccagcggaccgtaatcgaggttgacgaaagaggtacagaggcagtagcaggtatcttatccgagatcaccgcatattcgatgcccccagtcattaaagtcgacaggcccttccatttcatgatctatgaagaaacttccgggatgttattgtttctcggtcgcgtagtgaaccccaccctcctttag

SEQ ID NO: 249096 - RNA, 1335 nt, synthetic construct
  misc_feature 1..1335: note = Description of Artificial Sequence: Synthetic coding sequence
  source 1..1335: mol_type = other RNA
atgaaagttgtcccctccctgctgctgtccgtattgctagcgcaagtgtggcttgtgcctggactagcgccgtcaccacaaagcccagaaactccagcccctcagaaccagacctcacgggtggtgcaagcgcctaaagaggaagaagaagacgagcaggaagcgtctgaagaaaaggcgtcagaagaagaaaaagcatggctcatggcctctcgtcagcaattagccaaagagacctcaaattttggtttctcattgctgcgaaagatctcaatgcgacatgacggaaatatggtgttctccccttttggtatgagtctggcgatgactggccttatgttaggcgcgactggaccaaccgaaacacagatcaaacgcggcctgcatctccaggcccttaaacctaccaaacccggattactgccatccctgtttaaggggctccgggaaaccctctcacgaaacctggaactcggcctaacacaggggtccttcgcattcattcacaaggactttgatgtgaaagagacttttttcaatctctcaaaacgctactttgataccgaatgcgtccccatgaactttagaaacgcctcccaagccaaacggctgatgaatcactatatcaacaaagagacacgcggaaagattcctaagcttttcgatgagattaatccagaaactaagttgattctcgtggactacatactcttcaagggaaagtggctcaccccctttgatcccgtttttaccgaggtcgatacttttcacctggataaatataaaaccattaaagtaccaatgatgtacggtgctggaaaatttgcctctacttttgacaagaatttccgatgccatgttctgaaacttccataccagggcaatgccaccatgctggtggtactcatggaaaagatgggcgaccaccttgccctcgaggattatttgacgacggacttagtggagacatggctgcggaacatgaaaaccaggaatatggaagtgttttttcccaaatttaaactggatcagaaatacgagatgcacgagctcctccgacagatgggaattcggcgaatatttagtccattcgcggaccttagcgaactctcagccaccggaagaaacctgcaagtgagcagagtcctgcaacgcactgtgatcgaggtagacgaaagaggaaccgaggcagtggccggcattctgtctgagataactgcctattcaatgccccccgttattaaggtggatagaccttttcattttatgatatacgaagaaacatcaggtatgttactgttcctcggccgcgtggtgaatccgactcttctgtag

SEQ ID NO: 249097 - RNA, 1455 nt, synthetic construct
  misc_feature 1..1455: note = Description of Artificial Sequence: Synthetic coding sequence
  source 1..1455: mol_type = other RNA
atgagtaggagcacacaagagttgcttgggtaccattgtcgtcttcaggataaattgcaagaacaggaaggaagtctggcagccgagggccggcatagtttggcctcagccgctgatcacatgaaagtcgtcccaagcttgttactgtcagtgctcctggcacaggtctggctcgttcccggtctggccccatcccctcagtcccccgagactccagcacctcaaaatcagacatcccgagtggtccaagccccaaaagaagaggaggaggacgagcaggaagctagcgaggaaaaggcctctgaggaggagaaagcttggctgatggcgtccaggcagcaattagctaaagaaacttccaatttcggattctcactgctcaggaagatcagtatgaggcatgatggtaatatggttttctcccccttcggtatgtccttagccatgaccggcctgatgttgggcgctaccggccctaccgagacacagatcaagagaggacttcacctacaggccctgaaacctactaagcctggattgcttccctcactgtttaaaggactgagagaaacactgtcacgcaatctcgaactggggctaacgcaaggctcttttgcattcatccacaaagacttcgacgtgaaagagacctttttcaacctgagcaaacggtactttgacaccgagtgtgtgcctatgaattttcgcaacgcttcccaggccaagcggctgatgaatcattatatcaacaaggagaccagaggcaagattcccaagctgttcgatgaaatcaacccagaaacgaaactcatactggtggattatatcctatttaaaggtaagtggctgaccccctttgaccctgttttcaccgaggtagatacctttcacctggataagtacaaaaccattaaagtaccaatgatgtacggcgcgggtaaattcgcctccacattcgataaaaattttcggtgccatgttctgaaactgccttaccagggaaacgctactatgcttgttgttcttatggaaaaaatgggtgaccacctggctttagaggattacctgactactgatctggtggaaacttggttgcgaaacatgaaaacaaggaatatggaggtcttcttccctaaattcaaactcgaccagaagtacgaaatgcacgagctgctgcgccagatgggaatacgacggatctttagcccttttgcagacctcagtgaactgagcgccaccggcagaaatctccaagtttccagagtgctccagaggacagtgatagaagtcgatgaacgaggcactgaagccgtcgccgggattctctccgagataacagcttattctatgcccccagttatcaaagtggataggcccttccatttcatgatctacgaagaaacctccggaatgcttctattccttggcagagtagtcaaccccactttactatag

SEQ ID NO: 249098 - RNA, 1197 nt, synthetic construct
  misc_feature 1..1197: note = Description of Artificial Sequence: Synthetic coding sequence
  source 1..1197: mol_type = other RNA
atgaactggcatctccccctatttttattggcatccgtgacacttccgtccatatgttcccactttaatcctctcagccttgaggaattaggctctaataccggaattcaggtgttcaatcagattgtcaagtcacggcctcatgacaacatagtgatctcacctcacggtatcgccagcgtgcttggaatgctacagttgggcgctgatgggagaactaaaaagcagttggccatggttatgcggtatggtgtgaacggggtaggcaaaattctaaaaaaaatcaacaaggcaatagtgagcaagaaaaataaagatattgtcaccgtggccaacgctgttttcgtcaaaaacgcatccgagattgaagtgccattcgttacgaggaataaagacgtttttcagtgcgaagtacgaaacgtgaacttcgaagaccccgcctccgcctgtgattctatcaacgcctgggtgaaaaacgagactagggatatgattgataacctactgtcaccggatttaatcgacggggtgctgaccagactcgtattagtgaatgctgtttatttcaaaggactgtggaaatctcggttccaacctgaaaacacaaagaaacgcacctttgtggcagcagacggcaaatcgtatcaagtgccaatgctcgcacagctctctgtgttccgctgtgggagtacatccgcaccaaacgacttatggtacaacttcatcgaactgccataccacggagaaagcatctctatgctgatcgcccttcccaccgagtcttccacccccctttccgccatcatccctcacatctctaccaaaacaattgactcttggatgagtatcatggtgcccaaacgagttcaagtcatacttccaaagtttacagcagtcgcccaaaccgatttaaaagagccactgaaagtgcttggaatcacagatatgtttgatagcagtaaagcaaattttgccaagattactacaggctcagaaaatctacatgtctctcatatccttcagaaggccaaaattgaagtatctgaggatggtaccaaggcatccgctgctacgaccgccattttgatagctcgctccagccctccttggttcattgttgatcgcccgtttctgttctttattcgtcacaatccaacgggagccgttttgtttatggggcagatcaataagccgtag

SEQ ID NO: 249099 - RNA, 1194 nt, synthetic construct
  misc_feature 1..1194: note = Description of Artificial Sequence: Synthetic coding sequence
  source 1..1194: mol_type = other RNA
atgaattggcatttacccctcttcctattggcaagtgtaacgctaccctcgatttgttcccattttaacccattgtcgctcgaagaacttgggtcaaacaccggcatccaggtctttaaccagatagtaaagagtcgcccccatgacaatattgtaatctctccacacggcatcgcttcagtgcttggaatgctgcaactaggggcagacgggagaaccaagaagcagttggccatggtgatgcgttatggtgtgaatggagttggtaagattctgaagaagatcaataaagctatcgtgtcaaaaaaaaacaaggacattgtgacggttgctaatgctgtgtttgtaaaaaatgcctccgaaatcgaggttcctttcgtcacacgcaataaggatgtattccaatgtgaagtccgcaacgtgaattttgaggatcctgcttccgcttgcgacagtattaacgcttgggtcaagaatgagacacgtgacatgatcgacaatctccttagcccagatctgattgatggcgtgctgactcgccttgtgttggttaatgccgtgtactttaaaggactgtggaaatcaagatttcagccggagaacactaagaagaggacctttgtcgcagctgacggcaaaagctaccaagttcccatgctcgcgcaattgtctgtgtttcgatgtggtagcacttctgcacccaatgatctttggtataactttatcgaactgccataccatggagaaagcatttccatgttgatagccctgcccactgaatcttccactcctttgtccgctattatcccccatatctccaccaagactatcgacagctggatgtctattatggttccaaagcgagtccaggtgatactgcctaagttcactgccgtagcacagactgatttaaaagagcctttgaaggttttaggtataactgacatgtttgatagcagtaaagctaattttgcaaaaattacaagatccgagaatctccatgtgtcacacattctccagaaggccaaaattgaggtgagcgaagacggcacaaaagcgagcgctgcaactaccgcaatcctgatcgccagatctagtcctccttggtttatagttgacagaccttttctgtttttcatcagacacaatccaaccggcgctgtgctgtttatgggacagatcaataagccgtag

SEQ ID NO: 249100 - RNA, 1194 nt, synthetic construct
  misc_feature 1..1194: note = Description of Artificial Sequence: Synthetic coding sequence
  source 1..1194: mol_type = other RNA
atgaactggcatcttcccctctttctccttgctagcgttactctcccgtccatctgttcacacttcaaccccctgagtttggaagaactcggcagcaacactggaattcaggtctttaaccagattgtgaaatctcggcctcacgataatattgtaatttcaccgcatggaattgcctccgtcctagggatgcttcagctcggtgcagacgggaggacgaagaaacaacttgccatggtcatgagatatggcgtgaatggggtcggaaaaattttaaagaaaattaacaaggccatagtgagtaaaaaaaataaggacattgtgacagttgccaatgccgtctttgttaaaaacgcttcagaaatagaagtgccctttgtgacaagaaataaagacgtctttcagtgtgaggttaggaacgttaactttgaagaccccgccagtgcctgcgactcaataaatgcctgggtaaaaaatgagaccagagacatgattgataatctgttaagtcccgatctgatcgacggtgtgctgacccgactcgtcctcgtgaacgctgtgtatttcaagggcctctggaagtcacgatttcagcccgagaatactaagaagcgcacgtttgtcgctgcagatggaaaatcttaccaagtacctatgcttgcccagttgtccgtgttccgatgtggctcgacatccgctcctaatgacctctggtacaattttatagagctcccttatcacggggaatcaattagcatgctaatcgcccttccaactgaaagtagtacaccactgtcagcgattatcccacatatatctactaagaccatcgattcatggatgtctataatggtaccaaaacgcgtgcaggttatccttcctaaatttaccgccgtggcccaaaccgacctgaaagagccattaaaagtgcttggaattactgacatgtttgattcaagcaaagcaaatttcgccaagataacacgttctgaaaacctgcacgtgtctcacatccttcagaaagccaaaattgaagttagcgaggatggcacgaaagctagcgcagccactacagcaattctcatcgccaggagttccccaccatggttcatcgtggatcggccgttcctgttcttcatcaggcacaatccgactggggcagttctctttatgggccagattaataagccatag

SEQ ID NO: 249101 - RNA, 129 nt, synthetic construct; identical to SEQ ID NO: 248495
  misc_feature 1..129: note = Description of Artificial Sequence: Synthetic coding sequence
  source 1..129: mol_type = other RNA

SEQ ID NO: 249102 - RNA, 831 nt, synthetic construct
  misc_feature 1..831: note = Description of Artificial Sequence: Synthetic coding sequence
  source 1..831: mol_type = other RNA
atgaattggcacctccccctgttcctgctggcatccgttactctgccatccatctgttctcacttcaacccactgtcacttgaggagttaggaagcaatacagggatacaagtgttcaaccagatcgtcaaatcgagacctcacgacaatatagtcatctcccctcacggaatagccagtgttctagggatgctgcagctgggcgcagacggacgcaccaagaaacagctcgccatggttatgcgatatggggtaaacggcgtaggaaaaatactgaagaagatcaataaggctattgtctcaaagaaaaataaagatattgtcaccgtagcaaatgctgtgtttgtgaaaaatgctagcgagatagaggtgcccttcgtaactcgcaacaaagatgtgttccagtgtgaagttagaaacgtcaattttgaagaccctgcctccgcctgcgactctatcaacgcatgggtgaagaacgagacgcgcgatatgattgacaatctgctgagtcctgacctgattgatggtgtgcttacacgcctggtcttagtgaatgcagtatatttcaaaggtctttggaaatctagattccagcctgaaaacaccaaaaaacgtacttttgttgctgccgatggaaaaagttatcaggtcccaatgctcgcccagctaagtgtcttcagatgtgggagcacctccgccccaaatgacctctggtataactttatcgaactgccctaccacggagagtctataagcatgttaatcgcgctccccacagagtccagtacacctctaagcgcaatcatccctcacatatccaccaaaacttag

SEQ ID NO: 249103 - RNA, 1230 nt, synthetic construct
  misc_feature 1..1230: note = Description of Artificial Sequence: Synthetic coding sequence
  source 1..1230: mol_type = other RNA
atgtccgattgcagaagctctctcgtggagggaacaatgaactggcatctgcctctcttcctgttagcatccgtgaccctgcctagtatatgctcccactttaatcctttatcactcgaggagctcggttccaatactggcattcaggtgttcaaccagatcgttaaatctcggccacatgataatatagtgatcagtccgcacgggatagcctctgttctgggtatgttacaacttggcgctgacggacggactaaaaagcagcttgccatggtgatgagatacggcgtaaatggagtgggaaagattttaaagaaaatcaacaaggcaattgtatccaaaaaaaataaagatattgtaactgtagcaaacgctgtttttgtaaagaatgcatctgagatcgaggtaccctttgtgacaaggaataaggatgtttttcagtgcgaagtacgcaacgtaaatttcgaggaccctgcctccgcgtgtgactccatcaacgcctgggtaaagaacgagacaagggacatgattgacaatctgttaagtccagatcttatcgacggagtattaacacggctggtgctagtaaacgcagtttacttcaagggcttgtggaaatcaagattccagcctgaaaacaccaagaaacgtactttcgtagcagctgacggtaaaagctaccaggttcccatgctggcccaactgtctgtgtttcgttgtgggagcacttccgcacctaacgatctgtggtacaatttcatcgagctgccctatcacggcgagtccatttctatgctgatcgcccttcctactgaatcatcaacccctctctcagctatcatcccgcacatttctactaagacaatcgatagctggatgtcaattatggtccctaagagagtgcaggtcatcctccccaagttcacagccgtagctcagacagacctgaaagagcccctcaaagttcttggcattacagatatgttcgattcaagtaaagcaaacttcgccaagataactagatctgaaaatttacacgtctctcatattctccagaaggccaagatagaggtatccgaggatggtacaaaggcttcggctgccactaccgctatcctgatcgcccggtcctccccaccatggtttattgtcgatcgccccttcttgtttttcattagacacaatcctacaggcgctgtcttatttatgggccagattaacaaaccttag

SEQ ID NO: 249104 - RNA, 264 nt, synthetic construct; identical to SEQ ID NO: 248498
  misc_feature 1..264: note = Description of Artificial Sequence: Synthetic coding sequence
  source 1..264: mol_type = other RNA

SEQ ID NO: 249105 - RNA, 426 nt, synthetic construct
  misc_feature 1..426: note = Description of Artificial Sequence: Synthetic coding sequence
  source 1..426: mol_type = other RNA
atggaaatgttgcaaggcttgttattgctgctcctcctgagtatgggaggcgcatgggccagtagggaacctctgcgtccctggtgccatccaataaacgctatcctcgcagtcgagaaggaaggatgtccagtctgcatcaccgtgaatacgacaatctgtgctgggtactgtccgactatgatgagagtactccaagctgtgctaccccccttgccccaggtcgtatgcacttacagagatgtgcggttcgaatccataagattgcctggctgtcctagaggtgtagaccccgtcgtgagtttccctgtagccctcagttgccggtgtggcccatgtcgcagaagcacatcagattgcggaggaccaaaagaccacccactgacttgtgaccatccccagctctcgggcctgttgttcttgtag

SEQ ID NO: 249106 - RNA, 1491 nt, synthetic construct
  misc_feature 1..1491: note = Description of Artificial Sequence: Synthetic coding sequence
  source 1..1491: mol_type = other RNA
atggggacgcaaaaagtcacccccgctctgatcttcgctataactgtcgccactatcggcagctttcagttcggatacaatactggcgttatcaatgctcccgagaaaatcattaaagagttcatcaataagacactcacagacaagggaaacgcccccccttcagaagtcctgctgacaagcttgtggagcctctctgtcgcaatattttctgttggtgggatgataggctccttctcagtcggattgttcgtaaataggtttggccggagaaattcaatgctcattgtgaatctgcttgccgtgaccggggggtgtttcatgggtctttgcaaggtggccaaatcagtggaaatgttaatcctgggcagattagttattggactgttttgcggtctctgtactggttttgtccctatgtatatcggcgaaatatcaccaaccgcccttcggggagcttttggcaccttaaatcagcttggcatcgttgtgggcatccttgtcgctcagattttcggattggagttcatacttgggagcgaagaactctggcctctgctgctgggcttcacaatcttgccagccattctgcagtctgcagcactgcccttttgtccagagtctccccgcttcctgcttattaatagaaaagaagaagagaacgctaaacagatccttcaaaggctgtggggcacccaggatgtcagtcaagatatacaggaaatgaaggatgagtccgcccggatgtctcaggagaagcaggtcacagtgctggagctcttccgtgtttcgagttacaggcagcctatcatcatttcaattgtcctacagctaagccaacaactgtcagggatcaacgcagttttctattacagcacaggaattttcaaagatgccggagtacaggaaccaatctacgccactatcggcgctggcgttgtaaataccattttcaccgtagttagcctgttcctggtcgagagggctggccggcgaaccttgcacatgattggtttgggaggtatggcgttttgctctactttgatgaccgtgagtcttctgctcaaagacaactacaacggtatgtccttcgtctgtattggagctatccttgtgttcgttgctttttttgagattggccccggacccatcccctggtttatcgtggcagagctcttttctcaggggcctcggcctgcagccatggcagtcgctggatgtagcaattggacctcaaactttttggtgggtctgttgttcccctccgcagcacattacttgggagcctacgtgttcatcatttttaccggattcttgataaccttcctggcctttaccttctttaaagtaccagaaacacgcggcagaactttcgaggatattactagagccttcgaaggccaagcgcatggagctgatcgaagcggaaaggatggcgtaatggaaatgaactctatagaacctgccaaagaaacaacgaccaatgtgtag

SEQ ID NO: 249107 - RNA, 2097 nt, synthetic construct
  misc_feature 1..2097: note = Description of Artificial Sequence: Synthetic coding sequence
  source 1..2097: mol_type = other RNA
atgaaaattgagactagtggttacaattcagacaagctaatttgcagaggcttcatcggtactcctgctcctccagtgtgtgattccaaatttttgctctcaccttcttcagatgtaagaatgatcccttgccgcgcagctcttacattcgctaggtgcttgattcgcaggaaaatcgtgaccctagattctttggaggatactaagctgtgtaggtgtctttccactatggaccttattgctctgggagttggcagtacattaggggctggggtgtacgtcctcgccggagaagtggccaaggctgacagcggccccagcatcgtagtatcttttctaatagcagccctcgcctccgtcatggctggactttgttatgccgaatttggggcaagggtcccaaagaccggctcagcatacctctacacgtatgttaccgtgggtgaactttgggccttcatcaccggttggaatctcatcctctcctatgtcatcggtaccagcagcgtcgcccgggcatggagcggtacatttgatgaattgctttcgaaacagatcggccagttccttcgcacctatttccgcatgaattacaccggcctggccgagtaccccgacttcttcgctgtgtgtctgatcctcctgctagcaggactcctttcgttcggcgtcaaggaaagtgcatgggtgaataaagtcttcaccgccgtgaatattcttgtactgctgtttgtcatggtggctggtttcgtaaagggcaacgtggctaattggaaaatctccgaagaattcctgaagaatatctcagccagcgctagggaacccccttcagagaatggtacctctatttacggagctggtgggtttatgccttatggtttcactggcactcttgcaggcgcagcaacatgcttttacgcctttgtcgggttcgattgtattgcaaccactggcgaagaagtccgcaatccacaaaaagccatccccatcggcattgttacatccctgcttgtctgctttatggcctatttcggcgtctctgctgccctcacacttatgatgccttactatttgctcgatgagaagagccctctgccagttgctttcgaatatgtggggtggggtccggccaagtatgtcgtggccgctgggtcgctatgtgccctctcaacatctctgcttggttctatctttcctatgcctagggtcatttacgccatggccgaagatggtttgctctttaagtgcctcgctcaaattaacagtaaaactaaaacaccaatcattgccaccctctccagcggtgcggtcgcagctttaatggccttcctcttcgatcttaaggctttagttgacatgatgagcattggcacactcatggcttattccttagtggctgcctgcgtccttattttgaggtatcagccagggctctcatacgaccagccgaaatgtagccccgagaaggatgggcttggatcttctcctcgagtgacttccaagtccgaaagtcaggtgaccatgctccagagacaagggttttcaatgagaactctgttctgtccttccttactgccaacacaacagtcggcttccctggtgagttttctagtcggttttctagcatttcttgtcctcggtttgagcgtcctcaccacatatggggtgcatgccattacccgcctcgaagcctggtcactcgcattgctggccctctttctagtcctcttcgttgctatcgtgctcactatttggagacagccacaaaatcaacagaaggtggcctttatggtgccttttctgcctttcctgcccgccttttctatcctggttaatatctatctgatggtgcagctgtcagccgacacctgggtgagattctcaatctggatggccatagggttcttgatttattttagttatgggatccgccactcccttgaaggacatcttagggacgagaataacgaagaagatgcctacccagataatgtccacgccgccgctgaagaaaaatctgcgatccaggcaaacgaccaccacccaagaaacctgtcctccccttttatttttcatgaaaagactagtgagttttag

SEQ ID NO: 249108 - RNA, 1464 nt, synthetic construct
  misc_feature 1..1464: note = Description of Artificial Sequence: Synthetic coding sequence
  source 1..1464: mol_type = other RNA
atgggggacactggcctaaggaagcggagagaagatgaaaagagcatacagagccaggaaccaaagacgactagtttacagaaagaactgggactaataagcgggatatcaattattgtgggtacgatcatcggtagtgggatatttgtgtcaccaaagagtgttttgtctaacaccgaggccgtcggcccctgcctcatcatttgggccgcttgcggcgtcttagctactctcggcgcactatgtttcgccgaactgggaaccatgattacgaaaagcggcggcgagtatccatacttgatggaagcctatggccccattcccgcatatctatttagttgggcgtcccttatcgtgattaaacccacttcttttgctataatttgtctgtctttcagcgaatatgtgtgtgctcctttttacgtgggatgcaaacctccacaaattgtggttaagtgcctcgccgcggctgccattttgtttatttctactgtgaatagcttgagtgttagacttggaagttacgttcaaaacattttcacggctgctaaactggtgattgtcgctattattattatctccggactcgtcctgctcgcccaggggaacaccaagaacttcgacaattcattcgagggcgctcagctgagcgtgggggcaatcagtctcgcgttttacaatggactttgggcatacgatggatggaatcaactgaactatattacagaagaactgcgtaacccttaccgcaacctcccactcgctattattataggcatcccactggttactgcttgttatatcctaatgaacgtctcttacttcactgtgatgacagccacagagcttttgcagagtcaggccgtcgccgttacctttggggacagagtcttgtaccctgcttcatggattgtgccactctttgtcgcgttcagcacaattggagctgcaaatggtacctgtttcactgccggccgcctaatatacgtagctggaagagagggacatatgctgaaagtcctgagttacatttctgtgcgacgactcactcctgcacctgcgatcattttttatggaatcattgcaactatctatatcattccaggagatattaacagccttgtcaactactttagtttcgccgcttggctcttttacggcttaacaattctagggctcatcgtgatgagattcacaaggaaagagctcgagaggcctattaaagttcccgtcgttatacccgtcctgatgaccctaatcagcgtgttcctggtcttggcaccaatcatctcaaaacccacatgggagtatctctactgtgttcttttcatcttgtccggcctgctgttttactttttattcgtccactacaaattcggctgggcccaaaaaatttcaaagccaatcacaatgcacctccaaatgcttatggaagtggtacccccagaagaggatcctgaatag

SEQ ID NO: 249109 - RNA, 1311 nt, synthetic construct
  misc_feature 1..1311: note = Description of Artificial Sequence: Synthetic coding sequence
  source 1..1311: mol_type = other RNA
atgctgaaggtgtccgctgtcctgtgtgtgtgcgctgccgcttggtgctcacagtcattagcagccgcggcggcagtcgcagcagccggcggaagaagtgacggagggaactttctggacgataagcagtggcttacaacaattagccagtacgataaagaagttggccagtggaataagtttagagatgaagtagaggatgattacttcagaacctggagccccggaaagccattcgaccaggcccttgatcctgctaaagatccatgcttgaaaatgaaatgctctagacacaaggtttgcatagctcaggattctcagactgccgtctgtattagccaccgaagactgacccataggatgaaggaggcaggagtcgaccaccggcagtggagaggcccaattctttcaacatgcaaacagtgccccgttgtgtatccctcgccagtgtgcggaagcgatggacacacttattcatttcagtgtaagcttgagtaccaggcctgtgttctggggaaacagatcagcgtgaaatgtgaaggccattgcccttgtccctcggacaagccaactagtaccagcagaaatgttaaacgtgcctgctccgatttagagtttagagaagtagctaaccggctgagagattggtttaaggccctgcatgaaagcgggtcacagaacaagaaaaccaaaaccctgctcagacctgaacgttccagatttgatacctcaattttacccatttgcaaagactcattgggatggatgttcaaccgcctggatactaactatgatttgctacttgaccaatccgaactgaggtccatctatctcgataaaaatgagcaatgcactaaggctttctttaacagctgcgacacttataaagactctctgatttccaacaatgaatggtgctattgcttccagaggcagcaggatcccccttgccaaactgaactatcaaatatccagaagagacaaggcgtaaagaaattactcgggcagtacatacccctctgtgatgaagacggctattataaacctacacaatgtcatgggtctgttggacagtgctggtgcgtagatagatatggcaatgaagttatgggtagtcgcatcaatggagtggccgactgtgccatcgatttcgagattagcggcgatttcgcgtcgggagacttccacgagtggacagatgatgaagatgacgaggacgatattatgaacgatgaggatgaaatagaagatgacgacgaagatgaaggggatgacgacgacggtggcgatgaccatgatgtgtatatatag

SEQ ID NO: 249110 - RNA, 1302 nt, synthetic construct
  misc_feature 1..1302: note = Description of Artificial Sequence: Synthetic coding sequence
  source 1..1302: mol_type = other RNA
atgctgaaggtgtcagccgtactgtgtgtgtgcgctgcagcctggtgttcacaatctctcgctgccgccgcagccgtggccgccgccggaggcagaagcgacggaggaaatttcctggatgacaagcaatggttgacaacgattagccagtatgataaggaggtggggcaatggaataaattcagggatgacgactattttaggacctggagccctggcaagcctttcgatcaggctcttgaccccgctaaagacccatgcctcaaaatgaaatgttcgcgccacaaagtgtgtattgctcaggatagccaaacggctgtctgtatttcccatcgaagactgacacaccggatgaaagaggccggagtggaccacaggcaatggagggggcccatcttatccacgtgcaaacaatgtcccgtcgtttacccatctcccgtctgcggatcagacggccacacatatagcttccagtgtaaactagagtatcaggcatgcgtgctcggcaagcaaatcagtgtcaaatgtgaaggtcactgcccgtgcccctccgataaacctacaagcactagccgaaacgtgaaacgagcttgttccgatctagaattccgcgaagtcgctaaccgcctgcgggactggtttaaggcgcttcacgagagcggctcccagaacaaaaagactaaaacattgctgaggcccgagcggagcaggttcgatacctctatcctccccatctgtaaggattcactgggctggatgtttaatagactcgacactaactacgacctcttgctggaccagtcagagctcaggagtatatacctagacaagaatgagcaatgcacaaaagcttttttcaactcgtgtgatacatataaagacagtttgatctccaacaatgaatggtgttactgctttcagaggcagcaagaccccccatgtcagacagaactgagcaacattcagaagagacagggtgtaaagaaattactcggacagtacattcccctatgcgatgaggatggctactacaagccgacacagtgccacgggtctgttggccagtgctggtgcgtcgaccggtatgggaatgaggttatgggctcaaggattaacggggttgctgactgcgcgatcgattttgaaatcagtggggattttgcgtcaggagactttcatgagtggacagacgatgaggatgacgaggatgatattatgaatgacgaagacgaaatcgaggacgacgacgaggatgagggagatgacgatgatggaggcgacgatcatgacgtatatatttag

SEQ ID NO: 249111 - RNA, 1158 nt, synthetic construct
  misc_feature 1..1158: note = Description of Artificial Sequence: Synthetic coding sequence
  source 1..1158: mol_type = other RNA
atgatcacacaggaccacatccatatgagcagcggcctgtctcaggacgactactttcgtacatggagccccggtaagccattcgaccaggcccttgatcccgccaaagatccttgcttaaaaatgaagtgctcacgacataaggtttgtatcgctcaggactcacagacagcagtttgtatcagtcacagaagactcacccatagaatgaaggaagcaggcgtcgatcatcgccagtggagaggccccatcttatcaacttgcaaacaatgtcctgtcgtctatcctagtccagtctgtggcagtgacggccatacatactcatttcaatgtaaactggaatatcaggcatgtgttttagggaaacagattagcgtgaaatgtgaaggccattgcccgtgccccagcgacaagccaacctctacctctcgcaacgtaaaacgagcatgctccgatctagaatttagggaagtcgccaataggctccgagactggtttaaagcattacatgaatccgggagccaaaataaaaaaaccaagaccctgctgcgtcccgagaggtctcgattcgacacaagtatccttcccatttgcaaggattccctgggttggatgttcaacagactagataccaattatgacctcctcctggatcagagcgaactgcgcagtatttacttagacaaaaatgaacaatgcacaaaagcttttttcaacagctgcgacacctacaaagactccctgatctctaacaatgagtggtgttactgtttccaacgccagcaagatcccccttgtcagactgaactgagtaacatacaaaaacgccaaggagtgaagaagctgctcggacagtatatcccactgtgtgacgaggacggttattacaaacctactcagtgccatgggtcagttgggcaatgctggtgtgtcgataggtacggaaatgaagtgatggggagtcggatcaacggcgtggcggattgcgcaattgactttgaaatttcaggtgattttgcaagcggtgacttccacgagtggacagacgacgaagacgacgaggatgatataatgaacgacgaagatgaaattgaagatgacgacgaagatgagggggacgacgatgatggtggggatgatcacgatgtgtatatatag

SEQ ID NO: 249112 - RNA, 1311 nt, synthetic construct
  misc_feature 1..1311: note = Description of Artificial Sequence: Synthetic coding sequence
  source 1..1311: mol_type = other RNA
atgctcaaggtcagcgccgtgctgtgcgtatgtgcggccgcctggtgcagtcaatccctagctgctgcggccgctgtggcagccgccggagggcggagcgacggggggaattttctggacgataagcagtggctcacaacgatcagccagtacgataaagaagtaggacagtggaataagtttcgtgatgaagtcgaagatgattacttccgaacctggagcccgggaaaaccttttgaccaggcattagacccagccaaggacccttgcttgaagatgaaatgtagtagacataaagtatgcattgcccaggattcccagaccgccgtgtgcattagtcatcgacgcttgacacatagaatgaaggaagcaggagttgatcaccgccaatggcgcggacctattctctcaacctgtaaacagtgcccagtcgtctacccttcccccgtgtgcggatcggacggacacacctattccttccaatgtaaattggagtatcaagcttgcgtacttggaaagcaaatcagcgtcaagtgtgagggccactgcccctgtccttcagataaacccaccagcaccagtagaaacgttaaacgggcctgcagcgacctggagtttcgcgaagtcgcaaatcgccttcgagattggtttaaagcattgcacgagtccggcagccaaaataaaaagacaaagacactgttgcgacccgaacgcagcaggttcgacacgtcaatactcccgatatgcaaagatagccttggatggatgttcaacagattagatacaaattatgacctccttttagaccaatctgagcttcggagcatatatttggacaaaaatgaacaatgtacaaaagctttctttaactcatgtgacacttataaagattccctgatcagcaacaatgaatggtgttactgttttcagcggcagcaagacccaccatgtcagacagagctgagcaacattcaaaaaagacagggtgtcaagaaactgctgggccaatacatccctctctgcgatgaagatggatattacaaacccactcagtgtcatggatctgtaggccagtgctggtgcgtggacaggtatggaaatgaagtgatgggtagcaggatcaacggcgtggctgattgcgccattgatttcgagatatcgggcgactttgccagtggcgattttcatgaatggaccgacgacgaggatgatgaggacgacataatgaacgatgaagatgaaattgaagatgacgacgaggatgagggagatgatgatgacggcggagatgatcatgatgtgtacatatag

SEQ ID NO: 249113 - RNA, 1302 nt, synthetic construct
  misc_feature 1..1302: note = Description of Artificial Sequence: Synthetic coding sequence
  source 1..1302: mol_type = other RNA
atgctcaaggtctccgctgtcctctgcgtatgtgcagctgcatggtgctcccaaagcctggccgccgcagccgcagtggctgcagcgggaggaagatctgacggagggaactttctggacgataaacagtggttgacgacaatttcccagtatgacaaagaggtgggacaatggaacaaatttagggacgacgactacttccgcacttggtccccaggcaaacccttcgaccaggcccttgacccagcaaaggacccgtgcctgaaaatgaaatgcagccggcataaggtgtgcatcgctcaggactcccagacagcagtatgtatctctcatagaaggctgacacaccgcatgaaggaagctggggtggaccatcgacagtggcgaggccctatcctttctacatgtaagcaatgccccgttgtctacccttctccggtttgcggatccgacggccatacctattccttccaatgcaaacttgagtatcaggcttgtgtgttaggtaaacagatatcagtgaagtgtgaaggacattgcccctgcccatcagataagcccacctcgacaagccgtaacgtcaagagagcgtgttcagatcttgaatttcgtgaagtggccaacagattacgagactggttcaaggctcttcatgagtccggatctcagaataaaaagaccaaaacattattaagacctgaacgatcaagatttgatacaagcattcttcccatctgtaaggactcgttgggctggatgtttaatagattggacacaaactatgatctgctccttgatcaaagtgaactgcggtccatttatttagacaaaaatgaacagtgtacgaaggctttcttcaactcatgcgatacctataaggatagtctgattagcaataatgagtggtgttattgtttccaaaggcaacaagatccaccctgccaaacagagctgagcaatattcaaaaacgacaaggagtgaaaaaactgttaggacagtatatacctctttgcgatgaggatggatactataaacctacccaatgccatggtagtgtcggacagtgttggtgtgtcgacaggtacgggaatgaggttatgggcagtaggatcaatggcgtggccgactgtgctattgactttgagattagtggtgacttcgcatcaggggactttcatgaatggactgacgatgaggatgatgaggatgatataatgaatgatgaagatgaaattgaggatgacgacgaggacgagggtgatgatgatgacggtggagacgaccacgacgtgtatatttag

SEQ ID NO: 249114 - RNA, 348 nt, synthetic construct
  misc_feature 1..348: note = Description of Artificial Sequence: Synthetic coding sequence
  source 1..348: mol_type = other RNA
atgttaaaggtatccgcagtgttgtgtgtctgtgcagcagcgtggtgctcccagtccctagccgctgctgctgctgtcgccgcagccggcgggcgcagtgatggggggaacttcctggacgacaaacagtggctaaccacaatcagccaatatgacaaggaagtcggtcagtggaataaatttagagacgaggttgaagacgactattttcgaacatggagcccaggcaaaccattcgatcaggcattggaccccgcaaaagatccttgtttgaaaatgaagtgttcaaggcacaaggtgtgcatcgcccaagattcccagaccgcagtgtgtatttcccacaggtag

SEQ ID NO: 249115 - RNA, 1311 nt, synthetic construct
  misc_feature 1..1311: note = Description of Artificial Sequence: Synthetic coding sequence
  source 1..1311: mol_type = other RNA
atgctgaaagttagcgccgtgttatgtgtgtgcgctgccgcctggtgttcacaatccctcgccgccgccgcagctgtggcagccgccggaggcagaagtgatggggggaatttcctggacgacaagcagtggctgacaaccatttcacagtatgacaaagaagttggtcagtggaataaatttagagatgaggttgaggacgactattttcgtacctggtcaccagggaagccattcgatcaagctctcgatccagcaaaagacccttgcctgaagatgaaatgtagcaggcacaaagtgtgtatcgctcaagattctcagactgcagtttgcatctcccatagaagactgacccatcggatgaaggaggctggcgttgatcaccgacaatggcgaggccccattttgtccacatgcaagcagtgccccgttgtgtacccaagcccagtgtgtggttcagacggccacacttattccttccagtgcaaattggaatatcaagcctgcgttctcggaaagcagatttctgtcaagtgcgaaggacattgcccctgtcccagcgacaaacccacgtccacctctcgtaatgttaaacgggcatgtagtgatcttgaattccgcgaagtggcaaaccgccttagagattggtttaaagcacttcatgagagtgggagccagaacaagaagaccaagaccctgcttagacccgaacggtctcgattcgatacttcaattctgcctatctgtaaggactccctgggttggatgtttaatcggctagacacaaattacgacctcctgcttgatcagtcggaactcagatctatttacttggataaaaacgagcagtgtaccaaggcatttttcaactcatgcgatacgtacaaggattctctgataagcaataacgagtggtgctattgctttcaacgacagcaggaccctccctgccagacagagctgtccaatatccaaaaaagacagggcgtcaagaaactcctgggccagtatatccctctgtgcgacgaggacggatactataaacctactcagtgccacggctctgtgggccagtgttggtgtgtagatcggtacgggaacgaagtgatgggaagccgaattaatggagtggccgattgcgcaattgatttcgaaatttcaggggactttgcaagtggggacttccatgaatggacggatgacgaggacgacgaagacgatataatgaacgacgaggacgagatagaagatgacgacgaggatgagggtgacgacgatgacgggggagatgatcatgatgtatatatctag

SEQ ID NO: 249116 - RNA, 486 nt, synthetic construct
  misc_feature 1..486: note = Description of Artificial Sequence: Synthetic coding sequence
  source 1..486: mol_type = other RNA
atgctcaaggtgagcgcagtcctgtgcgtctgtgctgcagcttggtgctcccaaagtctggctgctgctgctgctgtggctgcagcaggcggtagaagcgacggtggaaattttttggatgacaagcagtggcttacaactatttctcaatatgacaaggaggtcggtcaatggaataagttcagagacgatgactactttagaacatggagcccaggtaaacccttcgatcaagccttagacccagccaaagatccctgtctcaagatgaagtgcagcagacataaagtgtgcatcgctcaggactcccaaaccgctgtgtgcatctcccatagaagacttacccaccgcatgaaggaggcaggagtggatcaccggcagtggcgaggaccaatcctttctacatgcaaacagtgccccgtcgtatatcccagtcccgtttgtggatcagatggtcatacgtactcttttcaatgcaagctctag

SEQ ID NO: 249117 - RNA, 522 nt, synthetic construct
  misc_feature 1..522: note = Description of Artificial Sequence: Synthetic coding sequence
  source 1..522: mol_type = other RNA
atgctgaaagtctctgctgttctgtgtgtgtgcgcggccgcatggtgtagtcagagcttagccgccgccgccgccgttgctgccgccggcggaagatctgatgggggcaatttcctggatgacaaacagtggctgacaacgatctcacaatatgacaaagaagttggacagtggaataaatttcgagatgatgactacttccgcacctggtcccctggaaaaccctttgaccaggcctgtagtgaccttgagtttcgcgaggtagctaaccgactgagggactggtttaaggccctccacgaatctggctcccaaaacaaaaaaactaagaccctcttgcggcctgagcgctcgcgttttgatacttctattctcccaatttgcaaagattccttgggctggatgttcaaccggctcgatacaaattatgaccttctgctcgaccaaagtgaactgcgatcaatctacctcgacaaaaatgagcagtgcaccaaagccttcttcaatagttgtgatacatag

SEQ ID NO: 249118 - RNA, 1182 nt, synthetic construct
  misc_feature 1..1182: note = Description of Artificial Sequence: Synthetic coding sequence
  source 1..1182: mol_type = other RNA
atgctgaaagtctctgccgtgttatgcgtgtgtgcagcagcttggtgctcacagagcctggccgcagcagctgcagtggcagcagcggggggcagaagcgatggagggaatttcctagacgacaaacagtggctgacgacgatctctcagtatgataaagaagtgggacagtggaacaagtttcgagatgatgactacttcagaacttggagtcctggtaagccgtttgaccaagcccttgacccagccaaagatccttgcctcaaaatgaagtgcagcaggcacaaagtttgcatcgcccaggactcacaaactgccgtttgcatttcccatcgacgattgacacacagaatgaaagaggctggcgtcgatcacaggcaatggcgaggtcctattctgagcacatgcaaacagtgtcccgtggtgtatcctagccccgtttgtggcagcgatggacacacctattcttttcaatgtaagctggagtatcaggcgtgcgttttgggaaaacaaattagcgtcaagtgcgaaggccattgtccctgtccctcagacaagcccacatccaccagccggaacgtcaagaggggtttcgatacctctattctgcccatctgcaaagatagtcttggatggatgtttaataggctggacactaactatgaccttcttctggaccagagtgaactacgctcgatttaccttgataagaatgagcagtgcactaaagctttctttaactcctgcgacacttacaaagattctctgatttctaataacgagtggtgctattgtttccagcgccagcaagatccgccttgtcagacagagctttcaaatatacagaagcgccagggcgtcaaaaaattgttgggacaatacattccgctttgtgacgaggatggatactataaacctactcaatgtcatggttctgtgggccagtgttggtgcgtggaccggtatgggaatgaagttatgggttctaggattaatggggtggctgattgcgcaatcgactttgaaatttctggggactttgcgtcaggcgattttcatgaatggaccgatgatgaggatgatgaggacgacattatgaacgatgaagatgagatcgaggatgacgatgaagatgagggagacgacgatgatgggggcgatgatcacgacgtgtacatatag

SEQ ID NO: 249119 - RNA, 1302 nt, synthetic construct
  misc_feature 1..1302: note = Description of Artificial Sequence: Synthetic coding sequence
  source 1..1302: mol_type = other RNA
atgctcaaagtatctgcagtgctgtgtgtgtgcgccgccgcgtggtgtagccagagtctagccgccgctgcagccgttgctgccgcaggagggagaagtgacgggggaaattttttggatgacaagcagtggttgacaactattagtcagtatgacaaggaagtgggacaatggaataaatttagagatgatgactactttcgtacctggtcccctggtaaaccattcgaccaggccctggatccagccaaggatccttgtctgaaaatgaagtgttcaaggcataaagtgtgcatagcccaggattcccaaactgcagtgtgtatatcccataggaggctaacccaccgcatgaaggaggccggcgtagaccaccgacagtggcgcggacccatcctgtccacatgtaagcagtgccctgtggtatatccgagtcccgtctgtggcagcgacggccacacgtacagttttcagtgtaagctagagtaccaagcctgcgttctcggtaagcaaatctcagtgaagtgcgaaggacattgcccctgcccttcagataaaccaacctctacctcacgaaacgttaaaagagcttgcagcgatcttgagttccgggaagtagccaacagattacgtgattggttcaaagccctgcacgaatccggttcccagaataaaaagaccaagacgcttttgcgcccagagcgtagccgtttcgatacttcaatcctccctatttgcaaggattccctgggctggatgttcaaccgcctggatacaaattatgatttgttactggaccaatcggaactccgatccatttaccttgacaaaaacgaacaatgtactaaagcctttttcaattcgtgtgatacgtataaagattcactaattagtaacaacgagtggtgttactgttttcaacgccagcaggacccaccgtgccagaccgaattgtcaaatatccagaagagacagggcgtgaagaagcttttagggcagtatatcccactgtgtgacgaagatggatactacaaacctactcagtgtcatggaagtgtggggcagtgttggtgtgtggatcgatatgggaatgaagtaatggggagtagaatcaacggagtagcagactgcgctatcgacttcgaaatcagtggcgatttcgcatcaggcgattttcatgagtggactgacgatgaggatgacgaggacgatattatgaacgatgaagacgagattgaagacgacgatgaagatgagggtgatgatgacgacgggggggacgatcacgatgtgtatatatag

SEQ ID NO: 249120 - RNA, 1311 nt, synthetic construct
  misc_feature 1..1311: note = Description of Artificial Sequence: Synthetic coding sequence
  source 1..1311: mol_type = other RNA
atgctgaaggtatccgccgttttatgtgtttgtgctgccgcctggtgcagccagagccttgcagccgccgccgcagtcgcagctgctggcggaaggtcagatggaggcaattttcttgatgataaacagtggttgactactattagccagtatgataaggaagtgggccaatggaataagtttagagatgaagtagaagatgattattttcggacctggagtcctggcaagcccttcgaccaagcgctcgaccccgcgaaagacccatgtctgaaaatgaagtgctctcgacataaagtgtgcatagctcaggattcccaaactgccgtgtgcatctctcacaggcgccttactcatcgaatgaaggaagccggcgtcgatcatagacagtggcgaggacccatcctcagtacttgcaaacaatgccctgttgtatacccaagccccgtctgtggatcagacggccatacttactcctttcagtgcaaactggagtaccaagcgtgcgttcttggaaagcagatctccgttaagtgcgagggtcactgcccctgccccagtgataagcccacatctacatcacgaaacgttaaacgggcttgcagcgacttggagttccgtgaagtggcaaaccggctgagggattggtttaaggcgctccatgaaagcggtagccagaacaagaaaaccaaaacactgctgcgacccgaacggtcccgatttgatacatccatacttcctatttgcaaggattccttaggctggatgttcaataggctggacacaaactatgatctgttgctggaccaatcagaactgagatccatttatctagataagaatgaacaatgtacgaaggccttcttcaacagttgtgacacctacaaagattccctgatcagtaataacgaatggtgttattgttttcagaggcaacaagacccaccgtgtcagacagaattatctaatattcaaaagcggcagggcgtgaaaaaactcctgggacaatacatacctctgtgtgacgaggatggttactataaaccaactcagtgccacggctccgttggccagtgctggtgtgtggatagatacggaaacgaggtgatgggttcaaggattaatggggttgcagattgtgcaatagacttcgaaatttcaggagacttcgcgagtggggatttccatgaatggactgacgacgaagatgacgaggacgatataatgaatgacgaggacgagatcgaggatgatgatgaagacgagggagacgatgacgacggaggcgacgaccatgatgtgtatatttag

SEQ ID NO: 249121 - RNA, 348 nt, synthetic construct
  misc_feature 1..348: note = Description of Artificial Sequence: Synthetic coding sequence
  source 1..348: mol_type = other RNA
atgctgaaagtgtctgccgttctgtgtgtctgcgcagcagcctggtgctcacaatccctggcagcagctgccgctgttgcagccgctggtggtcgctccgacggaggtaatttcctagatgataagcagtggctcacaaccatctcccagtatgacaaagaagtgggccagtggaacaaatttcgcgacgaggtggaagatgactattttagaacttggagtcctggaaagcctttcgatcaagctttagatcccgctaaagacccgtgcttgaagatgaagtgctcacggcataaggtgtgtattgctcaagacagtcaaaccgccgtgtgcatatcccatcgatag

SEQ ID NO: 249122 - RNA, 942 nt, synthetic construct
  misc_feature 1..942: note = Description of Artificial Sequence: Synthetic coding sequence
  source 1..942: mol_type = other RNA
atgctgaaagtatccgccgtcttgtgtgtttgtgctgctgcctggtgtagccagagcctcgccgccgccgctgctgtagccgctgcaggaggccgaagcgatggaggcaactttctcgacgacaaacagtggcttacaacaatatctcaatatgataaggaggttggacaatggaacaagtttcgagatgatgattactttagaacatggtctccaggcaagccattcgatcaggcattagaccctgctaaagacccctgtttgaagatgaaatgcagtagacataaggtgtgcattgcccaggattctcagacggcagtctgcatttcacaccgacgcctcacacatagaatgaaagaagcgggtgttgatcaccgccagtggaggggcccaattctatctacatgtaagcagtgtccagttgtgtacccatccccggtttgcggatccgacggtcatacatacagcttccaatgtaagctcgaataccaagcatgcgttctgggcaaacagatttctgtcaagtgcgaagggcattgcccttgtccatctgataaacctactagcaccagccgtaatgttaaacgagcttgttctgacttggaatttcgagaggtcgccaacagactcagagattggtttaaggcattacacgagagcggctctcagaataagaagaccaagaccctattacgcccagaaaggtcacgattcgacacttcaattttaccaatctgtaaggattctctcggatggatgtttaacaggttggatacaaattacgacctattacttgaccagtcggaacttcgaagtatctatttggacaaaaacgaacagtgtaccaaggctttctttaattcatgcgatacgtataaggattcactgatttctaacaacgaatggtgctactgctttcagcgtcaacagggtaagagatag

SEQ ID NO: 249123 - RNA, 1017 nt, synthetic construct
  misc_feature 1..1017: note = Description of Artificial Sequence: Synthetic coding sequence
  source 1..1017: mol_type = other RNA
atgctaaaggtcagtgcggtgttgtgcgtgtgtgctgccgcttggtgcagtcaaagcctggcagccgccgccgcagtggcagcggctggaggccgttcggacggtggaaatttcttagacgataaacagtggctgaccacgatttctcagtacgataaggaagttggacagtggaacaagtttcgggattgtaagttagagtaccaggcatgcgtactcggtaagcagattagtgttaagtgcgaaggtcattgcccctgcccctccgacaagccaacgtctacatcccgtaacgtgaagcgcgcctgttcagacctggaattcagagaagttgccaacaggttgagagattggttcaaagcattacacgaatcaggttcacaaaacaaaaaaaccaaaactctactgaggcctgaaaggagcaggtttgacacgtcaatcttgcccatctgtaaagactccttggggtggatgttcaatagactcgacactaattatgacctattacttgaccagagtgagttacgtagcatctatctcgataaaaacgagcaatgtaccaaggccttctttaactcctgcgatacatataaggatagcttgattagtaacaatgagtggtgctattgttttcaaaggcagcaagacccgccctgccagaccgagctgtccaacattcagaaaagacaaggggtaaagaagctgctgggacaatacatccctttatgcgatgaagacgggtattataaacccacgcaatgccacggaagcgtcggccagtgctggtgcgtggatagatatgggaatgaagttatggggtctagaatcaatggagtggctgattgcgcaattgacttcgagatttcaggggacttcgcgagcggagatttccacgagtggacagatgacgaggacgatgaggatgatataatgaacgatgaggacgaaatagaagatgatgacgaggatgaaggcgatgatgacgatggaggggacgatcacgacgtgtacatttag

SEQ ID NO: 249124 - RNA, 1023 nt, synthetic construct
  misc_feature 1..1023: note = Description of Artificial Sequence: Synthetic coding sequence
  source 1..1023: mol_type = other RNA
atgatcaacaacgggtctccccagagtctgtccatgacaagaaagagtgatagcgggaccaactctgaaaccatgaaggaagccggggtagatcatcgtcaatggagaggtcccatactttcaacttgtaaacagtgcccagtcgtgtaccctagccccgtctgcggatctgatggacatacttactcttttcagtgtaaattagagtaccaagcctgtgtgctcggcaaacagatctccgtgaaatgcgaaggacattgtccctgccctagcgataagcccacttctacctcaaggaatgtgaaacgcgcgtgcagtgaccttgagttccgggaagttgccaatcgcctgagagattggttcaaagccttgcacgagagcgggagtcagaataaaaagaccaaaactctccttcggcccgaacgctcacgatttgataccagcattcttcccatttgcaaagactctcttggatggatgtttaatcgcctggatactaactacgacctcctgctagaccagagcgaactgcgcagcatctacctggacaagaatgagcaatgtactaaggctttctttaatagttgcgacacatacaaggattccctaatttctaacaacgaatggtgctattgcttccaaaggcaacaagatcctccatgtcagactgaattaagtaacatccaaaagcggcagggtgtgaaaaaactgctgggccagtatatacctttatgtgacgaagatggctactataagcctactcagtgccatggctctgtcggacagtgctggtgtgtcgatcgatacgggaatgaggtgatgggttccagaataaacggcgtagcagactgcgcgatcgactttgagatttccggtgattttgccagtggcgatttccacgagtggaccgatgacgaagacgacgaagatgacattatgaacgacgaggacgagattgaagatgacgatgaggacgagggggatgacgatgatggaggggatgatcatgacgtatatatctag

SEQ ID NO: 249125 - RNA, 915 nt, synthetic construct
  misc_feature 1..915: note = Description of Artificial Sequence: Synthetic coding sequence
  source 1..915: mol_type = other RNA
atgaagtgtagccgccataaagtatgcattgcccaggactcccagacagccgtgtgcatttcccacaggcgattaactcaccgtatgaaggaagccggagtcgaccatcgtcaatggagggggccaattctgtcgacttgcaagcagtgtccagttgtctaccccagcccagtgtgcggaagcgatggccatacctactctttccaatgtaagttagaatatcaggcatgtgtattgggaaaacagatcagcgtcaaatgtgagggccactgtccttgtccatccgataaacccacttccacatcaagaaatgtgaagagaggcttcgatacaagtattctgccgatctgcaaggattctcttggttggatgtttaaccggcttgataccaactacgacctgctactcgaccaatccgaacttagatcaatttacctcgataaaaacgagcaatgcaccaaagccttttttaactcctgcgatacttacaaagatagcctgatcagcaataatgaatggtgttactgtttccagagacagcaagatcccccgtgccagactgaattatcaaatatacagaagaggcagggagttaagaagctcttagggcaatacatcccattgtgtgacgaggacggctattataaacctacgcaatgtcacggtagcgttgggcaatgttggtgcgtggaccgctacggtaatgaggtgatgggaagcaggatcaacggggtagctgactgcgctattgattttgagatttcaggagactttgcatcaggagatttccatgagtggactgatgatgaagatgatgaggatgatataatgaacgatgaagacgaaattgaggatgacgatgaagacgaaggcgacgatgatgatgggggggacgaccatgacgtctatatttag

SEQ ID NO: 249126 - RNA, 951 nt, synthetic construct
  misc_feature 1..951: note = Description of Artificial Sequence: Synthetic coding sequence
  source 1..951: mol_type = other RNA
atgaaggaggccggcgtcgaccacagacaatggagagggccaatcttaagtacgtgcaagcaatgtccagtcgtctatccctcccccgtgtgcggctctgatggacatacctattccttccaatgcaaacttgaatatcaagcctgcgtgctcggcaaacagattagcgtgaagtgcgaaggccattgcccgtgtccaagtgataaaccaaccagtacatccaggaacgttaagcgagcgtgctccgacctagaatttcgggaagttgcaaaccggctgcgggactggttcaaggctctgcacgagagtggcagccaaaacaaaaagactaagaccctcctgcggccggaacgctctcggtttgacacatcaatcctgcccatctgcaaggactcactaggttggatgtttaatcgccttgacacgaactatgaccttctcctcgatcaatcagaattgcggagcatataccttgacaaaaatgaacaatgtactaaggccttcttcaatagttgcgatacctataaggattctctgatttcgaataacgagtggtgctattgcttccagcgtcagcaggaccccccttgccaaactgaattgtcaaatattcagaaacgacagggagtaaaaaagcttcttggacaatacataccattatgcgacgaagacgggtactataaacccactcaatgtcacggatctgtcgggcagtgctggtgtgtcgaccgatacgggaatgaagtgatgggctcaagaattaatggcgtggcagattgtgccatagactttgaaatttccggagattttgcaagcggggactttcacgagtggaccgacgacgaagacgacgaagacgatattatgaatgacgaggatgagattgaagacgacgacgaggacgagggggacgacgatgacggcggggatgatcatgatgtgtatatttag

SEQ ID NO: 249127 - RNA, 1017 nt, synthetic construct
  misc_feature 1..1017: note = Description of Artificial Sequence: Synthetic coding sequence
  source 1..1017: mol_type = other RNA
atgttaaaagtttctgcagtgttatgcgtgtgtgccgcagcttggtgtagtcaatctctcgccgccgccgccgccgtggctgccgctgggggacgcagcgatggcggcaactttcttgacgacaagcagtggctgaccactataagccagtacgacaaagaagtaggacagtggaataagtttagagactgtaagttagaatatcaggcctgtgtgttgggaaaacagatcagcgtaaagtgcgaaggccactgtccttgcccctcggataagccaacatcaacttctaggaatgtcaaacgcgcttgctcagacctggagttccgagaagtcgctaataggctaagagactggttcaaagcactacacgaatctgggtcgcagaataaaaaaactaaaaccctcctgagaccagaaagaagccggtttgatacttcgatccttcccatctgcaaagactctctgggctggatgtttaaccgactggatacaaattacgatctcctgttagaccagagtgagctgcgaagtatctatcttgataagaatgaacagtgcacaaaggcattttttaactcatgtgacacctacaaagacagcttgatatccaataatgaatggtgttactgcttccaaagacagcaggatccgccttgtcaaacagagcttagtaatatccagaagagacaaggcgtcaaaaagttattaggacagtacattcccctgtgcgatgaggacggctactacaagcccacacagtgtcacggctcagtaggacagtgctggtgtgtggacagatacgggaatgaagttatggggtcaaggatcaacggagtggcggattgcgctatagactttgagatatcaggagacttcgcctctggggatttccacgagtggactgatgacgaagacgacgaagacgatataatgaacgacgaggatgaaattgaagacgatgatgaagatgagggagacgacgacgacggaggtgacgatcatgacgtttacatttag

SEQ ID NO: 249128 - RNA, 2409 nt, synthetic construct
  misc_feature 1..2409: note = Description of Artificial Sequence: Synthetic coding sequence
  source 1..2409: mol_type = other RNA
atgctcggagcccgtgcgtggcttggtcgggtcctcttgcttcctagagccggagcagggctagccgctagcagacggtgccccggtgtttggcctaggacatggccgcacagatctccctcgagaggcagctcaagtagggacaaagaccgcagcgccaccgtttcaagcagtgtcccaatgccagctggcggaaaaggctcacaccccagctccacccctcagcgagtgcctaaccgtcttatacacgaaaagtcaccatatttactgcagcacgcttacaaccctgtggactggtatccctggggtcaagaggcgttcgataaagcccgtaaagagaacaagccaattttcctctcagtagggtattccacttgccactggtgtcacatgatggaagaagaaagctttcagaacgaagagattgggcgcctgctgtcagaagacttcgtcagtgtgaaagtggaccgcgaggagcggccagatgttgataaagtatatatgaccttcgtacaggctacatcatcggggggaggttggcccatgaatgtttggctcacacctaatctgcagcccttcgtgggaggtacgtattttcccccagaggacggattgaccagggttggcttccgcaccgtgctccttaggatccgagagcagtggaaacagaacaagaatacattgctggaaaactcccaacgggtgacaaccgctctgctagccagatccgagatatctgttggagacaggcaattaccaccaagcgccgcaaccgttaataatagatgctttcagcagcttgatgaaggctatgacgaagaatacggagggtttgctgaggcgcctaagtttcctacaccagtgatcttatcatttctgttcagttattggctgtcgcacagactgacccaggatggaagccgagctcagcaaatggcactgcacacccttaagatgatggccaatggagggatccgagatcacgtggggcaaggctttcaccgctactccacagataggcagtggcacgtccctcatttcgagaaaatgttgtatgaccaggcacagctagccgtcgcatattcccaggcattccagttatccggcgatgaattttatagtgacgtggccaaagggatcctccaatacgttgcccgtagtctctcccataggtccggcggattctattccgctgaagacgccgacagtcccccagaacgtggacagcggccaaaagaaggcgcatactacgtttggacagtgaaggaagtacaacagctactgccggagcctgtactgggggctaccgaaccactgaccagcggtcaattgctgatgaagcactatggcctaactgaagccgggaacatatctccatcccaggacccaaaaggcgagttacagggacagaacgttttgaccgtgcgctattcattagaactcaccgccgctagattcggtctggacgtagaagccgtgagaaccctgctcaattctggcttagagaagttgttccaggcccggaagcatagacctaaaccccatctggattcaaaaatgctagccgcttggaacgggctgatggtgtctgggtacgcggtaactggagcagtccttggtcaggacagacttatcaactacgctacaaatggagcaaagtttttaaagaggcacatgtttgatgtagcaagcgggcgcctaatgagaacatgctacacaggacctggcggtaccgtggagcatagcaaccctccatgttggggctttttggaggactacgcattcgtcgttagaggacttctggacctttacgaggcatcccaggagtctgcttggttagaatgggcccttaggcttcaagacactcaggacaaactcttttgggactctcaaggggggggctatttttgctccgaagcagaacttggcgccggccttcctcttcgcttgaaggatgaccaagacggggctgaaccgtccgctaattcagtgagcgcccacaaccttcttcgccttcacggcttcactgggcataaagattggatggacaagtgcgtatgcctcctgacagcattctctgagcgtatgagacgagtgcccgtcgccctgcctgaaatggttcgcgctctcagcgctcagcaacaaactttgaagcagattgtgatttgtggcgatcgccaggccaaagatactaaagctctggtccagtgcgtccactccgtctatatccccaataaagtacttatcctcgcggacggtgacccctcctcattcttgtcacgccagctgcctttcctgtccacactgagaagactcgaggatcaggcaacagcctatgtttgcgaaaaccaagcctgctccgttcctattaccgatccttgcgagctgcggaagctgctccatccctag

SEQ ID NO: 249129 - RNA, 1377 nt, synthetic construct
  misc_feature 1..1377: note = Description of Artificial Sequence: Synthetic coding sequence
  source 1..1377: mol_type = other RNA
atggatggcagccgccgagttcgcgccacttccgtcctgccacgatatggacccccctgcctctttaaaggtcacctcagtactaaaagtaacgcgttctgtacagattcatcctcccttagactctcaaccttacagcttgtgaaaaatcacatggcagtacactataacaagattctatctgctaaagctgcagttgactgcagtgtcccagtatccgtgtcaaccagtataaagtacgctgaccagcagagacgtgaaaagctgaagaaagagctggcacagtgtgaaaaggaatttaagctcacaaagacagcgatgcgcgctaactacaagaataactccaaatccctgttcaacaccctccaaaagccaagtggggagcctcaaattgaagatgatatgttaaaggaggaaatgaacggcttttcctcattcgcccggtccctcgtccctagctctgaacgtctccacctctctctgcacaagtctagcaaggtgattacaaatggccccgagaaaaactctagctcttctccaagtagcgtcgactatgccgctagcgggcccaggaaattgagctccggtgccctctacggtcgcagacccagatcaacattcccaaacagccataggttccaactggtgattagcaaggctccctccggtgatctgctagacaaacacagcgagctcttctcaaacaagcaattaccctttaccccacgaacattgaaaaccgaggctaagagtttcctctctcagtaccgttattacacccccgcaaagagaaagaaggacttcaccgaccagagaattgaagcagagactcaaacggagctctctttcaaatccgaactggggaccgccgagactaaaaacatgacagatagtgagatgaatatcaagcaagcatccaactgcgtgacctacgatgccaaggaaaaaatcgcccccttacccttagagggacacgattcgacctgggatgaaattaaggacgacgctctgcagcactcctccccaagggctatgtgccagtactcgcttaagcctccatctaccagaaagatttactccgatgaagaagaactcctgtacttatccttcatcgaagacgtcactgacgagatactgaaactgggcctattcagtaatcggtttttagaacgccttttcgaacgccacattaagcagaataagcacctggaagaagaaaaaatgcgacatttgctacacgtgctcaaggtggatctgggatgcaccagtgaagaaaactcattctcatccgttaagggcgataacaaccacgacatggagctttcaaccctaaagattatggaaatgagtattgaagactgccccctggacgtctag

SEQ ID NO: 249130 - RNA, 990 nt, synthetic construct
  misc_feature 1..990: note = Description of Artificial Sequence: Synthetic coding sequence
  source 1..990: mol_type = other RNA
atggtctccaagtcccgctggaaactcttggcaatgctggccttggtcctcgtggtcatggtttggtattcgattagcagggaggactcattttatttccccatacctgagaaaaaagagccatgcctgcagggtgaggcagagtccaaagccagcaaattgtttggcaattactcaagggaccaaccgatattcctacggcttgaagactacttttgggtgaaaactccctcagcatacgagttgccttatggtactaaaggaagtgaagatctgcttttaagggtacttgctattacctcctcaagcatccctaaaaacattcaaagtttaagatgcagaaggtgcgttgtggtgggaaacggacatagactcaggaacagctctcttggcgacgctattaacaagtacgatgtcgttattcgcctgaacaatgcccctgtagctgggtacgagggggacgtgggttccaaaacaaccatgcgacttttctaccctgagagtgcccacttcgatcctaaggtggagaacaaccctgatacactacttgtcttagtggccttcaaagcaatggattttcattggatagaaactattttgtcagacaaaaaacgggtgagaaagggcttttggaagcagccacccttaatctgggatgttaatccaaaacaaatccgaattctaaaccccttcttcatggagatagcagctgacaaactgctatcgcttcctatgcagcaacctcgcaaaatcaaacaaaaaccaacgactgggctcctagctataacactggcactccacctgtgcgatcttgtccacatcgctggtttcgggtatccagacgcctacaacaaaaaacagactatacactactatgagcagattacgctaaaaagtatggcaggcagcggtcacaatgtctcccaggaagcccttgctatcaaaaggatgttggaaatgggcgccatcaagaaccttacctccttctag

SEQ ID NO: 249131 - RNA, 744 nt, synthetic construct
  misc_feature 1..744: note = Description of Artificial Sequence: Synthetic coding sequence
  source 1..744: mol_type = other RNA
atgctccagaacagcgccgtgttactggtccttgtgatttccgcgtccgcaacccacgaagccgagcagaatgattccgttagccctagaaaatcccgtgtggccgcacagaactccgcggaggtggtgagatgtctgaatagtgctctgcaggtaggatgtggtgcatttgcttgtctggagaatagtacgtgtgacaccgatggcatgtatgatatttgtaaaagcttcttgtactcagccgcaaaatttgacactcaaggtaaggcatttgtgaaagagtctctgaaatgtatcgcaaatggcgtgaccagcaaagtttttctcgcaatcagacgatgcagtacgttccagagaatgatcgcagaggtacaggaggagtgttactcaaagctaaatgtatgctctattgctaagcgcaaccccgaagcaataaccgaagttgtccagctccctaaccacttctctaaccgctactataaccgactggtccgcagcttactagagtgcgacgaggacaccgtttctacaatacgagacagcctcatggaaaagattggacctaacatggcctcactctttcacattcttcagacagatcattgcgcacaaacccacccaagagccgactttaataggcgccggacaaatgagccccaaaaactgaaagtactcttgagaaacctgcgcggagaggaagattcgccaagtcacattaaacggacaagtcacgagagtgcctag

SEQ ID NO: 249132 - RNA, 537 nt, synthetic construct
  misc_feature 1..537: note = Description of Artificial Sequence: Synthetic coding sequence
  source 1..537: mol_type = other RNA
atgtatgatatctgcaagtcctttctctattctgccgccaaattcgatacccagggaaaagccttcgtgaaagagagcctcaagtgcatcgcaaacggagtcacctctaaagtctttttggcaataaggaggtgcagcacattccagaggatgatcgccgaagttcaggaggagtgttacagcaaactgaatgtctgtagtatagctaaacgtaatccagaggccattaccgaggttgtgcagctcccaaaccatttctctaaccggtattacaaccgcctagttcgaagcctcttggaatgcgatgaggatacagtatccactattcgggattctttaatggagaagatcggaccaaacatggcaagcttatttcacatccttcaaactgaccattgtgcacagacccatcccagagcagactttaaccgccgcaggacaaacgagccccaaaagttgaaagttctgctgcgcaatttacgaggcgaagaggattccccttcccacatcaagcgaaccagccacgagagcgcatag

SEQ ID NO: 249133 - RNA, 537 nt, synthetic construct; identical to SEQ ID NO: 248527
  misc_feature 1..537: note = Description of Artificial Sequence: Synthetic coding sequence
  source 1..537: mol_type = other RNA

SEQ ID NO: 249134 - RNA, 705 nt, synthetic construct
  misc_feature 1..705: note = Description of Artificial Sequence: Synthetic coding sequence
  source 1..705: mol_type = other RNA
atgaaccacctccccgaagatatggaaaacgcgctgacggggtctcaaagttctcacgcaagtctccgaaatatccactctatcaatcccacgcagctcatggcgagaatcgagtcttacgaggggagagagaaaaagggcattagcgatgttcgtaggaccttttgtcttttcgtgacctttgacctactgtttgtgacattgttatggataattgaactcaacgttaatggaggtattgagaatacactcgaaaaagaagtaatgcagtatgactactactcttcctactttgacattttcctgctggccgtgttccgctttaaagtccttatcctggcctacgccgtgtgtagattacgacactggtgggccatcgctctcacaactgcagtcacttccgcctttcttttagccaaggtcatcctttccaaactgttctctcaaggggcttttgggtacgtgctacctatcattagctttatcttagcatggatcgagacttggttccttgatttcaaggttctcccccaggaagcagaggaagaaaatcgactgctaatcgttcaagatgcatctgagcgtgccgccctaattcctggaggattatcagacggtcagttttattctcccccggaaagcgaggcaggtagcgaagaagccgaagaaaagcaggattccgagaaacccctgttggaactctag

SEQ ID NO: 249135 - RNA, 1935 nt, synthetic construct
  misc_feature 1..1935: note = Description of Artificial Sequence: Synthetic coding sequence
  source 1..1935: mol_type = other RNA
atggacgacatcgctgacagaatgagaatggatgccggtgaagttacactggtcaatcataatagcgtattcaaaacccatctgttgccacagaccggcttccctgaggatcaattaagcctgagcgaccagcagattctgtcttcccgccagggtcacctcgatcggtctttcacttgctctacacgcagcgcagcttacaaccccagttactattccgacaatccaagctccgactcgttcctcggatctggcgacttaaggacctttgggcagagcgctaatggtcaatggcgcaacagtaccccaagctctagctccagcttacaaaagagtcgaaacagcagatccctgtatctcgagacccgcaagacatcttctggattatctaactcctttgctggaaagagcaatcatcattgtcatgtatcagcttatgagaagagcttccccattaagccagtcccatcacctagctggagcggttcttgtagacgcagtctccttagccctaagaaaacacagcggcgtcacgtatccacagccgaagagaccgttcaggaagaggaaagagagatctatcgccaactgttgcagatggtaacgggcaaacagttcaccatcgccaaacccactacacatttcccccttcacctcagccgatgcctttcctcatctaagaacaccctgaaagatagcttatttaaaaacggaaactcctgtgctagtcagattatcggttcggatacgagttcatccggtagtgcttctattctgaccaaccaggagcagttatcgcacagtgtctacagcctgtcctcttataccccagacgtagccttcggctctaaggactcaggaacacttcatcacccccatcaccaccacagcgtccctcatcaaccagacaatctggccgccagcaacacacaaagtgagggctccgactctgtgatcctgctgaaagtgaaagactctcaaaccccaactccctcaagtaccttttttcaagccgagctgtggattaaagaacttacctcggtctacgattctcgagctcgggaacgactgcggcaaatcgaagagcaaaaggcactggccctccaactgcagaaccaacggctccaggaaagagaacatagcgtgcacgactctgtcgagctgcacttaagagttcctctcgagaaggagattccagtaactgtagtgcaagagacccagaagaaaggccacaaactgactgatagtgaggacgagttccccgaaatcaccgaggagatggaaaaggaaattaagaatgtgtttcgcaacggtaaccaagacgaagttttgagtgaagcgttccgcttaacgattacccggaaggatatacaaacccttaatcacttaaactggttgaacgatgaaattatcaatttttacatgaacatgcttatggagaggtccaaggaaaagggccttccctcagtgcacgccttcaacaccttctttttcaccaaactcaagaccgcgggctatcaggcagtgaaacgctggacaaagaaggtggatgtttttagcgtggatatccttctcgtgcctatccatctgggcgttcactggtgcctggcagtggttgattttaggaagaagaatattacctattatgactcgatgggaggcattaataacgaggcatgtagaatactactccagtatctgaaacaggagtccatcgacaagaaaagaaaggaattcgatactaacggctggcagctattttctaaaaaatcccaagaaattccccaacagatgaacggctccgactgcgggatgtttgcctgtaaatacgcagactgtataacaaaagaccgccctattaactttacccaacaacacatgccctatttccggaaacgaatggtgtgggaaattctgcacagaaaactgttatag

SEQ ID NO: 249136 - RNA, 1281 nt, synthetic construct
  misc_feature 1..1281: note = Description of Artificial Sequence: Synthetic coding sequence
  source 1..1281: mol_type = other RNA
atggttctcagcgtaccagtcatcgccctcggcgcaacactcgggactgctacaagtattctcgccctctgcggcgttacttgtctttgccgtcacatgcatcctaagaaaggactgttgccacgcgaccaggaccccgatctggagaaagcaaagcccagcctgctaggatccgcccagcagtttaacgtgaagaaatcaaccgaacctgtccagcctagagctctgctgaaattcccagacatctacggccctcggcccgctgttacagcccctgaagttatcaactacgccgactactccttaagaagtaccgaggaaccaaccgcccccgcaagtcctcagcctcccaatgatagccgactgaagcgccaggtcacagaggaattatttatcctgccccagaatggtgtggtggaagatgtctgtgttatggaaacatggaatcctgaaaaggccgcatcttggaaccaggctcccaagcttcattactgcctggattacgattgccagaaggccgaactcttcgtcacacgactcgaagccgtgaccagcaatcatgacggcgggtgtgattgctatgttcagggcagcgttgcaaatcgcaccggatccgtggaagcacaaacagcactaaagaagaggcagctgcatacaacatgggaagagggcctcgttctgcctttggctgaggaggaactcccaacagcaaccctgactcttacactgcggacttgtgaccgattctcgaggcattcagtcgctggtgagttgaggctgggattggacggcacgtccgtgccacttggtgccgcccagtggggagaattgaaaacatcagctaaagaacctagtgctggcgctggagaagtcctgctttcaatatcatacttgcctgcagctaaccgtttgctagtggtgcttataaaagcaaagaatctgcacagtaatcagtctaaggagctcctcggcaaggatgttagcgttaaggtcactctcaaacaccaggcccgtaagctaaaaaagaaacaaacaaagagagccaagcataagattaaccccgtgtggaacgagatgattatgttcgagcttccagacgacctccttcaagcttcctcagtagagctggaagttttggggcaagatgactccggccaatcatgcgctttaggacattgcagcctcggactacatacaagcggatccgagcgctcacactgggaagaaatgctgaagaacccccgacgacagatagcaatgtggcatcaactacatctgtag

SEQ ID NO: 249137 - RNA, 234 nt, synthetic construct; identical to SEQ ID NO: 248531
  misc_feature 1..234: note = Description of Artificial Sequence: Synthetic coding sequence
  source 1..234: mol_type = other RNA

SEQ ID NO: 249138 - RNA, 366 nt, synthetic construct
  misc_feature 1..366: note = Description of Artificial Sequence: Synthetic coding sequence
  source 1..366: mol_type = other RNA
atgagaattatgctgctattcactgctatcctcgccttctctctggcccagtcattcggggcggtatgcaaagaacctcaggaagaggtagttccgggtggcggaaggtccaaaagagatcctgacctataccaattacttcaacgactgtttaaatcacactccagcctcgagggactcttgaaggcgctgtcacaggcttccacagaccccaaggaatctaccagcccagaaaaacgcgacatgcacgatttcttcgtcggccttatgggcaaaagaagcgttcaacctgatagccctactgatgttaaccaagagaacgtaccttctttcggaattttaaagtaccctccaagagccgagtag

SEQ ID NO: 249139 - RNA, 366 nt, synthetic construct
  misc_feature 1..366: note = Description of Artificial Sequence: Synthetic coding sequence
  source 1..366: mol_type = other RNA
atgcgaataatgctcctcttcaccgccatacttgctttttccctggcccagagctttggcgctgtatgtaaagaaccacaagaggaggtggtcccaggcgggggcagatcaaagcgtgatcctgacctgtatcagttgttacagaggctctttaagtcacattctagtctggaaggtctgcttaaagccctaagtcaggcttcgacggaccctaaggaaagcacctctccagaaaaacgagacatgcacgacttttttgttggcctgatgggtaaacggagcgtgcaaccagattcccctactgatgtgaaccaggaaaatgtgccgtcatttggaatcttgaaatacccaccccgcgccgagtag

SEQ ID NO: 249140 - RNA, 312 nt, synthetic construct
  misc_feature 1..312: note = Description of Artificial Sequence: Synthetic coding sequence
  source 1..312: mol_type = other RNA
atgcggatcatgctactattcacggccatcttggcattctcactggcacaatctttcggcgccgtgtgtaaagaacctcaagaggaggtggtacctggcggcggacgttccaagagagaccccgacctttatcagctcctacaaaggctctttaagtcccatagctcgctagaaggcctactcaaagcattgtcacaggcttctaccgaccctaaggaatcaacctctcccgagaagcattctccaaccgacgtcaatcaagaaaacgtgccctcgtttggaatattgaagtaccctccgcgcgcggagtag

SEQ ID NO: 249141 - RNA, 366 nt, synthetic construct
  misc_feature 1..366: note = Description of Artificial Sequence: Synthetic coding sequence
  source 1..366: mol_type = other RNA
atgcggataatgttgctcttcacagcgatcctggctttttcattggctcagagttttggcgccgtgtgcaaagagccccaagaggaggtcgtccccgggggcggtagatccaagcgtgaccccgatctctatcaactgttacagagactctttaaatcccatagctctctcgaaggcctcctgaaagccttatcccaggcatccacggacccgaaggagtcaacctcacccgagaagcgcgacatgcatgatttttttgtgggactaatggggaagagaagtgttcaacctgattcccctacagacgttaatcaggagaacgtgccatcattcggaattctaaagtacccccctcgcgcagagtag

SEQ ID NO: 249142 - RNA, 4866 nt, synthetic construct
  misc_feature 1..4866: note = Description of Artificial Sequence: Synthetic coding sequence
  source 1..4866: mol_type = other RNA
atggaatgggtgcttgctgaggccctcctgtcacaaagcagagaccccagagcactgttaggcgcactgtgtcagggggaggccagcgcagagcgggttgaaaccctccggttcctgcttcaaagactcgaggacgaagaggctagaggttctggcggcgcgggggctcttcccgaagccgctcgggaggtcgctgcgggctatttggtccccttattacggagcctccggggacgccccgctggggggcccgatccatctctccagccgaggcatcgacgacgcgtgctgagagcagcaggcgccgcactccgaagttgtgtgcggctggctggcaggcctcagttggctgctgcgcttgccgaggaggctctccgcgatttgcttgccggttggcgcgctccaggtgccgaggccgctgttgaagttctagctgctgtggggccatgtctgcgaccacgcgaagacggtcctctgctggaacgcgtagcagggactgctgtggctctagccctggggggcggaggagatggagacgaggccggacctgctgaagatgctgctgcccttgtagcggggcgcctacttcccgtactagttcagtgcggaggggctgccttgcgtgcagtctggggcgggcttgcagccccaggtgctagcttaggaagtgggcgtgttgaagagaaacttttggttctctctgcgctggctgagaaattgctccccgaacctggtggagacagagcgcgcggcgccagagaagccgggcctgacgcaaggagatgttggaggttttggcggaccgtccaggctggactagggcaagctgatgcccttacacggaagagagctagatatctactacaacgggcagttgaagtgtcagctgagctcggggctgactgcacttgtggccctcaagaaggcaatggcccctctttgttttggtggtcagagaggaaaaaagatgagttgcttaaattttgggaaaactacattcttattatggaaaccctcgaaggcaatcagatacacgtcataaaacccgtgttaccaaaactgaataacttgtttgagtatgcagttagcgaagagaatggctgttggctctttcatccgtcctggcacatgtgtatctacaagcggatgttcgagagcgaaaacaagattttatcaaaagaaggggtgatccattttctggaactgtatgaaacaaagatcctgcctttttctcctgaatttagtgagttcatcatcggccctttaatggacgcccttagtgaaagctccctctacagccggagccctggccaacctataggatcatgctctcccttaggactcaaactccaaaaattccttgtcacctatatatccctcctgcccgaagagatcaagtcctccttcctcctcaagtttattcgcaaaatgaccagtcggcactggtgcgcagtaccaatcttgttcttatccaaggcgctagctaacgtgccccgccacaaagcactaggtatagacggactgctggcactgcgcgatgttatccattgtactatgataactcaccaaattctactcaggggtgctgcacaatgttatctcctccaaaccgcaatgaacctgttggatgttgaaaaagtatccttgtctgatgtctcaactttcctgatgtcacttagacaggaagagagtctcggtcgagggacgtctctgtggaccgagttgtgtgattggctccgcgtgaacgagtcatacttcaaaccctcgcctacttgtagcagcatagggctccataaaacgtccctgaatgcttacgtcaaatcaatcgtacaggaatacgtgaagagcagcgcatgggagacaggggaaaattgtttcatgcccgattggttcgaggctaagctagtaagcctgatggtgttgttggcagttgatgtggaaggaatgaagacacaatattctgggaagcaacgaacagagaatgtccttcggatctttttggacccattactggacgtgctgatgaagtttagtacaaacgcatacatgccgctcttaaaaaccgatagatgcctgcaactgctgcttaaactgttgaacacatgccgactgaaaggttcttctgcacaggatgatgaagtgtccaccgtcctgcaaaacttctttatgtctacaactgaaagcatctccgaatttatattgcggcgcctgaccatgaacgaattgaactctgtatcagacctggatcggtgtcatctctacctaatggtgctaaccgaactgattaatctgcacttgaaagttgggtggaaaagaggaaacccaatctggcgcgtgatttcacttttgaaaaatgcctccattcagcacctgcaggagatggactcaggacaagagcccactgtggggagccagatccaaagggtggtgagcatggccgccctcgcaatggtttgcgaagcaattgatcagaaaccagaactacaactcgattcactccacgccggccctctcgaaagctttttgtcttctctccaactcaaccagaccctccagaagccccacgctgaagaacagagtagctatgcacatccattggaatgctcatctgtgctggaggaaagcagtagcagtcagggatggggaaagattgttgcccaatacatacacgatcagtgggtatgcctgtctttccttctcaaaaagtatcacacgctgattccaaccacgggcagtgaaattcttgagcctttcctcccagcagtacaaatgccaattaggactttgcagagcgcccttgaggcactcactgtactctcttccgaccaggtgctccccgtgttccattgtttaaaagtgttggttccgaaactccttaccagttccgaatccttgtgtatagaatcctttgatatggcatggaaaattattagcagcctcagcaatacacagttgatcttctgggcgaatcttaaagcctttgttcagtttgtattcgacaataaagtactgacaattgccgcaaaaataaagggccaggcttactttaagataaaggagataatgtacaaaataatcgaaatgtctgctattaagacaggcgtctttaatacactgatatcatactgctgtcagagctggatcgtctccgcctctaacgtcagccaaggatcactatcatccgccaaaaattactcagaattaattctcgaagcttgtattttcggaacagtgtttagacgggaccagcggctggtccaagacgtgcaaacatttattgagaacctaggtcatgactgcgcagcaaacatcgtcatggagaataccaagagggaagaccattatgtgaggatctgcgcggtcaaattcctctgtctactcgacgggtcaaatatgtcccacaaattattcatcgaggatcttgccattaaacttttagacaaagatgagctagttagtaaatcaaagaaaaggtactacgttaattccctgcaacaccgcgtgaaaaatagagtttggcaaactcttcttgttcttttcccacggctggaccagaacttcttaaacggaatcatcgatcgaatcttccaagcaggattcacaaataatcaagctagtatcaagtacttcatcgaatggataattatcctcatcctgcacaagtttcctcagtttctgcccaagttttgggattgcttttcatacggggaggaaaatcttaaaactagcatttgtacgttccttgctgtattgtcacaccttgatataatcacacagaacatacccgagaaaaaactaatcttgaaacaggcccttatagtcgtgttacaatggtgcttcaatcacaacttctcagttcgcctgtacgccctcgtcgccttaaagaaactgtggaccgtctgtaaggtcctgtcagtggaagaattcgatgcgctcactcctgtgatagagtccagcctacatcaagttgaaagcatgcacggagccggcaatgcgaaaaagaattggcaacgtatacaagagcacttcttctttgccacatttcaccccctaaaagactattgcctggagaccattttctacatactgccccgcctgtctggactcattgaggacgaatggattaccattgacaaatttacccgattcactgatgttcctctcgcagccggcttccaatggtatttgtcccagacccaactgagtaagctcaagccaggggactggagccagcaggatatcggaacaaaccttgtcgaagcagataaccaggccgagtggactgatgtgcagaagaagattatcccgtggaacagtcgggttagtgatttggatttggaactcctctttcaagaccgtgccgcacgtctcggaaaaagtatatcaaggctgattgtcgtggcaagcctgatagataaacctaccaacttaggaggcctgtgcaggacctgtgaggtcttcggagccagcgtgcttgtagtgggttccttacagtgtatctccgataagcagttccaacatttgtccgtctctgctgagcaatggttacctttggtagaggtgaaacctccgcaattgatcgactacctccagcagaagaagaccgagggatatacaatcatcggcgttgagcagacagcaaaatctttggacttgacacagtactgctttcccgaaaaatctctgctactactaggcaacgaacgcgaaggaattcccgcaaatctaattcaacagctagatgtctgcgtcgaaatcccccagcaaggtatcattcggagccttaacgtgcacgtcagtggcgcactgttaatctgggaatacacgcgtcagcagctcctgtcacacggcgacactaaaccatag

SEQ ID NO: 249143 - RNA, 759 nt, synthetic construct
  misc_feature 1..759: note = Description of Artificial Sequence: Synthetic coding sequence
  source 1..759: mol_type = other RNA
atgggcgtacttcttactcagcgcactctcctttccctcgtattagcattactatttccatcaatggcctctatggctgcaatcgggagctgctccaaagagtacagagtactgctgggtcaactacagaagcagaccgaccttatgcaggacacatctcgactgttggacccatatattaggatccaaggcctggatgtgcccaagctgcgggagcattgtcgtgaaaggccaggcgcatttcccagcgaagagaccctccgaggactgggccggcgaggttttctacagaccttgaacgccacattgggttgtgttctgcatcgcctagcagacttggaacagagattgcccaaggctcaggatctggagagatcggggttaaacatcgaggacctggagaagctgcaaatggccaggccaaacattctcggcctcagaaataatatttattgcatggcccaactgcttgacaacagtgacaccgcagaacccacaaaagctggaaggggcgcatcacagccacccacccccacacccgcaagcgatgcttttcagaggaaactggagggatgtaggtttctgcacggttaccatagatttatgcactccgtgggacgagtgttcagcaaatggggcgagtccccaaacagatcccgcaggcattctccacatcaggctttgagaaaaggtgtccggcgaacccgtccttcgagaaaaggaaaaaggcttatgactagaggccagctgccacggtag

SEQ ID NO: 249144 - RNA, 2049 nt, synthetic construct
  misc_feature 1..2049: note = Description of Artificial Sequence: Synthetic coding sequence
  source 1..2049: mol_type = other RNA
atgtgccccgggctatacccgtactccagtctacttgaatatgggcggtccatgatcatttacgaacaggaaggcgtctacatccatagtagttgtggtaagactaacgaccaagacggacttatctccgggatcctgagagtgctggagaaagatgcggaagtgatcgtagactggaggccgcttgacgatgctcttgactcttccagcattttatatgccagaaaggacagctcctccgtcgtagaatggactcaggcccccaaagagcgaggacaccgaggttctgaacacctaaactcctatgaggcagaatgggatatggtgaacacggtcagttttaaaagaaaaccacatactaacggtgatgccccaagccatagaaacggcaaaagtaaatggtccttcctgtttagtctaacggatctgaagagcatcaaacagaataaagaaggaatgggttggagctaccttgttttttgtcttaaggatgacgtggtattgcctgccttacatttccatcagggggatagcaagttgctgattgagagtctggagaaatatgtggtgctttgtgaatccccgcaagacaagcgtacgctcttggtaaactgtcagaacaaaagcctctcccaatccttcgaaaatctcctggacgaaccagcctacggactgatccaaaaaattaaaaaagatccatataccgccacaatgatcgggttctctaaggtcacaaattacatctttgacagcttgaggggctccgatccttcgacacatcagagaccaccttctgagatggccgactttctttccgatgcaatccccggtttgaagattaaccagcaggaagagcctggcttcgaggtgatcacacgaattgacttaggggagcgacctgtggtccagcggagggagccagttagccttgaggaatggaccaagaacatagatagtgagggacggattcttaatgtggataacatgaaacaaatgatctttaggggcggactatcgcatgcgttgaggaaacaggcatggaagttccttctagggtattttccctgggacagtaccaaggaggaacggacacaattacagaagcagaagacggacgaatatttccggatgaaattacagtggaagagtatcagtcaagagcaggaaaaaaggaatagtagactaagggattaccggagcctgatagaaaaggacgtaaacaggactgatcgaaccaataaattctacgaaggtcaggataaccccggcctcattctgctgcacgatattcttatgacctactgtatgtatgacttcgatttagggtatgtccagggcatgtcagatctactctccccattgttatacgtcatggagaacgaggtggatgccttttggtgctttgcgtcttatatggatcaaatgcatcagaacttcgaggaacagatgcaaggtatgaagactcagctcattcagctctcgacattgttacggctccttgatagtggattttgtagttacttggagtctcaggattctggatatctatacttctgttttcgctggctgcttatacgtttcaaacgcgaattctcttttctcgacatcttgcgcttgtgggaagtaatgtggaccgagctaccctgcacgaattttcatcttctattgtgctgcgccatcttagaatccgagaagcagcagataatggaaaagcactacggtttcaacgagatcctgaaacacattaacgaattgtccatgaaaatcgacgtggaggacattctctgcaaagccgaggccatttctctgcaaatggtgaagtgtaaagaacttcctcaagccgtctgcgaaatccttggactccagggctcggaagtgactacacctgattctgatgtaggagaagatgagaacgtcgtcatgaccccttgtcctacctccgcctttcaatcaaatgctttgcctacccttagtgcttcaggcgccagaaatgactcacccacgcagatccctgtctcatcagacgtgtgtcgtctcaccccggcgtag

SEQ ID NO: 249145 - RNA, 1338 nt, synthetic construct
  misc_feature 1..1338: note = Description of Artificial Sequence: Synthetic coding sequence
  source 1..1338: mol_type = other RNA
atgattggtttttcaaaggtcaccaactacattttcgattccctgagaggatccgatccatctacgcatcaaagacccccatctgagatggccgacttcctttctgacgcaatccccggcttgaagataaatcagcaggaagaaccaggctttgaagttatcaccagaattgacttaggtgagcgtcccgtcgtacagcggagagagccggtttcattagaggaatggacaaagaacatcgattcagaaggacgtattctgaacgtagataacatgaagcaaatgatcttcaggggaggattatcacatgccttgaggaaacaagcatggaagttcctcctcggttacttcccctgggactccacaaaggaagagcgtacacagctgcagaaacaaaaaacagacgagtactttagaatgaaactacagtggaaatccatttcacaggaacaggagaaacgtaacagccggctacgagattacaggagcctgattgaaaaagatgtgaaccgcacggatagaaccaacaaattttatgaagggcaggataacccaggtctgatattgctgcatgatatcttaatgacctattgtatgtatgatttcgaccttggctatgtgcaaggaatgtctgaccttttgtccccgctactgtatgtgatggaaaatgaggtagatgctttttggtgttttgcgtcttacatggatcaaatgcatcagaacttcgaggaacaaatgcagggaatgaagactcagttgatccagctatccacactccttcgtctattggattcaggattttgttcgtacctggagagccaggactcaggatacctctatttctgcttcaggtggttgcttattagattcaaaagggaattttcatttttggatatccttagactgtgggaggtgatgtggaccgaactaccatgcactaattttcacctcctactttgctgcgcaatacttgaatccgagaagcaacagataatggagaagcactacgggttcaatgaaatcctgaaacatattaatgaactcagcatgaagatcgacgtggaagatatactgtgtaaggcagaagccataagtttgcaaatggttaaatgcaaagaactgccacaggccgtatgcgagatactaggcctacaaggttctgaagtcacaacacctgattccgatgtcggagaggacgaaaatgttgtgatgacaccatgccccacctctgccttccaaagtaacgccctgcccacactcagtgcctctggcgcgcgcaacgattctccaacacaaatccccgtatcttcagatgtctgcaggctgacccccgcctag

SEQ ID NO: 249146 - RNA, 2025 nt, synthetic construct
  misc_feature 1..2025: note = Description of Artificial Sequence: Synthetic coding sequence
  source 1..2025: mol_type = other RNA
atggcggcagcgggggtggtctcaggcaagataatctatgaacaggaaggagtatacatccatagttcttgtggcaagaccaacgaccaggatggcctaatttctggaatccttagagtactcgagaaagatgcggaagtcattgtggattggcgtcccttggatgacgcccttgattcaagtagcattctctacgcacgcaaagacagctctagtgtcgtcgagtggactcaagcgcctaaagagaggggccacaggggcagcgaacatctgaactcatacgaagcggaatgggacatggttaatactgtgtcctttaaaagaaagcctcataccaacggagatgcaccttctcatagaaatggaaaatccaagtggagtttcctgttttcattaaccgacctgaaaagcatcaaacagaataaggagggaatggggtggagctacctagtcttctgtctcaaggatgatgtggtgttacctgcgctgcacttccaccagggcgactcaaaacttttaatagagagcctggaaaaatacgtcgtcctgtgcgagtcacctcaggataagcggaccttacttgtcaattgtcaaaacaaatctttgtcccagtcctttgagaatctgctcgacgaacccgcctatggtctgatccagaagattaaaaaagacccctacaccgcgactatgattggtttctcaaaagtgacaaattatattttcgatagcctgcgtggctcggaccctagcactcaccagagacctccatctgaaatggcagacttcctctcagacgccatccctggactgaagattaatcaacaagaggagcccgggttcgaagttatcactaggattgaccttggagaacgacctgtagtacagagacgggaaccggtcagcctcgaggagtggactaagaacattgactcggaaggtagaatacttaacgtggacaatatgaaacaaatgatattccggggcggactaagccacgcacttcgtaaacaggcctggaagttcctcctaggttactttccatgggatagcactaaagaagagcgaactcaactgcagaaacagaagacggatgagtacttccggatgaagttacagtggaaatcgattagtcaggagcaagaaaaaaggaacagtagactccgcgattaccgcagcttaattgaaaaggatgtgaacagaaccgatcgtactaacaagttctacgagggacaggacaatcctggactgattcttctgcacgacatcttgatgacctattgtatgtacgactttgacctgggctacgtgcagggtatgtccgatcttctttcgccactcctgtacgtcatggagaatgaagtggatgctttttggtgttttgccagctatatggatcagatgcatcaaaattttgaggaacaaatgcagggcatgaaaacacagttgatacaattgtccactcttctgcgcttactggactctgggttttgctcatatttggaaagccaagactccgggtatctctacttttgtttccggtggctcctaatccgatttaaacgtgagttttcctttcttgatatcttacggctatgggaagtgatgtggaccgagctcccatgcaccaatttccaccttctactgtgctgcgctatccttgagtcagagaaacaacagatcatggagaagcattatgggttcaatgaaattttaaaacatattaacgaacttagtatgaaaattgatgtggaggacatcttgtgtaaagccgaggcgatttcacttcagatggtcaagtgcaaggaactaccacaggccgtctgtgagatcctcggcctgcaaggcagcgaggtgactaccccagacagtgacgttggcgaagatgagaatgtagtgatgaccccatgccctacctccgcgttccagagcaatgctctgcccacattgtccgcgtccggtgcaagaaacgattccccaacacagatacccgtgagctcagacgtttgtcgtcttaccccagcttag

SEQ ID NO: 249147 - RNA, 2076 nt, synthetic construct
  misc_feature 1..2076: note = Description of Artificial Sequence: Synthetic coding sequence
  source 1..2076: mol_type = other RNA
atggcagcggcaggcgtggtgtcaggcaagatcatctacgaacaggaaggcgtttacatacattcttcatgtggaaaaactaatgatcaggacggactcatctctggaatactgagagttctggaaaaggacgcggaagttatagtagactggagaccactggatgacgctctggatagctcgagtatcctctatgcaagaaaggatagttcttctgtggtagaatggactcaagctcctaaggaacgaggacacagaggttcagaacacctgaattcgtacgaggcagagtgggatatggtgaatacagtttcttttaagcggaagccgcacaccaatggcgatgcaccgtcccatcgaaatggcaagagcaaatggtccttccttttttccttaactgatctaaaatcaatcaagcagaataaagaaggtatgggctggagttacttggtcttctgtctcaaagatgatgtcgttttacccgccctccacttccaccagggcgactcaaagcttctcattgagtctttagaaaaatacgtagtcctgtgtgagagtccccaagataagcgcaccttgctggtgaactgccagaataagtctctatcacaaagtttcgagaatctgttagacgaacctgcttacggactgatacaagctgggttgctggaccggaggaagctcctctgggctattcaccattggaagaaaatcaaaaaagacccttacactgctacaatgattggcttttctaaggtaaccaattacatatttgactctcttagaggctccgatccctccacacatcaaagacctccatccgaaatggccgactttctatccgatgccatccctggcctcaaaatcaatcaacaggaggaaccgggttttgaggttatcacccgcatcgatctaggagagagacctgtggtgcagagacgagaacccgtgtcattagaggagtggaccaagaacatcgatagcgaaggtcggattctaaatgtggacaacatgaaacagatgatatttagggggggacttagccacgccttaagaaagcaggcctggaaatttctgctcggctattttccttgggactcaacaaaagaggagagaacgcagctgcaaaaacaaaagacagatgaatactttaggatgaaattacagtggaaaagcatttcacaggagcaggaaaaacgtaacagtcgcctacgggactaccgaagtttgatagaaaaagacgtgaatcgaaccgacaggaccaacaagttttatgaaggccaggacaatcccggcttgattctactgcacgacatcttgatgacttattgtatgtatgattttgacttggggtacgttcaaggtatgtccgacttactgagccctcttctgtacgtgatggagaatgaggtggacgctttttggtgtttcgcatcttacatggaccagatgcatcagaatttcgaagagcaaatgcagggaatgaaaacccagctgatacagctgtcaacactgctgagactcttagacagtggtttctgtagctacctggagagtcaagactcgggttacctatatttttgttttaggtggcttctaattagattcaaacgcgagttctcctttctggacattttacgcttatgggaagtgatgtggacagagctgccctgcaccaactttcacttattgttatgctgcgcaatcctcgaaagcgaaaaacagcagattatggaaaagcactatggcttcaatgaaattctcaaacacatcaatgaactgtccatgaagatcgatgtcgaagacattttgtgtaaagcagaagcaatctcactgcagatggtgaaatgcaaggaacttcctcaggcagtttgtgagatcctgggccttcaaggatctgaggttacaacccccgattccgacgtgggcgaagatgaaaatgtcgtaatgacgccctgccccacttctgcctttcagtctaatgccctgccaaccctcagcgcctccggcgcccgcaacgattctcctacccagatacccgtgagctcagatgtgtgtcggttaacccccgcttag

SEQ ID NO: 249148 - RNA, 5514 nt, synthetic construct
  misc_feature 1..5514: note = Description of Artificial Sequence: Synthetic coding sequence
  source 1..5514: mol_type = other RNA
atgggtgctatgacacaattgctggcgggcgtgtttctcgcctttctggctcttgctactgaagggggcgtgttaaaaaaggtgatcagacataaaaggcagtccggcgttaatgccacactcccagaagagaatcagcccgttgtgtttaaccacgtgtacaatataaagctgcctgtgggctctcaatgcagtgtagatctcgaaagcgcttcaggagaaaaggatctggcccctcctagcgaacccagcgaatctttccaagagcacactgtggacggagagaaccagatcgtattcacacataggattaatatcccccgcagagcgtgtggatgcgccgcagcacctgacgttaaggaacttctgtcacggttagaggagttagaaaacttggtcagctctctacgcgagcagtgcaccgccggcgcaggctgttgtttacagcccgccacgggcagactggatacccgcccattctgtagcggccgggggaatttcagcactgaagggtgcggctgcgtttgtgaaccagggtggaagggacccaactgcagtgagccagagtgtcccggtaattgccatcttcgaggtcgttgcatagacggtcagtgcatatgtgacgatggctttacaggagaagattgtagtcagctcgcctgcccatccgattgcaatgaccagggaaagtgcgtgaatggtgtctgtatttgctttgagggttacgctggtgccgattgttcccgggagatttgtcccgtgccctgttccgaagagcacggcacctgtgtggacggcctatgtgtgtgccatgatggcttcgctggagatgactgtaataagccgttgtgcttgaacaattgttataataggggccgctgcgtggaaaatgagtgcgtttgtgacgaaggctttactggagaagactgttcagagctgatctgccctaacgattgcttcgacaggggtaggtgcataaatgggacttgttattgtgaggagggatttacgggggaggactgcggcaagccaacatgcccccacgcctgtcacacccaagggaggtgcgaagaagggcagtgtgtttgtgatgagggttttgcaggtgtggactgttccgaaaagagatgccccgcagactgtcacaaccgggggagatgcgtggatggtcggtgtgaatgtgatgatggctttacaggagcggactgtggcgagctaaaatgtcctaatggttgctctggccacggcagatgtgtgaatggacagtgtgtttgcgatgaaggatacacaggggaggattgctcacagctgcgctgtccgaacgactgtcacagcagggggaggtgtgtcgaaggaaaatgtgtctgcgaacagggtttcaagggctacgactgtagtgacatgagttgtcctaacgactgtcaccagcatggaagatgtgtgaacgggatgtgtgtatgtgatgatggctatacaggcgaggactgcagggatagacagtgcccaagagactgtagcaacagaggactgtgcgtggatgggcagtgcgtatgcgaagatggtttcacagggccagactgtgctgagctgagctgtcctaatgattgccacggccaagggcgatgcgtgaacgggcagtgtgtatgccacgaggggttcatgggaaaggattgtaaagaacagaggtgccctagcgattgtcatggacagggacgctgcgtcgatgggcagtgcatttgccacgaaggattcacaggcctggattgcggacaacactcgtgccccagcgattgcaataaccttggtcagtgtgtgtccggacgatgcatttgcaatgagggttacagcggcgaagattgcagtgaggttagcccaccaaaagacttagttgtgaccgaggtgacggaagagacagtaaaccttgcctgggataacgaaatgcgcgttacggaatacctcgtcgtttatacgccaactcatgaaggaggcctggaaatgcagttccgcgtgccaggggatcagactagcaccatcattcaggagctggagccaggagtggaatactttatccgcgtttttgctatactggagaataaaaaatccatccccgtgagcgcccgtgttgcaacatacctcccggcacccgaaggcttaaagttcaaaagtattaaggaaaccagtgttgaagtcgagtgggaccccctggacattgcctttgaaacgtgggaaataatctttagaaacatgaataaagaggacgagggagagattacaaagagcctgagaaggcctgagacgagctacaggcagaccggactggcacctggacaggagtacgagataagtctgcatattgtgaaaaacaatactcggggccctggcctgaagagggttacaacaacccgcctggacgccccatcccaaatagaggtgaaagacgtgactgatacaaccgcccttattacttggtttaagcccctcgcagagattgacggcatcgagcttacgtatggaattaaggatgtccccggagacagaactaccatagatctcactgaggatgaaaatcaatatagcattgggaacctaaaacctgatacggaatatgaggttagcctaattagtcgtcggggagatatgagctctaatccagcaaaagagaccttcacaaccggcttagacgccccaagaaatctcagacgggtaagccagactgacaattctataaccctggaatggagaaacggcaaggctgcaatcgattcgtataggattaaatatgcccccatcagcggaggggaccatgcagaagttgatgttcccaaatcacagcaggccactaccaaaacaactttaactggactgaggccgggtactgaatatgggatcggtgtctcagcagtaaaagaggataaggaatctaatccagccaccattaacgctgcaacagaactagacactcctaaagatcttcaggtctctgagacggccgaaacaagcctgaccctgttatggaaaacaccactagctaagtttgatcgataccgcctcaattattctctaccaacgggacaatgggtgggggtgcagctccctagaaatactacttcatacgtcctgcgaggactagagccgggccaggaatacaatgtgctgctgaccgccgagaagggacggcacaagtctaaaccagctcgcgtgaaggcttcaaccgctaaagaacccgagatagggaatctgaatgtttccgatatcaccccagaaagctttaacttatcctggatggcgacagacggaattttcgaaacttttaccattgagattatcgattccaacagactgctagagactgtcgagtacaacatatctggtgccgaacgtacagcacacatttccggcctgcccccctccacggattttattgtttatttgagtggcctagctccttccatcagaacaaagactatttctgcaaccgccacaaccgaggccctgcctcttttagagaacttgaccatatctgatatcaacccctatggcttcactgtcagctggatggccagtgagaatgcgtttgactcgtttctcgttacagtggtggattccggcaaactcctcgaccctcaagagttcaccctgagcggcacccagcgtaaattggaactccgcggtctgataacaggaatcggctatgaagtgatggtatctgggtttacccagggccaccagacgaagcccctgagggcagaaatcgtaacggaagctgagccagaagtggacaacttgttagtgtccgacgctactccagacggctttcggctatcatggactgctgatgaaggtgtgttcgacaatttcgtactaaagatccgcgatactaagaagcaaagtgaacccctggagataacgctcctggcccccgaaagaacgcgcgacatcacaggacttcgtgaagcgacagaatacgaaattgagttgtatggcatttccaaaggacgccgctctcaaaccgtgtctgctattgctacaacggctatgggaagcccaaaagaagtgatcttctcggacataaccgagaactccgcgaccgtatcctggagagctcctaccgctcaagttgaaagtttcagaatcacctatgtgcccattaccggagggacaccttcaatggtaactgttgacggtactaaaacgcagactagactcgttaaattaatcccgggcgtggaatatttagttagcatcatcgccatgaagggcttcgaggagagtgagccagtgagcggttcttttaccacagcgcttgatggcccctcaggactcgttaccgccaatataaccgactcagaggccctggcacggtggcagccagcaattgcgaccgtggacagctacgtcatcagttatacaggtgaaaaagtgccagaaattacccgcaccgtctcaggcaataccgtggaatatgccctgaccgaccttgaaccggccacagagtacactctgcgcatattcgccgagaagggtccgcaaaagtcctccacaatcaccgctaagttcaccacagacctggattctccaagagatctaactgccaccgaggttcaaagcgaaactgcattacttacatggcggcccccaagggcaagtgtcacgggctacctccttgtctacgaaagtgtcgatggcacagttaaggaagtgatcgtgggtcccgatactacttcctattctttagccgatctgtccccctccacccactacaccgcgaaaatccaagcactcaatggcccgctgagatcgaacatgatacagacaattttcaccactattggcctgttatacccctttcccaaagattgcagtcaggcaatgctgaacggtgacaccacgagtggcctatatacaatttatctgaatggagataaggccgaagctctggaagttttttgcgacatgactagtgacgggggcggttggattgtgtttctgcggaggaaaaacggacgtgaaaatttctatcaaaactggaaggcatacgcggctggatttggtgatcgccgggaagaattctggttgggactggataacctgaacaaaataacagcacaggggcaatatgaactgagggtagacctaagagaccacggggagacagcattcgccgtatacgacaaattttcagtgggagatgctaaaacaagatacaagctgaaggtggaaggctactcagggaccgcaggcgacagtatggcctaccacaatggcagatcattctctacgttcgataaggacacagactcagctatcactaattgtgctctaagttataaaggagccttctggtaccgcaactgccacagagtcaatcttatgggaaggtatggagacaacaatcattcacagggggtgaattggttccactggaaagggcacgaacactctattcaatttgctgagatgaaattgagaccttcaaattttcggaatctagagggcagacgtaaacgggcttag

SEQ ID NO: 249149 - RNA, 4695 nt, synthetic construct
  misc_feature 1..4695: note = Description of Artificial Sequence: Synthetic coding sequence
  source 1..4695: mol_type = other RNA
atgggcgcaatgacgcagttactggctggggtcttcctggcctttctggcattggccacagaagggggggtgttgaagaaggttattcgacataaacgccaaagtggagttaatgcaaccttacctgaagaaaaccagcctgtcgtctttaaccatgtatataacattaagcttccagtgggcagccagtgcagtgttgatttagagtctgcaagcggggaaaaagacctagcacccccgtccgaacctagtgagtcgtttcaggagcatacggttgacggagagaatcaaattgttttcacccatagaatcaatatccctagacgcgcatgtggatgcgccgcagcccctgatgtcaaagaacttctgtcaaggctagaggaattggaaaacctggtaagctcattacgcgagcagtgtacagccggagccggatgctgtctgcaaccggccaccgggagattggatacgagaccattctgctccgggcggggtaacttttctaccgagggttgcggctgtgtgtgcgaacctggttggaagggtcctaactgcagcgaacccgaatgccctggcaattgtcacctcagaggtaggtgtatcgacggccaatgcatctgcgacgacggctttacgggagaggattgtagccaactcgcttgccccagcgattgtaacgatcaggggaaatgcgtgaacggcgtgtgcatttgtttcgaagggtatgccggagccgattgcagccgggaaatatgtcctgttccatgctcggaagaacacggtacatgtgtggatggtttatgtgtgtgtcacgatggtttcgccggagatgactgtaacaagccactttgtcttaataactgctacaataggggacgatgcgtagagaacgagtgcgtatgcgacgagggctttacaggcgaagattgttccgaattgatttgccctaatgactgcttcgataggggccggtgtatcaacggcacttgttattgcgaggaaggtttcacaggagaagattgtggcaagcctacctgcccgcacgcatgtcacacccaggggcggtgtgaggaaggccagtgtgtgtgcgatgaaggttttgcaggtgtggattgtagcgaaaagagatgtcccgccgactgccataataggggaagatgtgtggatggaaggtgtgaatgcgatgatgggttcactggcgccgactgcggagagcttaaatgccctaatggctgttcgggccatggccgatgtgtaaatggccagtgcgtttgcgacgagggatacacaggagaggactgctcacagttacggtgtccaaacgactgccacagtagggggaggtgtgtagagggcaaatgtgtatgtgaacagggtttcaaaggctacgattgctcagatatgagttgtccaaatgactgtcaccagcacggccgctgcgtaaatggcatgtgcgtatgcgacgacggttacacaggagaagattgtagagatagacagtgtcccagagattgcagcaacagaggtttatgtgttgacggacaatgtgtgtgcgaggacggctttacaggaccggactgtgcggaactctcctgccctaatgattgccatggtcagggaagatgcgtaaacggacaatgcgtgtgccacgagggcttcatgggcaaggactgtaaggaacagagatgcccctcggactgtcatgggcagggtcgctgtgtggacgggcagtgtatctgccacgaaggtttcaccgggctggattgcggacaacactcttgtccttccgattgtaacaacctgggacaatgtgtgtcagggagatgcatatgcaatgagggatatagtggcgaggattgtagtgaagtcagccctccaaaggacctggtggtaacagaggtgacggaggagacagttaatctggcctgggataatgaaatgcgagttactgagtacctcgtagtgtacacaccaacgcacgaaggcggactggaaatgcaatttcgcgttccaggggaccaaacatcaacaatcatacaggagctggaacccggcgttgagtattttattcgtgtgtttgcaatactcgagaacaaaaagagcatacctgtgtccgcccgcgttgcgacttatttgccagccccggaaggactaaaatttaaatctatcaaggaaactagtgtcgaggttgaatgggaccccttggatatagcgtttgagacgtgggagattatcttcaggaacatgaacaaggaagatgaaggagagattactaagagtttacgaaggcctgaaacctcctaccggcagaccggtttagccccaggacaggagtacgagatcagtttacatattgtcaagaacaatactcgggggcccggactcaagagagttaccactactcgccttgacgctcctagtcagatcgaagtaaaagatgttacagacacaactgctctgattacatggttcaagccactggccgaaatcgacggcatcgagctcacatatggaataaaggatgtgcccggcgatcggaccacaatcgaccttacggaagacgagaaccaatactccattggaaacctaaagccagacacagaatacgaggtgtcgctgatctcaaggcggggagatatgtcaagcaatccagctaaggagaccttcacaactggccttgatgctcctagaaacctcagaagggtgtcacagacagacaactccattaccctagagtggcggaacgggaaagctgccatagacagttatcgaatcaaatacgccccaatctcaggtggtgaccacgccgaagtcgatgtgccaaaatcccaacaggcgacgactaagactacactaaccggactgcgccctggcactgagtacggcattggcgtgagtgccgttaaagaagacaaagagtctaatccagcaacaatcaacgcggccacagagttagacaccccaaaagacttacaggtgagtgagacagctgaaacttctttaaccttactatggaaaacccctctcgcaaaattcgataggtaccggctgaattactctctgcccacaggacaatgggtgggcgttcagctacctcgcaataccacaagttacgttctaagggggctggaaccaggccaggagtataatgtcctgctcacagcagagaaaggccgtcataaatctaagccagccagggtgaaggctagcaccgcaatgggaagtcctaaagaagtgatcttctccgatatcaccgagaacagtgctactgtcagctggcgcgcccccaccgcacaggtcgaaagctttagaattacatacgtccccattactggcggaactcccagcatggttacagtggacggcaccaagacccagactcgcttggtaaagctcattccgggtgtcgaatacctagtgtcaataatcgccatgaagggttttgaagaatccgaacccgtgtcaggctcctttacgactgccctggacggacccagtggcctggtgacagcaaatattaccgactccgaagctctggcaaggtggcagccagccatcgcaactgtggattcctacgtgattagctacaccggcgaaaaagtccccgaaatcacacgaacagttagcggtaataccgttgagtatgcattgacagaccttgagccagctactgagtatacattgaggatctttgccgaaaaggggcctcagaaatcatctacgataacggcgaaatttactaccgatctggactccccacgagacctgacagcaacagaagttcagtccgagaccgcactgctgacttggagacctcctcgagcatccgtgacaggatacctgcttgtttatgagtccgtggatggcaccgtcaaggaggtaatagtcggtcccgataccacttcatacagcctagccgatttaagtccgtcaacccactatacagcaaagatacaggcactcaatggcccgctaagatccaacatgatacaaacaatttttaccacaattggtttgttataccccttccctaaagactgcagccaggccatgttgaacggagatactacatctggattgtacacgatttacttgaatggggataaggctgaagccctggaggtgttctgcgatatgactagtgatggcggaggttggattgtgttcctccgaaggaagaacggccgcgagaatttttaccaaaattggaaagcttatgccgctgggttcggagacaggagagaggagttctggctaggactagataacttgaataagataacagctcaaggacaatacgaattgcgggtggacctgcgggatcatggagagacagcctttgctgtttacgacaaattttccgttggggacgctaagacaagatacaaactgaaggtggaggggtatagcggaactgcaggggattctatggcctatcataatggccgatcgttctcaacctttgataaggatacagacagcgccatcactaactgtgctctgagctacaagggcgcattttggtaccgcaactgtcaccgagtcaacctgatgggccggtacggcgataacaatcattcacaaggcgtaaactggtttcattggaagggacatgaacacagtatacagtttgccgagatgaaactacgacctagcaacttccgtaacctcgagggacgtcgaaaacgcgcgtag

SEQ ID NO: 249150 - RNA, 4968 nt, synthetic construct
  misc_feature 1..4968: note = Description of Artificial Sequence: Synthetic coding sequence
  source 1..4968: mol_type = other RNA
atgggagccatgacccagctgcttgccggcgtgttcctcgccttcttagctctggcaaccgaggggggggtgctcaaaaaagtcattagacataagagacagtccggagtgaacgctacccttcctgaagaaaaccagcctgtagtcttcaaccacgtctataacataaaactgcctgtaggctctcaatgctctgtagacctcgagagcgcatctggggagaaggacctggcaccaccaagcgaaccttctgagtccttccaggaacacaccgtagacggggaaaaccagatcgtattcacacaccgaatcaacatcccacggcgagcttgtgggtgcgctgccgctccagatgtgaaagaacttcttagccgactggaagaattggaaaacctcgtttcatcccttagggagcaatgcaccgcgggagccggctgctgcctgcaacccgcaactggcagactcgacactcgccccttttgctctggacgtgggaatttctctaccgagggctgcggctgcgtttgtgaacccggttggaaaggccctaattgctccgaacccgagtgtcccggcaattgccatctgaggggcaggtgtatagacggtcagtgtatatgtgacgacgggttcacaggggaggactgctctcagttagcgtgtccatctgactgtaatgatcaaggaaagtgcgtgaacggcgtctgcatctgttttgagggttatgccggagccgactgctcgagagagatatgtcctgtgccctgcagcgaagaacatgggacctgcgttgacggcctgtgtgtttgtcacgatgggttcgccggagatgactgcaacaaacccttatgtttgaataactgttacaatagaggacgttgcgtcgagaacgagtgtgtgtgtgatgaaggatttacaggggaagattgctctgaactgatttgtcccaacgattgttttgataggggtcgatgcatcaatggtacctgttactgtgaggagggcttcactggagaagattgcggaaaaccaacctgccctcatgcatgtcatacgcaaggccggtgtgaagagggccaatgcgtctgtgacgagggatttgccggcgtcgattgctctgaaaagaggtgtccggccgattgccacaatagagggaggtgcgtggatgggaggtgtgagtgtgacgacgggttcactggggctgactgcggcgaacttaaatgccctaatggatgtagcggacacggaagatgcgtgaatggacaatgcgtttgcgacgaaggttacacaggcgaggattgttctcaactcaggtgccccaatgactgccatagcagagggaggtgcgtggaaggcaagtgtgtttgcgaacagggatttaagggctatgattgtagcgatatgtcatgccctaatgactgtcatcagcatggacgatgcgtgaacggaatgtgcgtatgcgacgatggttacactggtgaggattgccgtgaccgccaatgtccacgagactgcagtaatcggggcctgtgtgtagatggccagtgtgtctgcgaagacggttttacagggccagactgtgctgagctgagttgtcccaacgattgtcacggacagggtaggtgcgtaaacggtcaatgcgtgtgccatgaaggatttatgggcaaagattgtaaggaacagagatgtcctagtgattgccacggccaaggaagatgcgttgatggccagtgtatctgtcacgagggatttacagggttggattgcggacagcacagctgtcccagcgattgtaacaacctgggacaatgtgtaagtgggcgctgcatttgtaatgaagggtacagtggtgaagattgttccgaagtgagccctccaaaggaccttgtcgttaccgaagtcaccgaagaaactgtgaatctggcttgggacaatgaaatgcgagtgactgagtatcttgtcgtgtatactcctacccacgaaggtggactggaaatgcagttcagagtacctggtgatcagacttcgaccattatccaagagcttgagcccggggtagaatatttcatccgcgtttttgcaatcctcgagaacaaaaaatcaatacccgtgagtgcacgcgtagccacctacctcccagcccctgagggcttaaagtttaaatcgataaaagaaacaagcgtagaagtggagtgggacccattggacatagcattcgagacctgggagatcatatttagaaacatgaataaagaggatgagggggaaattacaaagagcttacgacgccctgaaacaagctaccgacagaccgggttagctcccggtcaggagtacgagatctcattgcatatcgttaagaacaatacccgcggccccggactgaaacgagtcacgacgacccgcttggatgcaccttcacagatcgaagtgaaagacgtaacagacactacagccctgattacttggtttaaaccactggccgagatcgacggtatagagctcacgtacggcatcaaggacgtccccggggataggactaccatcgatctcactgaggacgagaaccagtactccatcggtaaccttaaacctgacacagaatacgaagtttcattgatcagccggagaggcgacatgtcttccaaccccgctaaagaaacatttaccaccggccttgacgcccccagaaatttaagacgagtaagccagacagataacagcatcaccttggaatggaggaacggcaaggctgctatcgatagttataggatcaagtatgctcccattagtggaggagaccatgcagaagtagatgtgccgaaaagtcagcaggcgactactaaaacgacactaaccgggctgagacctgggactgagtacggcattggagtcagcgccgtgaaggaagataaagagagcaaccctgccacgatcaacgctgccaccgagctggatacacccaaagacctacaggtgagtgagactgcagaaaccagtctgacattgctgtggaagactcctctcgccaaatttgacagatacaggttgaattatagtttgcccaccggacagtgggttggcgtgcaactccctagaaatactacatcatacgtcctcagagggctggaacctggtcaggaatacaatgttctgctcactgctgaaaagggccggcataagtccaaacccgctagagtgaaggcttctacagaagctgagcccgaagttgataacctcctcgtgtctgacgccaccccggatggctttcgcctgtcatggaccgcagatgaaggcgtctttgataatttcgttctgaagattcgtgatactaagaagcaatcagaacctctggagatcaccctcttagcacccgaacggacccgagacattactggccttagggaggcaactgagtatgaaatagagctatacgggatatctaaaggtcgacggtcacagacggtctccgccatcgctacgactgcaatgggtagccccaaggaggttatcttcagtgacatcacagaaaattcagctacggtgtcctggcgggcccccactgcccaagttgagtcattccgcataacctacgtccccattacagggggcacaccgagtatggtcactgttgacggcactaaaacccagacccgcctcgtgaaattaatccctggcgtggagtacctggtttccatcatagcaatgaaagggtttgaagaaagcgaacctgtgagtgggtctttcacaactgctctggatgggccatccggactggtcactgctaacattacagattccgaagccctggctaggtggcagccagccattgcgaccgtggatagctacgttatcagttatactggggaaaaggtcccagagatcacaaggacagttagtgggaataccgtcgaatacgcactgaccgacctcgagcccgcaaccgaatacaccctgagaatcttcgctgaaaaaggccctcagaaatcgtccacaataactgctaaatttactactgatctggattctccacgcgacctgactgccaccgaagttcaaagtgaaacggccctactgacctggagacccccaagggcaagcgttacaggatacctcctggtgtacgaatccgtcgatggcactgtgaaggaggtgatcgtggggcccgacaccacatcttactctctcgcagatctatctccaagcactcactacacagctaagatacaggcgttaaacggaccactccgtagcaacatgatacagacaatcttcacgaccatcggactcctgtaccccttccccaaggattgctcccaggccatgctgaatggcgatacgaccagtgggctttataccatttacttgaacggcgataaagcagaggctctcgaagtattttgcgacatgaccagtgacggaggcggctggattgtctttttacggaggaaaaatggaagagagaatttctatcagaattggaaagcttacgccgcaggttttggcgatcgacgcgaagagttttggctggggttggacaatctgaataaaataactgcccaaggacagtacgaacttcgggtggacctgcgagaccacggtgaaacagcatttgcggtgtatgacaaattttcagtaggggacgctaagactaggtacaagctcaaagttgagggatattcagggacagccggtgactcaatggcttaccataatggaaggtccttttcaacatttgacaaagatactgatagtgcgattaccaattgtgcactctcatacaagggcgccttttggtacagaaactgccatcgtgttaatctgatgggacgttatggtgacaacaatcacagccaaggtgtcaattggtttcactggaaaggtcatgagcacagtattcaattcgctgaaatgaagttgagaccctcaaacttccgcaacttagaaggccgccgtaagcgcgcttag

SEQ ID NO: 249151 - RNA, 6606 nt, synthetic construct
  misc_feature 1..6606: note = Description of Artificial Sequence: Synthetic coding sequence
  source 1..6606: mol_type = other RNA
atgggcgccatgacccagctgctggcaggcgtatttttggccttcctggctctcgctactgaaggcggggtcctcaaaaaagttattagacataaaagacaatccggagtcaatgcaaccctcccagaggaaaatcagcctgtcgtgtttaatcacgtgtacaatattaaattgcccgtgggaagtcaatgctctgtcgatttggagtcggcctccggcgagaaagatctcgctcccccttccgagccgagcgaatcctttcaagaacacaccgtcgacggcgagaatcagattgtattcacacaccgcatcaacattccacgtagagcctgcggttgtgccgccgcgccagatgttaaagagctccttagtcgattggaagaattagaaaatttggtctcctcactgcgcgagcaatgtactgccggagccggatgctgcttgcaacctgccacagggaggttagacaccaggcccttttgctctggacgaggaaatttcagcaccgagggctgtggatgcgtctgtgaacccggatggaaaggcccgaactgtagcgagcccgaatgccctggtaattgccatctgagaggtcgatgtatcgatgggcagtgcatctgcgacgacggcttcacgggggaggattgttcacaattagcatgtccatctgactgtaacgaccagggaaaatgtgtgaatggagtgtgcatttgctttgaaggctacgccggcgctgactgtagcagggagatatgcccggtgccttgcagtgaagaacatggaacttgcgttgatgggctttgcgtctgtcacgatggttttgctggcgatgactgtaataagcccctgtgtttgaacaattgttataatagagggcgatgtgttgaaaatgagtgtgtttgcgatgagggattcaccggggaggattgctctgaactcatctgtcctaacgactgcttcgacagaggacgatgcatcaacggaacatgttactgcgaggaagggttcactggggaggattgcggaaaaccaacctgcccacatgcctgtcatacccagggcagatgcgaagaaggacagtgcgtgtgtgacgagggctttgccggagtggattgtagtgaaaagaggtgcccagctgattgtcacaaccgaggtaggtgcgtagatggccgatgcgaatgtgatgatggtttcactggagcagattgtggagagctaaaatgccctaatggatgcagtggacacggcagatgcgtaaatgggcagtgtgtgtgtgatgagggctacacaggggaagactgtagccaactgagatgccctaatgattgtcattcgcggggacggtgcgttgaggggaaatgcgtttgcgagcagggtttcaaagggtatgactgtagcgacatgagctgtccaaacgattgccatcaacatggacgctgcgttaatggcatgtgtgtgtgcgacgacggctataccggggaagactgtcgagatcgccagtgtcccagagactgctctaacagaggactgtgtgttgatggccagtgcgtgtgcgaggacgggtttacaggcccagattgtgccgaactgagttgccccaatgattgccatgggcagggccgatgtgtgaacgggcagtgtgtgtgtcacgagggttttatggggaaggactgtaaagagcaaagatgcccatcagactgccatggacaggggagatgcgtagatggacagtgtatttgccacgaaggctttactggtcttgactgtggacagcactcttgtccttctgactgtaacaacttaggtcagtgcgtatctgggagatgtatctgcaacgaaggttatagcggggaggattgttccgaggtctcacctcctaaggatctcgttgtgaccgaagtgacggaggagacagtgaatttggcatgggacaacgaaatgcgagtgacggaataccttgtagtatacacaccaacacatgaaggcggcctcgaaatgcaatttcgcgtgccaggggaccagactagcaccattatccaggagttagaacccggcgtcgagtatttcataagagtatttgcgattcttgaaaacaagaagagcattcctgtgagcgctagagtggccacctatttacctgctcccgaaggacttaaatttaaaagcatcaaagagacatctgtcgaagtggagtgggatcccctggacatcgcattcgagacctgggagattatctttcgcaatatgaataaggaagacgaaggggagataacaaagtccctgcgtagacccgaaacctcttatagacaaactggtcttgcgccaggacaggagtacgagatctctttacatattgttaaaaacaacacacgcgggcccgggctgaagagagtgacaactacacgactcgacgcgcctagccagattgaggttaaagatgtgaccgatactacagccctcatcacctggttcaagccactcgcagagattgacgggatcgaactgacttacggcattaaagacgtgcctggcgaccgcacaactattgacctgactgaggacgagaaccaatatagcattggcaatctcaaacctgataccgagtacgaggtgagcctgattagccggcgaggagatatgtcatcaaatcccgcaaaggagacctttaccacaggactcgacgccccacgcaaccttaggcgagtgtcccagaccgataactccatcactcttgagtggcggaatggcaaagccgcaatcgatagctacaggatcaaatatgcccccatctctggaggcgatcacgcagaggttgatgttccaaagtcacagcaggccacaacgaagacaacacttacgggacttagaccgggcacagaatatggaataggagtttctgccgtgaaagaagataaagagtccaacccagcaactattaatgcagcgaccgaactcgacacaccaaaggatctacaggtgtctgaaaccgcagagacgagtctcactctgttatggaaaactcctttggccaagttcgataggtatcggctgaactatagtctaccaactggacaatgggtcggagttcagctcccgcggaacaccacttcatacgttctaaggggtctcgagccaggtcaagaatataacgtgctcctgacagctgagaaaggtagacataagtccaagcccgcacgcgtgaaagcttccacggaacaggcaccagaattagagaatttaaccgttacagaagttgggtgggatggcttaagactgaactggaccgctgccgaccaggcctatgaacacttcatcattcaagttcaggaggctaataaggtcgaagctgcacgcaacctcactgtgcccgggtcactgagggctgtcgatattccgggattaaaagctgctaccccctacaccgtttcaatctatggcgttatacagggttacaggactccagtgttgagtgcagaagctagtacaggggagactcctaatttaggggaagtggtcgtggctgaagtgggctgggacgcactgaagcttaattggacagcacccgagggggcgtacgagtatttttttatccaggttcaagaagctgacacagtggaagctgcgcaaaatttgaccgtgccaggcggactccgttctactgacttaccgggactgaaggctgccacacactacacaattaccattaggggcgtgacacaggacttctctactacacctctcagtgtggaagtgttgacagaagaagtcccagacatgggtaatttgaccgttaccgaggtgagctgggatgccctgagattaaactggactaccccggacggaacctacgatcaatttacaatccaagtgcaggaggcggatcaggttgaagaagcacacaatctaaccgttcccggctcccttagaagtatggagatcccaggcctgcgcgcgggtacaccctacaccgtaacactgcacggggaagtacgtggccattccacaagaccgctggccgttgaagtcgtgacagaggatcttcctcaattgggtgacctcgccgtgtccgaagtgggatgggacggtctgaggctcaactggacagcagccgataacgcttacgagcattttgtgatccaagtacaggaagtgaacaaggtcgaggctgcccagaacttgacacttcccgggtcacttcgtgccgtcgacatccctgggttggaagccgccactccttatagagtgtctatttacggtgttataaggggttatagaacaccggtcctgagcgcagaagcgagcacagccaaggaaccagagattggaaatttaaacgtgagtgacattaccccagagtcttttaatttaagctggatggccacagatggcatatttgagactttcacaatcgagatcattgattcaaatagacttcttgagacggtggagtataacatcagcggcgctgaacgtaccgcacacatatctgggctgcccccaagtacagatttcatcgtctatctttccggcctcgctcccagcattcggaccaagaccatatcagctactgctaccacggaggctctgccattgcttgagaacctaacaattagcgacataaatccttacggattcacggtatcctggatggctagtgagaacgcattcgactcgtttttagtgactgtcgtcgactctggaaagctgcttgatcctcaagaatttactctatccggaacccaacgtaagctcgagctccgaggtctcatcaccggcattggatacgaagtaatggttagcggatttactcagggccatcagacaaaaccattaagagccgagattgtgaccgaggccgaacctgaagtggacaacctgctggtgtctgacgccacccccgacggattcaggctgagctggactgctgacgagggagtcttcgataatttcgtgcttaagatccgcgacaccaagaagcaaagcgagcccttggagatcacgctcctggcaccagaaaggactcgagacatcacaggattacgggaagcaactgaatatgaaatcgaactctacgggatctcgaaaggacgaagatcacagacagtaagtgcaattgctacgacagcaatgggaagccctaaggaggttatcttctccgacattacagagaattccgctaccgtgagctggcgtgctcctaccgctcaagtagaaagttttcgcatcacatacgtcccaattaccggaggtactccctcaatggtaacggtcgacggcacaaagacccagacccgcctggtaaaattgatccccggagtagagtaccttgtgagtattatagccatgaaaggattcgaagagagcgaacctgtttcaggaagcttcacaaccgccctcgacggtcccagcgggctcgtaacagccaacattacagatagtgaagctcttgctcgatggcagccggcaattgctacagtggatagttacgttatcagctataccggagagaaggtacctgagattacacgtacagtaagcggcaatacagtagaatatgcactaacagatctggaacctgccacagaatacactctcaggattttcgccgaaaaaggtccccaaaaatcatctactataactgcaaaatttactacggacctcgactcacctagagacctgacagccacggaggtccagagtgaaaccgcgctgctgacttggaggccccctcgcgcctcagttactggatatttactcgtgtacgagtccgtggatggaaccgtcaaggaagtcattgtgggcccagatacaacatcttactctctcgctgatttatcgccaagcacccactacaccgccaagattcaagcgcttaatggccctctaaggtccaatatgatccagaccatcttcacaactatcgggcttctgtacccgtttcccaaagactgcagtcaagccatgctcaatggcgacacaacttccggcctatataccatctacttgaacggtgacaaagcagaggctctcgaggtgttttgtgacatgaccagcgatggggggggatggatagtctttctaaggaggaaaaatggcagggagaatttctaccagaattggaaggcatatgcggctgggtttggtgacagacgggaggaattctggcttgggcttgacaatttgaacaaaatcaccgcccagggacagtacgaactgagggtggacctgagggatcatggtgagaccgcatttgctgtttatgataagtttagtgtgggagatgcaaagacccggtataaattgaaggttgagggctatagcggaactgctggggattccatggcctatcataatgggagatctttcagcacatttgataaagacaccgacagcgctattaccaactgtgcgctgagctacaagggcgctttttggtaccgcaattgccaccgcgtgaacctcatgggcaggtacggcgacaataatcactctcagggcgtgaactggtttcactggaagggtcatgaacatagcattcagttcgcggagatgaaactgagacctagcaatttcaggaacctggagggacgacggaagagagcttag

SEQ ID NO: 249152 - RNA, 3240 nt, synthetic construct
  misc_feature 1..3240: note = Description of Artificial Sequence: Synthetic coding sequence
  source 1..3240: mol_type = other RNA
atgggtgccatgacacagctacttgccggtgtattcctagcttttttggccctggcaacagaagggggcgttctcaagaaggttattagacacaaaagacagagtggcgtgaatgctacgctacccgaagaaaaccaaccagtcgtgttcaaccacgtttataacatcaagcttcccgttggcagtcagtgctccgtagatcttgaaagtgccagtggtgagaaagacttggctccaccaagtgaacctagcgagtcattccaagagcatacggttgatggtgagaatcaaattgtgttcacacatagaatcaatattccgcgccgcgcttgcgggtgcgccgccgccccagatgttaaggaactgctgtctcgtctcgaggaactggagaatctggtatcaagtctccgcgaacagtgtacagctggcgccgggtgctgcctgcagcccgcaacagggcgcctggacacgcgacccttttgcagcggaagagggaatttttcgacggaaggctgtggatgcgtatgcgaaccaggctggaaaggacccaattgctcagagccagaatgcccaggcaactgtcacctaagaggaaggtgcatagatggccagtgcatttgcgacgatggattcaccggcgaagactgttctcagctggcctgcccatctgattgtaatgatcagggtaaatgtgtcaacggtgtctgcatttgttttgaagggtacgctggggctgactgctcaagggaaatttgtcctgtgccatgttcagaagaacacgggacttgcgtggatgggttatgcgtgtgtcatgatggtttcgcaggggatgattgcaacaaaccactgtgcctgaataattgttataatagaggcagatgtgtggaaaacgagtgtgtatgtgatgagggatttactggggaagactgctctgagctgatctgtccaaacgactgttttgatcgcggacggtgtatcaatggtacatgttactgtgaggaaggctttacaggggaagactgcggtaaaccaacatgcccccatgcttgtcacacccaaggacgttgtgaagaagggcagtgtgtttgtgacgaaggattcgctggcgtggattgctctgaaaaaaggtgccctgctgattgccataaccgcggaagatgtgtcgacggtaggtgtgaatgcgacgacggatttactggagcagattgcggtgaattgaaatgtccaaacggttgcagtgggcatgggagatgtgtgaatggacagtgcgtgtgtgacgaaggttatacgggggaagattgctcacagctaaggtgtcctaatgattgccattctaggggccgatgcgtcgagggtaagtgtgtgtgcgagcagggcttcaagggctacgactgctcagacatgtcatgtcccaatgattgccaccagcacggtcgttgcgtgaatggaatgtgtgtgtgtgatgatggctacaccggggaagactgccgcgaccgtcagtgtccgcgtgattgttcaaaccgcggtttatgtgttgatgggcagtgcgtgtgtgaggacggctttacgggccccgactgcgcggagctgtcatgccccaatgactgccacggccaggggaggtgtgttaacggtcagtgtgtgtgtcacgagggatttatgggaaaggactgtaaggagcagagatgcccatccgattgccacggccaggggagatgcgtggatggacagtgcatttgtcacgaaggattcaccggtttggattgcggccaacatagttgcccctctgactgcaataacctgggacagtgtgttagcgggcgatgtatttgtaatgagggatactctggtgaggactgcagcgaggttagtccacctaaagaccttgtggtgactgaagtgacagaagaaactgtgaatctggcatgggataatgagatgagggtgactgagtacttggtggtctatactccgacacatgagggtggtctcgaaatgcaattccgagttccgggtgatcaaaccagtactattatccaggagttggagccaggtgtggaatactttatcagagtttttgccatcctggaaaacaagaaatccattccagtcagtgctcgcgtcgccacttacctgcctgcacctgagggattaaagttcaaatctatcaaagagacatccgtcgaggtagaatgggatccgcttgacatagctttcgaaacctgggaaatcatcttcagaaacatgaacaaagaggacgaaggagagatcacaaagtcactgagacgccccgaaacgtcatatcgacagactgggcttgcaccagggcaggagtacgaaattagcctgcatattgttaagaacaacacccgtggccctgggctgaaaagagttacaaccacgagactggatgctccctcccagattgaagtgaaggatgtaactgatacaaccgcactcatcacctggtttaagccactcgctgagattgatggcatagaacttacatacggcattaaggacgtacccggcgacagaactacgattgatctgactgaagacgaaaaccagtactctatcggaaaccttaagcctgacaccgaatacgaagtctccctaatctctagaagaggtgacatgtcctcgaaccctgcaaaggaaacctttaccactggactagacgcacctcggaatctgcgccgggtctcacaaaccgacaatagcatcacattggagtggaggaatggaaaagccgccatagatagctaccgcattaaatacgcacctatctcaggcggagatcatgctgaagttgatgtcccaaagtcgcagcaggctacaactaaaacaattactgctaaattcaccaccgatcttgacagtccacgggacttgaccgcgaccgaggtccagagcgaaaccgcccttctcacgtggcgcccccctcgagcatcggttaccgggtacctattggtctatgaaagtgtagacggaaccgtcaaagaagtgatagtgggccccgataccacgagctactcccttgctgacctgagccccccctctctcttccttcactttattcaacagaagccagagaagcagtattgtttccattttaaggatatgatcaatataattaacattattatgatgatgatgatgatgaaaactaaggatttctctcgcgacctgtctttccaaaacatctccggccagtacctgatcgtcttttttttctag

SEQ ID NO: 249153 - RNA, 279 nt, synthetic construct; identical to SEQ ID NO: 248547
  misc_feature 1..279: note = Description of Artificial Sequence: Synthetic coding sequence
  source 1..279: mol_type = other RNA

SEQ ID NO: 249154 - RNA, 5241 nt, synthetic construct
  misc_feature 1..5241: note = Description of Artificial Sequence: Synthetic coding sequence
  source 1..5241: mol_type = other RNA
atgggcgctatgacgcagttgttggccggtgtatttttagcattcctagccctggccaccgagggcggcgtcttaaaaaaggtaataaggcataagcgacaatcaggggttaatgcaactctccctgaggagaatcagccagtcgtgttcaaccatgtttataatatcaaattgcctgtagggtctcagtgcagcgtggacctggagtccgcatcaggggagaaagatctcgccccaccatccgagccttccgaaagcttccaggagcatacagtggacggggaaaatcaaatagtttttacacatcggattaacataccacgacgagcctgtggttgtgcggctgctccagatgtgaaggaattgttgagtcgtctggaggagctcgaaaatttagtgtccagcttaagagaacaatgcaccgctggtgcgggctgctgccttcaacctgcaacagggcgcctcgatacccgtcccttttgttcaggcaggggcaactttagtacagaggggtgcggttgtgtatgcgaacctggatggaagggccccaattgctccgaacccgagtgtccagggaactgccacctccgcggaaggtgtatagatggacagtgtatttgcgacgacggctttacgggcgaagactgttcccaattagcctgcccttccgactgtaatgatcaggggaaatgtgtcaacggagtatgtatctgcttcgaagggtacgctggtgcagattgttcccgagaaatatgccctgtaccttgttcagaggaacatgggacctgtgtggatggcttatgtgtttgccatgacgggttcgcgggcgacgattgcaacaagcccctatgcttaaataactgctacaatcggggtcggtgtgtggaaaacgagtgtgtgtgcgacgaaggttttacaggcgaggattgtagtgaactcatctgtcctaacgattgtttcgatagagggaggtgtattaatggcacttgctattgtgaggaggggtttacaggcgaggattgcggaaagcctacatgccctcatgcttgtcatacccagggccggtgtgaagagggccagtgcgtgtgtgacgaagggtttgctggagtggattgttcagagaagcgatgtcctgcagattgtcataatagagggaggtgcgtagatggaagatgcgagtgcgatgacggatttacaggggcggattgcggagagttaaagtgcccaaatggatgcagcggccatggaaggtgcgttaatggccaatgtgtgtgtgacgaaggctacaccggggaagattgctcccagctgagatgtccaaacgactgtcactcccgaggccggtgcgtagagggaaagtgtgtgtgcgaacagggctttaaaggttacgactgcagcgatatgagttgccctaacgattgtcatcaacacggtaggtgtgttaacgggatgtgcgtgtgtgatgacggatacaccggggaagattgcagagataggcaatgccccagggattgttccaatagaggcctgtgcgtggacggccaatgtgtttgcgaggacggttttacaggtcccgactgcgctgaactgagttgtcccaacgactgtcacggacagggcagatgtgtgaacggccaatgcgtgtgtcatgagggatttatgggaaaagactgtaaagaacagagatgtcctagcgattgccatgggcaggggcgttgcgtagacggacaatgcatctgtcatgaaggttttaccggcctggactgcggacaacattcatgcccttctgattgtaataacctgggtcaatgcgtgagtggaaggtgtatttgcaatgaaggttattcaggagaggattgttctgaagtgagtccacccaaggacctggtcgtaactgaggtgacggaggagacagtcaatttagcgtgggataatgagatgcgagtgacagaatatctggttgtgtataccccgacccacgaaggcggccttgagatgcagtttcgagtcccaggtgatcaaacttctactataattcaggaactggaacccggcgtcgaatacttcattagagtcttcgctattttagaaaacaagaagtcaatcccagtctcagccagggtcgcgacatatctgcccgctcctgaagggctcaaatttaaatcaattaaggagactagtgtagaagtagagtgggatcctctggatattgcattcgaaacttgggagataatttttaggaacatgaacaaggaggacgagggagagattacaaaaagtttacggcgaccagagacaagttacagacaaacagggcttgcgcccggtcaggagtacgagatcagcctccacattgtgaaaaacaataccaggggcccaggactaaagagggtgacaaccaccaggctcgatgcaccctctcagatcgaagttaaagatgtgactgacaccactgctctgattacttggttcaagcctctcgctgagatagacggaattgaattgacctacgggattaaagacgtcccaggtgacaggaccactatcgatttaaccgaagatgaaaaccagtactccatcggcaacctgaaacctgacaccgagtacgaagtgagtctcatctcaagacggggagacatgtcctccaatcctgcgaaagagacatttaccaccggcctagatgctcctagaaatctacggagggtatctcagactgacaattctatcacactcgagtggaggaacggcaaggcggcgatcgatagttaccggatcaaatatgctccaatttctggaggagaccacgctgaagtggatgtaccaaagtcccaacaggccaccaccaaaacaactctgacaggtttacggccgggtacagaatacggtatcggagtgagtgcagtaaaagaagataaagaaagcaaccccgctacaatcaatgcagcgacagaactggatacccctaaggacctgcaggtctctgaaaccgcagaaacaagcttgacactgctgtggaaaacccctctggccaagtttgatcgctaccgcctgaactactccctccctactgggcagtgggtgggtgtgcaactccctagaaataccaccagttacgtcctcagaggtctggaaccgggacaggaatataatgtgctgcttactgcagagaaaggcagacataaaagtaaacctgcaagagttaaagcctccacagctaaagaaccagaaattggtaatcttaacgtttctgacatcaccccagaaagtttcaaccttagctggatggctaccgatgggatcttcgaaacattcaccatcgagatcatcgattccaatagacttctagagactgtcgaatacaacatctccggagcagagcgaactgcccacatctctggcctcccaccaagcaccgatttcatagtgtacctctcagggttggcaccttccatccgcaccaaaactatctccgcgaccgcaaccactgaagccgaacccgaggtggataacctcctggtgagcgatgcaacgccggacggatttagactgagctggacagccgatgaaggagttttcgacaatttcgtgctaaagattcgcgacacaaaaaagcagagcgagccactcgaaatcactcttctggctccagaacgcactagagatattacaggactccgggaggccacagagtatgagatcgaactatacggaatttcaaagggtcgaaggtcacagactgttagtgctatcgcaactacagcaatggggtcgcctaaggaggttatcttttctgatatcactgagaattccgccactgtgtcatggagagcccccacagcgcaggttgaatcatttaggattacttacgtgcctataaccggtggtaccccctctatggtgaccgttgatgggacaaagactcaaacccgactcgtgaaactgatccctggagtagagtatttggtgtccataatcgccatgaaaggttttgaggaaagtgagccagtctccgggtctttcactaccgctctggatggcccttccggcctggtgacagcaaatatcaccgatagcgaggcactggcaagatggcaaccagcgattgccacagttgactcttacgtgatctcttacactggagagaaagtaccagagattacacggaccgtgtcaggaaacacagtggaatatgcactaactgacctcgaaccagccacagaatacaccctgcgcatattcgccgaaaagggacctcagaaatcgagtacgataacagctaagtttactacagatttggattctcctcgagatcttactgccacagaggttcagtcagagacagctctcctgacctggagaccacctagagctagcgttactggttacctgttagtgtatgagtccgtagacggcaccgtgaaagaagtaatcgttggacccgatacaacctcttactccttggccgatttgtcaccctcgacacattatacagctaaaatacaggctttgaatggaccgctaagatctaatatgatacagaccatattcactactattggcttactgtacccatttcctaaagattgctctcaggccatgctgaacggcgataccacctccggcttgtatacaatttacttgaacggcgataaagcagaagctctcgaagtgttctgcgatatgacctccgatggtggcgggtggatagttttcctgcgtcggaaaaatggtcgtgagaacttttatcagaactggaaagcatatgcagcaggatttggggaccgaagggaggaattttggctgggactggataatctcaataaaattaccgcccagggacaatacgagctgagagtcgatctgcgcgaccatggagagaccgccttcgccgtgtacgacaaattttctgtaggcgacgccaaaacccgatacaagctcaaagtggaaggctactccggaactgctggtgacagtatggcctaccacaatggaagatctttcagtactttcgacaaagatacggattctgcaatcacaaactgcgcactctcgtataaaggggccttttggtacaggaactgccacagagtaaacctgatggggagatatggagataacaaccacagtcagggcgtaaactggtttcactggaaaggtcacgagcattccatacagtttgctgaaatgaaactgaggcccagtaattttaggaacctagaggggaggagaaagagagcctag

SEQ ID NO: 249155 - RNA, 5517 nt, synthetic construct
  misc_feature 1..5517: note = Description of Artificial Sequence: Synthetic coding sequence
  source 1..5517: mol_type = other RNA
atgggagccatgactcaactgctggcgggggtgttcctagcttttttagctttagcaaccgaggggggagtactaaaaaaagtcattcgccataagagacagagcggagtcaacgctacacttcccgaggagaaccagcccgttgtgttcaatcatgtgtacaacattaagttgcccgttggaagccagtgttcagtagacctggaaagcgcctctggagagaaagatctggcccctcccagcgagccgagcgaatcattccaagagcataccgtggatggcgagaaccagatcgtcttcactcaccgtataaacattccaaggagagcctgtgggtgcgccgccgctcccgatgtgaaagaattactttcccgcctggaggagctggaaaatttagtgagcagcctgcgagagcaatgtacggcaggggctgggtgctgcctacaacctgcaacgggccggctagatactagacccttttgtagcggacggggcaactttagcacagaaggctgtgggtgtgtctgcgagccagggtggaaggggccaaactgcagcgagcctgagtgtcccggaaactgccatctccgcggacgatgcattgacggccagtgcatttgcgacgacggattcaccggggaagattgtagccagttggcgtgtccatccgattgtaatgaccaggggaagtgtgttaacggcgtctgtatttgttttgagggatatgctggggccgattgctccagagagatctgtccagtaccatgctccgaagaacatggaacctgtgtcgatgggctatgcgtctgccacgatggttttgctggagatgattgcaataagccactctgcttgaataattgttacaataggggaaggtgcgtggaaaatgaatgcgtctgtgacgagggctttactggtgaggactgctccgaactgatctgtccaaatgactgttttgaccgcggacggtgcatcaatggtacatgttactgcgaagaaggatttaccggcgaggattgtggaaaacctacatgcccacacgcttgccatactcagggaagatgtgaggagggtcagtgcgtctgtgatgaaggatttgcaggagtcgattgttccgagaaaaggtgtcccgcagattgtcataaccgagggagatgcgttgacgggagatgcgagtgtgatgatggatttacaggtgcggattgtggcgagctaaaatgccccaatggctgtagtggacatggcagatgtgtgaatggtcaatgtgtgtgcgacgaaggatacaccggggaggactgttctcagctgcgatgcccaaatgactgtcactcgaggggtaggtgcgtcgaggggaaatgcgtgtgcgaacaaggatttaagggatacgattgttcagatatgtcctgccctaatgactgccaccaacatgggagatgtgttaatgggatgtgcgtgtgtgatgacggctatactggtgaggattgtcgagaccgccagtgccccagagattgctctaatagagggctgtgtgttgatgggcaatgcgtatgcgaagatggctttacaggacccgactgcgctgaactctcatgtcctaacgactgccacgggcagggaagatgtgtgaacggtcaatgtgtgtgccatgagggcttcatgggcaaggattgtaaagaacagagatgtccttcagattgccatggccagggccgatgcgtggatggccaatgtatctgtcatgaggggtttaccgggctcgattgcggccagcacagctgccccagcgactgtaataatctcggccagtgcgtctccggacggtgtatttgcaatgagggatattctggcgaagattgttctgaggttagccctcccaaagatctggtggtaaccgaggtaacagaagagaccgtcaacttagcctgggacaacgaaatgcgagtcactgaatatctagtagtatacacccctactcacgagggcggactcgagatgcaatttagggtgccgggggatcagacgtctaccataatccaggaactggaaccaggcgtcgagtatttcattagagtgtttgccatcctcgaaaacaaaaagtctatccctgtctcagcacgagtcgcaacctatttacccgcccccgagggattaaaatttaaatccataaaagaaactagcgtggaggtcgagtgggatccgctggacatcgcatttgagacatgggagattatcttccgaaatatgaacaaagaagacgaaggtgagatcacaaagagtctccgcaggcctgagacctcctaccggcaaactggcctcgcaccaggacaggagtatgaaatctctctgcacattgtcaagaacaacaccagaggacccgggctgaagagagtaaccactaccagactagatgcaccctctcagatcgaagtgaaggatgtgactgatactaccgccttaataacttggtttaagcccctggctgagattgatgggatagaattaacctatggcattaaagatgtgcccggtgacagaacaacaattgacttaaccgaagatgagaaccagtatagcattggtaacctgaaacctgacaccgaatatgaagtgagcctgatctcccgccgaggggacatgagtagcaacccagcaaaggagacttttactaccggcctcgacgcccctagaaacctcaggcgggtgtctcagacagacaattcgatcactctcgaatggcggaacggcaaggctgcaattgatagctatagaatcaagtatgcacctatctccggtggagatcatgcagaggtagacgtccccaaaagtcagcaagcaacgacgaagaccacgctcaccggcctcagacctggaaccgaatacggcattggcgtatcagctgttaaggaagataaagagagcaatcctgccactattaacgctgccaccgaattggatacccctaaggatttgcaggtaagtgaaacagcagaaacttcactcacactcctatggaagacgccactggccaagtttgatcgatatcgccttaactattcattacccaccgggcagtgggtcggtgttcaactccccagaaacactacttcatatgttctgagaggtctggagccaggacaagaatacaatgtacttctgacagccgagaaagggaggcataaatccaaacctgccagagtcaaagccagtactgccaaagagcccgagataggcaatctgaatgttagcgacataacaccggagtcattcaatctttcctggatggcaaccgatggaatcttcgaaacatttactatcgaaatcatagactccaatagattattagaaaccgttgaatacaatatcagtggggctgaacggactgcacacatttccggtttgccaccctccacagactttattgtatacctctctggactggctccaagtatccgtactaagacaatttcagctaccgccactaccgagcctaaacctcaactgggtactctaatcttcagcaatatcacgcccaaatcttttaatatgtcctggaccacacaggcaggcctctttgctaaaattgttatcaacgtgagcgacgcacattccttacatgagtctcagcagtttaccgtgagcggcgacgccaaacaggcacacatcaccgggctggtggagaatacaggctacgacgtgtctgtcgctggaacaactctcgctggggatcccactcgacccctgactgcctttgttatcaccgaagccgaacctgaagtggataaccttctcgtctctgacgctacccccgatggattccgcctaagttggacagccgacgaaggagtgttcgacaatttcgttctaaaaatccgcgatacaaaaaaacagtcagagccattggagattacgcttctggcacccgaacgcactcgagatattacaggactcagagaagcgacagaatacgaaatcgaattgtatggtatcagcaaaggccgcaggtctcaaacggtgtctgccatagcgaccacagcgatgggatctcctaaggaagtaatcttctctgacatcacagaaaattcagctacagtatcgtggcgtgctcccactgcacaggtggagtcatttcgaattacttatgtccctattacgggaggcactcccagtatggtgaccgttgacggaaccaagacccagaccagactcgtgaagctcattcctggcgtcgagtacctagtgtctattatcgcaatgaaaggtttcgaagagagcgaacccgtttccgggtccttcacaactgctttggatggaccatcaggcctcgtgaccgccaatattaccgactctgaagcattggcccgctggcagccagcgattgctaccgtcgatagctatgttatctcttacacaggcgaaaaggtccccgaaattacaagaaccgttagcggcaacaccgttgagtacgccctaacggatttagagcccgccactgaatatacacttcgtatttttgctgaaaagggcccgcagaaatcaagtacaataacagcaaaattcactacagaccttgactctccaagagatctcactgccacagaggtccaaagcgaaactgcattactcacatggagaccacctagagctagcgtgacaggatacctcttggtgtacgagtctgtcgacggcaccgttaaagaagttattgtggggcctgatacaacatcttattccctggcagatttgtctccaagtacacattataccgcaaaaattcaagctcttaacggcccactcagaagcaatatgattcagacaatttttaccacaataggccttctttatccttttcctaaagactgcagccaggcgatgctgaacggagatacaacgagcgggctctacactatctatttaaacggagacaaagccgaagccctcgaggtcttttgcgacatgacaagtgatggcggcggttggattgtgttcttgagaagaaaaaatggccgggagaatttctaccaaaactggaaagcctatgcagcggggtttggtgatcggcgggaagagttctggcttggactagataatttaaataagatcaccgctcaaggccaatatgaactccgtgtggatctccgggatcatggcgaaaccgcttttgcagtctacgataaattcagcgtcggagacgctaaaactagatataaacttaaggtagaggggtacagtggaaccgcgggggattctatggcatatcacaacggacgatcattttcaacgttcgacaaggatacagactcagcgattacaaactgcgctctatcttataaaggcgctttctggtatcgcaactgccatcgggttaatctgatgggacgctacggagataataaccattcacagggcgtaaattggttccattggaaaggacacgagcactcaatccaattcgcagaaatgaaattgaggccatcaaattttaggaacttagagggccggagaaaaagggcgtag

SEQ ID NO: 249156 - RNA, 720 nt, synthetic construct
  misc_feature 1..720: note = Description of Artificial Sequence: Synthetic coding sequence
  source 1..720: mol_type = other RNA
atggctaggggatgcctgtgctgcctaaagtacatgatgttcctattcaacctcattttctggctctgcggatgtggtttactgggcgtgggcatctggctatcagtgtctcaagggaactttgccactttctctccatcatttccatcattaagcgctgcaaacttagtcattgccataggaactatcgtcatggtgactggatttctgggctgtctcggtgctattaaggagaataaatgtcttcttctttcattcttcattgttctgttggtgatcctgctcgcagagttaatcttattgattcttttcttcgtgtacatggataaagtcaatgaaaatgctaaaaaggatcttaaagagggcctgctcctgtatcacactgaaaataatgtagggttgaaaaatgcatggaatattattcaggccgagatgcgctgttgtggggtgacagattatacagactggtatccagttttgggagagaataccgtgcccgatagatgctgtatggaaaactcgcagggatgcgggaggaacgctaccactcctctttggagaacaggctgttacgagaaagtaaaaatgtggtttgacgacaataaacatgttcttgggaccgttggaatgtgtatcctcattatgcaaatcctcggcatggccttctctatgactctgttccaacacatccatcgcactggcaaaaaatacgatgcttag

SEQ ID NO: 249157 - RNA, 720 nt, synthetic construct
  misc_feature 1..720: note = Description of Artificial Sequence: Synthetic coding sequence
  source 1..720: mol_type = other RNA
atgccgaaaagttgcgccgcccggcagtgctgcaaccgttatagttcaagaagaaaacagctgaccttccaccggtttcctttttccagacccgaactcctgaaagagtgggtgttgaatattggaagagggaacttcaaaccgaaacaacatacagtgatctgttcagagcatttccgacccgagtgtttctctgcctttggaaaccgaaagaaccttaaacacaacgcagtgcccacagtcttcgcattccaggaccctacacaacaggtacgcgaaaatacggacccagctagtgagcgcggaaacgcctcaagttcacagaaagagaaggtgctccctgaagcaggcgccggagaggatagccctggacgaaacatggataccgcactcgaggaactacagctcccaccaaatgcagaaggtcacgttaagcaggtctccccccgcagaccacaggcgaccgaggctgtcggcagaccaactgggccagccggccttaggcgaacccctaacaaacagccatcagaccatagctacgccctcctcgacttagattcgctgaaaaaaaagctttttcttactctcaaggagaatgaaaaacttagaaagcgactgcaggctcagcgactcgttatgagaagaatgtcttcccggttgcgtgcatgtaagggacaccagggactacaggctcgcctgggaccggaacagcaaagttag

SEQ ID NO: 249158 - RNA, 135 nt, synthetic construct; identical to SEQ ID NO: 248552
  misc_feature 1..135: note = Description of Artificial Sequence: Synthetic coding sequence
  source 1..135: mol_type = other RNA

SEQ ID NO: 249159 - RNA, 135 nt, synthetic construct; identical to SEQ ID NO: 248553
  misc_feature 1..135: note = Description of Artificial Sequence: Synthetic coding sequence
  source 1..135: mol_type = other RNA

SEQ ID NO: 249160 - RNA, 135 nt, synthetic construct; identical to SEQ ID NO: 248554
  misc_feature 1..135: note = Description of Artificial Sequence: Synthetic coding sequence
  source 1..135: mol_type = other RNA

SEQ ID NO: 249161 - RNA, 135 nt, synthetic construct; identical to SEQ ID NO: 248555
  misc_feature 1..135: note = Description of Artificial Sequence: Synthetic coding sequence
  source 1..135: mol_type = other RNA

SEQ ID NO: 249162 - RNA, 3042 nt, synthetic construct
  misc_feature 1..3042: note = Description of Artificial Sequence: Synthetic coding sequence
  source 1..3042: mol_type = other RNA
atgggactcggcactctgtctccaagaatgctggtttggcttgtggctagtggcatcgttttttatggagagctctgggtttgcgccggacttgactacgattacacattcgatgggaacgaggaggacaagacagaaacgatcgattataaggatccctgtaaggcagccgtgttttggggcgacattgctctcgatgacgaggatttaaatatctttcaaatagatagaactattgatctgactcagaaccccttcggaaatctgggacatacaaccggaggcctgggtgatcatgcgatgagtaagaagaggggggctttataccaactaattgataggatccgcagaatcgggtttgggcttgagcagaacaacaccgtcaagggcaaagtgcctctgcagtttagcggacaaaacgaaaaaaaccgggttcctagagctgctacatccagaacagagcggatatggcccggtggagtgataccttacgtgattggggggaattttaccggaagccagcgtgcaatgtttaaacaagctatgcgtcactgggaaaaacatacgtgcgtgacattcatagaacggagtgacgaagaatcctacatcgtgtttacatatagaccatgcggatgttgtagttatgtcggtaggaggggaaatggcccgcaggcaataagcatcggaaaaaactgcgacaagttcggtatcgtcgtccacgagctgggacatgtcatcggattttggcacgagcacacaaggccagatcgagataatcacgtcacaatcatcagagaaaatatccagccaggacaagagtacaatttcttgaaaatggagcccggagaagtcaactccctgggcgagcgctatgactttgattccatcatgcactatgcgagaaataccttctcacggggcatgttcctagacaccattctgccgtccagagatgataatggaatccgtcccgccatcggacagcggacgaggttgtcaaaaggagacattgctcaagccagaaagctctaccgatgtccagcatgcggagaaacattgcaggaatcgaatggtaatctatctagccccggcttcccaaatgggtacccgagctacacgcattgtatatggcgcgtctctgtaaccccaggcgagaaaattgtgctgaatttcactaccatggacctctataaatccagcttgtgttggtatgattatattgaagtgcgagatggatattggagaaagagtccacttttgggacgtttttgtggggataagctgccagaggtcctgaccagcacagacagccgtatgtggattgaatttcggagcagttctaactgggtgggcaaaggtttcgccgctgtgtacgaggctatatgtggcggagaaattagaaagaacgaagggcagattcaaagtcccaactatcctgacgactataggcctatgaaagaatgcgtgtggaaaataactgtgtcagagagttaccacgtcggcctgactttccagtcctttgaaatagagcgccacgacaattgtgcttacgattacctggaagttcgagatggcaccagcgaaaacagcccgctcatcggacgcttttgcgggtatgacaagcccgaagacatccgatctacttctaatactctctggatgaaattcgtttccgacggaaccgtgaataaggccggatttgcagcaaactttttcaaagaggaagatgagtgtgccaaacctgacaggggtgggtgtgaacaacgttgtttgaatactctgggctcctaccagtgcgcgtgtgaacccggctacgaactcggccctgaccgccggtcctgtgaagccgcatgtggcgggctcttgacaaagctgaatggaaccataacgaccccaggctggcctaaagaatatccccccaacaagaattgtgtctggcaggtggtggccccaacccagtatcggatcagtgtaaagttcgaattttttgagcttgaaggaaatgaggtatgtaagtatgattacgtcgaaatttggtccggcttgtcctccgagagtaagctgcacggaaaattctgtggcgccgaggtgcctgaagtgattacctcccagtttaacaacatgaggatcgaatttaaatccgataacacagtgtcaaaaaagggtttcaaggctcactttttcagcgataaagatgaatgctctaaggataacggagggtgccagcatgaatgcgtcaatacaatgggttcttacatgtgccagtgccgaaatggatttgtgctccatgacaataaacatgactgcaaagaggctgagtgcgaacagaagatccactctccatcaggactgattacgtctccaaactggccagacaaataccccagtagaaaagagtgtacgtgggagatttcagccacgccaggccatcgaatcaagctggcgttttctgagtttgaaattgaacagcaccaagaatgcgcttacgaccatttagaagtgttcgacggcgaaacagaaaaaagtccaatcctcggccgcctctgtggcaacaagattccggatcctctggttgctaccggcaataagatgtttgtgcgctttgtatccgatgcttctgtgcaaagaaagggcttccaagccacacactccacagaatgcggcgggcggcttaaggcagagtcaaaacccagagacctgtattcacacgcccaattcggagataacaactaccccggacaggtggactgtgagtggttactggttagcgagagaggtagtagactcgagcttagctttcagaccttcgaagttgaggaggaagccgattgtggctacgactacgtcgagttgtttgatgggctcgatagcacggccgtgggacttggaaggttttgtggcagtggccctcccgaggaaatctattctattggagactcagtccttatccactttcatactgacgacactattaataagaaagggtttcacataagatataagagcatccgttatcccgataccacacacaccaagaagtag

SEQ ID NO: 249163 - RNA, 1596 nt, synthetic construct
  misc_feature 1..1596: note = Description of Artificial Sequence: Synthetic coding sequence
  source 1..1596: mol_type = other RNA
atgatctcccctgacccacggccgagccccggattagcacgctgggctgagtcatacgaagcgaaatgcgaaagaaggcaagaaatccgagagagtaggagatgtcgccccaacgttaccacctgccgccaagtggggaaaacgctgcggatccagcaaagagaacagttacagagggccaggttgcaacagtttttccgccgccgcaatcttgaacttgaagagaaaggtaaggcccagcatcctcaagcccgcgaacagggcccttctaggcgccccggccaggtgacaggtacctccagcgaagtctttcctgctcaacatcccccaccgtccggtatctgcagggacttgtctgaccacctctcttcccaggctggaggactgccaccccaggatacacccataaagaagcccccaaaacatcaccgcggcacgcagaccaaggcagagggccccacaatcaagaatgacgcatcgcagcaaactaactacggcgttgccgttcttgacaaggaaatcattcagcttagcgattacttgaaagaggctctgcagcgagaattggtactaaaacagaaaatggtcatcttacaagatcttcttagtacacttattcaggcaagcgacagtagttggaagggtcagctcaacgaggacaagcttaagggcaaactgcgcagcctagagaatcaactgtacacttgtacccagaaatacagcccttggggcatgaaaaaggtactattggagatggaggatcagaagaattcatacgagcagaaagccaaagagagcttgcagaaggtactcgaggaaaagatgaacgccgaacagcaactacagagtacgcagagatctctcgccctggccgaacaaaaatgtgaggagtggcggtctcagtatgaagctttgaaagaagattggcgcaccttgggaacgcagcacagagagttagagtcacagctccacgtgctccaatctaaattgcagggcgccgacagccgggacttgcagatgaatcaagcccttaggtttctggaaaacgagcaccagcagttacaggcaaagatagaatgtctacagggggatagagacctctgtagtttggatacccaagacctccaggatcagctaaagagaagtgaagcagagaagttaactttggtgacaagggttcagcagttacagggcctgctacagaatcaatcactgcagctacaagaacaggaaaagcttctcaccaagaaagaccaggcattacctgtgtggtcaccgaaatcgtttcccaatgaggtagaacccgagggtacaggtaaagaaaaagattgggacctgagagatcaattgcagaagaaaacactgcaactgcaggcaaaggaaaaggaatgtcgtgagctgcactccgaattagataacctgagtgacgagtatttatcatgcttacgcaagctccagcactgccgggaggaacttaaccagagtcaacaattgccacctagaaggcagtgcggaagatggctccctgtgttaatggttgtgatcgctgcagcacttgccgtatttctcgccaacaaagataacttaatgatttag

SEQ ID NO: 249164 - RNA, 1359 nt, synthetic construct
  misc_feature 1..1359: note = Description of Artificial Sequence: Synthetic coding sequence
  source 1..1359: mol_type = other RNA
atgtccactacttttcccggattggtacacgatgcagagataagacatgatgggtcaaattcttataggctaatgcagctcggctgccttgagagcgtggccaacagcacagttgcttactcctcgagctcccctctgacctactccactaccggaactgaattcgccagcccatatttttcaactaatcaccagtacacaccgcttcaccatcagagcttccactacgaattccagcactcccaccctgctgtcacgccagatgcatactcgctaaactccctgcaccacagccagcagtattatcaacagatccatcacggggaacccaccgactttattaatctccataacgctagggctctgaagtcaagttgcctcgacgagcagaggagagaactgggctgcctggatgcctaccgccgtcatgacctgagcctgatgagtcacggctcacaatacgggatgcatcctgatcaaagactccttcccggaccttctctcggtctggccgcagcaggcgctgacgatttgcaaggaagcgtggaagcccaatgcggactggtactgaatggccagggcggcgtgatacgaagagggggaacatgcgtcgttaaccccacagatttattctgttccgtgccgggacggctgagtttgttgtcaagcacctccaaatataaagtgactattgcagaggtaaagcgccgcctaagtcctccagagtgtttgaacgcaagtctactcggtgggatcttgcgacgcgctaaatcgaagaacggcggacgttgcctgcgcgagaaacttgatcgcctgggacttaaccttcccgctggccgacgaaaagccgctaatgtgaccctcctaactagcctggtcgaaggagaagctctgcatctggctcgagattttggatatacatgtgagactgagtttccagctaaagctgtaggcgagcacctcgctcgtcagcacatggaacaaaaagaacaaacggcccgtaaaaaaatgattctggctaccaagcagatttgtaaagagtttcaggatctattgagccaggacaggtcacccctcggcagctccagacctactcccattcttgatctagacattcagagacacctgactcacttctctcttatcacacacggattcggtactcccgccatctgcgcagcgctgtccacctttcagactgtgctgtctgaaatgctgaattacctagaaaagcacaccacacataaaaacggaggagcagcagattcggggcaggggcatgctaactcagaaaaggccccattgcgtaaaacttcagaggccgctgttaaggaagggaaaacagaaaaaactgattag

SEQ ID NO: 249165 - RNA, 2244 nt, synthetic construct
  misc_feature 1..2244: note = Description of Artificial Sequence: Synthetic coding sequence
  source 1..2244: mol_type = other RNA
atggctgatgaagcagctttggcgctacaacctggtggaagcccctccgctgctggcgctgatcgggaagcggcgtcaagccccgccggagagccgcttagaaagcgtcccaggcgcgatggacccggactggaaagaagcccaggagagcctggcggtgccgcaccggagcgagaagtccccgcagccgctaggggctgtcccggagccgctgctgccgcgctctggagggaggctgaggcagaggccgctgctgccgggggcgaacaagaagcacaggcaaccgcggcagccggggaaggcgataacgggccagggttgcaaggtccttcaagagaacccccactggccgacaacctgtatgatgaagatgatgatgatgaaggggaagaagaggaggaggcagccgctgcggctatcggatatcgcgacaaccttctgtttggagacgaaattattaccaatgggttccactcctgcgagtccgatgaagaagacagagcatcacatgcttcttcatccgattggaccccacgacctaggatcggtccctacacattcgtccagcaacacttaatgattggaaccgacccacggacaatccttaaggacctgctgcccgagaccatcccgccacctgagctagacgacatgacactttggcaaatcgtgataaatattctgtccgagccccccaagagaaagaagagaaaagatattaatacaattgaagacgccgtgaaactactgcaagaatgtaagaagatcatcgtactgacaggtgctggggtcagcgttagctgcggcatccctgatttccgcagtcgtgacggaatttatgctcgattggctgtggactttcctgatctccctgacccccaggccatgtttgacatcgagtactttagaaaggatccacgcccattttttaagtttgccaaggagatttatcccggtcagtttcagccaagcctttgtcataagtttattgccttgtcagataaagaaggaaagttactaaggaattacacccaaaatatcgacacactcgagcaagtagcaggaatccaacggataattcagtgtcatgggagctttgcaacagcctcttgcctcatttgtaaatataaggtcgactgcgaagcggtgcggggtgatattttcaaccaggtcgtcccaagatgtcccagatgcccagcagacgagcccctagcaataatgaagccagagatcgttttctttggtgaaaacttacccgagcagttccacagggccatgaagtacgacaaagacgaggtcgacttattaatcgtgattggatcctccctgaaagtccgacctgtcgcccttattccctcctctatccctcatgaagtaccccagatattgatcaaccgcgaaccattgccgcatctgcactttgacgtcgagctcctgggcgattgtgacgtcataattaatgaactgtgtcacagattaggtggtgaatatgccaaactgtgctgcaacccagtcaaactctctgaaataaccgagaagccacctcgaacacagaaagaacttgcctacctctccgaactccccccaactcctctccacgtctcggaagacagttcatcccccgagcgcacatccccacccgactcttccgtgatcgtgactcttcttgaccaggccgcaaaatcaaatgacgaccttgacgtgagcgaaagcaaagggtgcatggaggagaaaccacaagaagtccagactagtcgaaatgttgaatctattgcagagcagatggagaaccccgacctaaagaatgtcggaagctccacaggcgagaaaaacgaacgtaccagtgtcgcgggaaccgttaggaaatgttggccaaaccgggtggccaaagaacagatctccagaagactggacggcaaccagtatctctttttacctcctaatcggtacatctttcatggggcggaggtgtattctgattcagaagacgatgtattgtctagttcaagctgcgggagcaacagcgacagcggaacctgccaatccccttccctcgaggaaccaatggaggatgaatcagaaatagaagagttttataatggtctggaagacgagcccgacgtgcctgagagagctgggggagcaggattcggcaccgacggcgatgaccaagaagcgatcaacgaagctatctccgtgaaacaagaagtcactgacatgaactacccaagcaacaaatcatag

SEQ ID NO: 249166 - RNA, 3498 nt, synthetic construct
  misc_feature 1..3498: note = Description of Artificial Sequence: Synthetic coding sequence
  source 1..3498: mol_type = other RNA
atgcaagatgttcagggcccacggcccggctcacccggagacgctgaagaccgtagggagctgggattgcatcgcggagaagtaaactttggaggaagtggcaagaaacgtggaaagtttgtcagagtgccttctggagtggctcccagcgtcctgtttgacctgcttcttgcagaatggcacctccccgcaccaaatctcgtggtctcccttgtcggagaggagcaacccttcgctatgaaatcctggctgcgggatgtccttagaaagggccttgtgaaagccgcacagagtaccggtgcgtggattctaaccagtgctttgcgggtcggcctcgctcggcatgtgggccaagctgttcgggaccattcactggcttctacttcaactaaagtccgcgtcgtggccgttggaatggcgtctcttggacgcgtgttacaccgccgaatcctagaagaggcccaggaagacttcccagtccattacccagaagatgacggcgggtcccaagggcctctttgcagtctggactctaatctctcccactttattctggtcgaaccagggccccccggcaaaggcgatggattgaccgagctgcgcctgcggctggagaaacacatatcagaacagcgcgccggatacggaggtacaggctctattgaaatacccgttctgtgcttacttgtgaatggagatcctaacacgttggaacggatctctagggctgtcgaacaggccgcaccttggctcatactggtgggaagcggtggtatcgctgacgtgcttgctgcccttgtgaaccaaccccatctgttagttcctaaggtagcagagaaacagttcaaagaaaaattccccagcaaacacttttcttgggaggacattgtcagatggacaaaactgctacaaaacattacgtctcaccagcacttgttgactgtctacgactttgagcaggaaggctcagaagaacttgatactgtgatcctcaaggctctggtgaaagcgtgtaaatcccattcacaagaaccccaggactaccttgacgaactgaagttagcagtcgcatgggaccgagtggacatcgctaagtctgagatcttcaatggagatgtggagtggaagagctgtgatctcgaggaagtaatggtggatgcgcttgttagcaataagcctgaatttgtgcgactgttcgtggataatggggcagacgtcgccgatttcctgacatatggtcggctgcaagagctgtacagatcggtgtctcgaaaatcgttgctcttcgatctgttacaacgcaagcaagaagaggctagactgactctcgcaggactcggcactcagcaggctagagaaccacccgccggcccccccgccttctcattgcacgaggtttcaagggttttaaaagatttcctgcaggacgcatgccgcggcttttaccaggacggtaggccaggggatcgaagacgcgccgagaaaggccccgcgaagagacctactggacagaaatggctgctagacctaaatcagaagtcagaaaatccctggagagatctgtttttgtgggccgtgcttcaaaatcgccatgaaatggcaacctatttctgggccatgggacaggagggtgtggccgctgccctggccgcttgtaagattctaaaagaaatgtctcacctggagactgaggctgaagctgcacgagccactcgcgaagcaaagtatgaaagattggccttggatctgttctctgaatgctattccaactcagaggctcgcgcttttgcactccttgtgcggaggaaccgctgctggtcaaagacaacctgtctacatcttgccaccgaggctgacgccaaggctttctttgcacacgatggcgtgcaggcatttttgacaagaatctggtggggggacatggcagccggcacccccatcctccgtctgctgggtgcatttctctgccctgctttagtgtacacaaatctgatcacgtttagtgaagaagctcctctccgcaccggtctagaagatttgcaagacctggactcactggatacagaaaaatcccccctgtacggcttacagtctcgcgtggaagaactagttgaggcgccaagagcacagggagatcgcggacccagggccgtgtttttgctcactcgctggcggaaattttggggcgctccagtcacagttttccttggaaatgtggtcatgtattttgccttcctgttcctcttcacttacgtcttgctcgtggactttagaccacctcctcaggggccttccggtcccgaagtaacgctctatttttgggtgtttacactggttctcgaagaaataagacaggggttttttactgatgaagatacccatttagtcaaaaaatttacactctatgtcggagacaactggaataaatgtgatatggtggccatttttctctttatcgtcggtgtgacgtgccgcatgctgcccagcgcctttgaggctgggcgaactgtgctagctatggacttcatggtctttacactccgcctgatccacatctttgctatccataaacagctgggcccaaaaataatcgttgttgagagaatgatgaaagacgtcttctttttcttgtttttcttgtcagtgtggttggtggcatacggtgttaccacacaagctctcctacacccccacgatggcaggcttgaatggatttttagacgagttctctacagaccttatttacagatttttggtcagattcccctggatgaaatcgatgaagcccgagtaaactgctcaactcatcctctgctgctcgaagattcaccatcctgcccatcactgtatgccaattggcttgtaatcctgctcctggttactttcctgctcgtgaccaacgtgctcctcatgaaccttctgatcgccatgttcagctatacttttcaggtggtccaagggaacgctgacatgttctggaaatttcaacgatacaacctgatagtggaatatcacgagagacccgcgctcgcccctccttttatcctactgtctcatctttctctaacactccgacgggtttttaagaaagaagctgagcataaaagagaacacctcgagagggacctgcccgacccccttgatcaaaaagtcgtgacatgggaaacagtgcagaaagagaatttcctttctaagatggagaaacgaaggcgggatagtgagggagaggtcctaagaaaaacggcccatcgagttgactttattgctaagtatttaggcggtctacgcgaacaggagaaacggattaaatgtctggaatcacagataaactactgctccgtcttagttagctcggtggcagatgttttagcacagggcgggggacccaggagttcacagcattgcggtgagggaagtcaactggtggctgcagatcatcgtggcgggttagacgggtgggaacagcctggcgcaggacaacccccaagcgacacctag

SEQ ID NO: 249167 - RNA, 828 nt, synthetic construct
  misc_feature 1..828: note = Description of Artificial Sequence: Synthetic coding sequence
  source 1..828: mol_type = other RNA
atgctcaaccttctgttactagctttaccggttcttgcctcccgcgcctatgctgcgccagctcccggacaagccttacagagggtagggattgtggggggacaagaagccccaaggagtaaatggccctggcaggtatcattgcgcgtgcacggtccttactggatgcacttttgtggcggttctttgattcatccccaatgggtgcttacagccgcccactgcgtagggccggacgtgaaagacctggctgccttgagggttcaattaagggagcagcatctgtattaccaggaccagctgctgcccgtcagccgtattatagtacatccacagttttacaccgctcagattggcgcagacattgctcttctggaattggaagaacccgttaatgtatcaagccacgtccataccgtaactcttcctcccgcttccgaaacctttcccccaggcatgccatgctgggtaacagggtggggggatgttgataatgatgaaaggctcccacccccatttcccctcaagcaggtgaaggttcccataatggaaaaccacatatgtgatgccaagtaccacctgggcgcatacaccggcgatgacgtgagaatcgtgcgcgacgacatgctatgtgccggcaacacgcgacgtgattcctgccagggtgatagcggaggcccactagtgtgcaaagttaacggcacttggctgcaagccggagtggtgtcatggggcgaagggtgcgcacagcctaacagaccgggcatttatacaagagtcacatactatctagactggatccatcattatgtgcctaagaagccgtag

SEQ ID NO: 249168 - RNA, 849 nt, synthetic construct
  misc_feature 1..849: note = Description of Artificial Sequence: Synthetic coding sequence
  source 1..849: mol_type = other RNA
atgctgctcctcgccccccagatgctgaacctgctccttctggcattacccgtgcttgcctctcgcgcgtatgccgcacccgcccccggacaggctctccagcgcgtcggaatagtgggtggtcaagaggccccacgatctaagtggccttggcaggtgtcgttgcgagtccacggcccttattggatgcacttttgtggaggatccctcatccatccccaatgggtactgacagcagcccattgtgtgggccctgatgtaaaagatctggccgccctgagggtacagcttcgagaacagcacctatactatcaggaccagttacttccagtgagccgcattatcgttcatcctcaattctatactgcacagatcggcgccgatatcgccctccttgagttagaagagccagtgaatgtcagctcccacgttcatacagttactttgccccccgccagcgaaacctttccgcccggaatgccctgttgggtcactggatggggggatgtagacaacgacgaacgtctcccaccccctttccctctgaagcaggtaaaagtccctattatggaaaaccatatctgtgacgcaaagtatcatttgggtgcctataccggtgacgatgtgcggatcgtgcgcgatgacatgctgtgtgcaggaaatacgagacgggattcttgccagggggactcagggggtccacttgtctgcaaggtcaatgggacttggctccaggccggcgtggtgagctggggggagggctgtgctcaacctaacagacctggaatctacactagagtgacatattatcttgattggattcaccattacgttcccaagaagccttag

SEQ ID NO: 249169 - RNA, 492 nt, synthetic construct
  misc_feature 1..492: note = Description of Artificial Sequence: Synthetic coding sequence
  source 1..492: mol_type = other RNA
atggcagagggaggcgggcaaaatcaccacgaggtcgttaagttcatggacgtctatcagcggagctactgtcatcccatcgaaacgctcgttgacatctttcaagagtacccagatgaaatcgagtacatcttcaagcctagctgcgttcctttaatgagatgtgggggatgctgcaacgacgaagggctcgagtgtgtccctacagaagagagcaatattacaatgcagatcatgcgcattaaaccccaccaaggccagcatataggagaaatgagtttcttgcaacataataaatgcgaatgcagacccaagaaggaccgagcccgacaagagaatccttgtggcccatgtagcgagcgccgtaaacacctttttgttcaggacccacagacttgcaagtgcagctgtaaaaacactgatagcaggtgtaaggccagacaactagagctgaatgagcgcacgtgtagatgtgacaaaccacgacgatag

SEQ ID NO: 249170 - RNA, 555 nt, synthetic construct
  misc_feature 1..555: note = Description of Artificial Sequence: Synthetic coding sequence
  source 1..555: mol_type = other RNA
atgctgcagatggccggccaatgctcccaaaatgaatatttcgacagtctgcttcatgcgtgtataccttgccagctgagatgctctagcaacaccccaccccttacgtgccaaaggtattgcaacgcatcagtcacaaactccgtaaaaggcaccaatgcaatcctgtggacttgtcttggcctcagtcttattattagcctggcagtcttcgttctgatgttcctcctcagaaagataaattctgaacccctaaaggatgaatttaagaatacagggtccggtctcctgggaatggctaacattgatttagaaaagtccaggaccggtgacgaaatcattctcccacgaggactggaatatacagttgaagaatgtacatgcgaagattgtatcaaaagtaagcccaaggttgactccgaccattgtttccctttgccggccatggaagaaggcgctaccatcctggtaactaccaaaacaaatgattactgtaagtccctgccggctgctttgtctgccacagagatcgaaaaaagcatttcagcccgctag

SEQ ID NO: 249171 - RNA, 567 nt, synthetic construct
  misc_feature 1..567: note = Description of Artificial Sequence: Synthetic coding sequence
  source 1..567: mol_type = other RNA
atgataatttacagagatctcattagccatgatgaaatgttcagcgatatttataaaatcagggagattgccgatggcctttgcttagaagtcgagggaaagatggtttctaggacagaaggaaacatcgatgatagtttaatcggcgggaacgcgtcggccgagggacccgagggagagggaacagagagtaccgtaattaccggagttgacatcgtgatgaaccatcatcttcaggagacttcatttacaaaagaggcttataaaaagtacataaaagattacatgaaatccattaagggtaagctagaagagcagaggcccgaacgtgtgaaacccttcatgaccggagcggcagaacagattaagcatatactggcgaactttaagaactaccaattctttatcggagaaaacatgaacccagacggcatggtggctctgcttgattacagggaggacggagttactccttacatgatttttttcaaggacggtcttgagatggagaaatgcgtatcaacaagaaaatgggttaaaataaacaatgtgaaaaagactttctag

SEQ ID NO: 249172 - RNA, 417 nt, synthetic construct
  misc_feature 1..417: note = Description of Artificial Sequence: Synthetic coding sequence
  source 1..417: mol_type = other RNA
atggtcagcaggactgaaggcaacattgacgattcattaatcggaggaaatgcaagtgcagaaggtccagagggggaggggacagaatcgaccgttattactggggtcgacattgtgatgaaccaccatctgcaggagactagtttcaccaaagaggcctacaagaagtatataaaggactacatgaagtcgattaaagggaagcttgaggagcaaagacctgaacgagttaaacccttcatgacaggagctgctgagcaaataaaacacatacttgcaaattttaagaattaccagttctttattggcgagaatatgaatcctgatggaatggtggcattactcgactacagagaagacggagttactccttatatgatttttttcaaggatgggctagaaatggaaaagtgttag

SEQ ID NO: 249173 - RNA, 417 nt, synthetic construct
  misc_feature 1..417: note = Description of Artificial Sequence: Synthetic coding sequence
  source 1..417: mol_type = other RNA
atggtgtctcggaccgaaggcaatattgatgacagccttatcggtgggaatgcaagcgcagaaggacccgagggggaaggtacagaatctacagttataactggagtcgacatcgtgatgaaccatcatctgcaggagacctcatttaccaaggaagcttacaaaaagtacattaaagattacatgaaaagcattaagggaaaactggaggaacagcgacctgaacgtgttaaaccttttatgaccggcgccgctgagcagatcaaacatattctggctaactttaagaattaccagttttttatcggcgaaaacatgaaccccgacggcatggtagcactccttgactatagagaagacggcgtcactccatatatgatattcttcaaggatggcttggaaatggaaaagtgttag

SEQ ID NO: 249174 - RNA, 483 nt, synthetic construct
  misc_feature 1..483: note = Description of Artificial Sequence: Synthetic coding sequence
  source 1..483: mol_type = other RNA
atgtttagcgatatctataagattcgggaaatcgcggatggactgtgtctcgaagtcgaaggtaagatggtttcaagaacagagggtaatatcgatgatagtctgatagggggcaatgcaagcgccgagggtcctgaaggagagggcactgagtcaaccgtgattacaggcgtcgacatcgtgatgaatcatcacctgcaggaaacttctttcaccaaggaggcttacaagaaatacattaaagactacatgaaaagtattaagggcaaattagaagaacagaggcccgagagagtgaaaccctttatgacaggagccgccgaacagatcaaacatattttagcaaactttaaaaactaccaattttttatcggagagaacatgaaccccgacggcatggtggcattgctggattatcgcgaggatggcgtgacaccctatatgatcttttttaaggacggattagaaatggaaaagtgttag

SEQ ID NO: 249175 - RNA, 519 nt, synthetic construct
  misc_feature 1..519: note = Description of Artificial Sequence: Synthetic coding sequence
  source 1..519: mol_type = other RNA
atgattatttacagagacctgatttcccacgacgagatgttctctgatatctacaagatccgggaaattgccgatggactctgtctcgaagtggaaggcaaaatggtcagccgtacggagggaaatattgacgattcactcattggcgggaacgcaagcgcagagggaccagaaggagagggaactgaatcaaccgtgattaccggagttgacatcgtgatgaaccaccacctgcaggagacatcctttactaaggaggcttacaaaaagtacattaaagactacatgaaaagcatcaagggaaagctggaggagcagcgcccggagcgcgtaaagcccttcatgactggagcagcggaacagattaagcacattttggcaaacttcaaaaactaccaattctttataggcgaaaacatgaacccggatggaatggttgcactgctggattaccgcgaagacggcgttacaccctacatgatttttttcaaagatggactcgaaatggaaaaatgctag

SEQ ID NO: 249176 - RNA, 1278 nt, synthetic construct
  misc_feature 1..1278: note = Description of Artificial Sequence: Synthetic coding sequence
  source 1..1278: mol_type = other RNA
atggcaggtgccgaaggagctgccggtcgtcagagtgagttggaacctgtggtctcactcgtcgatgtcctcgaggaggatgaagagctcgagaacgaggcctgcgctgttctgggaggctccgatagtgaaaaatgcagttactctcagggttccgtgaagagacaagcactctatgcctgtagtacttgcacccctgaaggcgaagagcctgccggcatatgtctagcctgttcctacgaatgccacggatcacacaagctgtttgaattgtatactaaacggaacttcaggtgcgattgcgggaacagcaaattcaagaacctggaatgcaagttactacctgacaaggccaaagtgaatagtggaaataagtataatgataattttttcggactgtattgtatctgtaagcgaccttatcccgacccggaagacgagatccccgatgagatgatacagtgtgtagtatgcgaagattggtttcacggaaggcatctgggggctatcccacccgaaagcggagacttccaggaaatggtgtgccaagcatgtatgaagaggtgctctttcctgtgggcctatgccgcccaactggcagtaactaaaattagtacggaagatgacgggctggtccggaatatcgatggcattggtgaccaggaagtgattaagcctgagaatggcgaacaccaggactccactcttaaggaagacgtccctgaacagggtaaagatgacgtgagggaagttaaagtggaacaaaacagcgaaccgtgcgcaggtagttctagcgaatccgatctccagactgtctttaaaaacgagtccctcaatgctgaaagtaagtctggttgtaagctccaggaactcaaagcaaagcagctgattaaaaaggacacagccacgtattggccactgaactggagatccaaattgtgcacatgccaggactgtatgaagatgtacggagatctagacgttctgttcctgaccgatgaatacgatacagtactggcttatgaaaacaaagggaagattgcacaggcaacggatcgcagtgacccgttgatggacactttaagcagcatgaacagagtccaacaggtagagttgatatgtgagtataatgatctgaaaactgagcttaaggactacctcaagagatttgctgacgagggaaccgttgttaaaagagaagatatccagcagtttttcgaagaatttcagagcaaaaagagaaggcgcgtcgatggtatgcagtactactgtagttag

SEQ ID NO: 249177 - RNA, 3234 nt, synthetic construct
  misc_feature 1..3234: note = Description of Artificial Sequence: Synthetic coding sequence
  source 1..3234: mol_type = other RNA
atgaccgccgagctgcagcaggatgacgcagcaggcgccgccgatggacatggcagctcctgccaaatgctgctgaaccaactgagggagatcacaggtattcaggacccatcattcctccatgaagcactgaaagccagcaatggggatatcacacaggccgtatctttgctaacagatgaaagagtcaaggagccttcccaggacacagttgctaccgaaccaagtgaagtcgaggggtctgccgccaacaaggaggtcctcgccaaggttatcgatctcactcacgataataaggacgacctgcaagccgctattgccttatccctgctggaaagcccaaagattcaagccgacggccgagaccttaaccgtatgcacgaggccacatctgctgaaactaaacgatcaaagagaaagagatgcgaagtatggggtgagaaccccaatccaaacgattggagacgagtcgacgggtggcctgtcgggctgaagaatgttggcaacacttgctggttctcggctgtgatccaatctctattccaactacctgagttccggcgcctggtactgagttattcactcccgcagaatgtgctggagaattgtagaagccataccgagaaacgtaatattatgttcatgcaggagcttcaatacctgttcgctctcatgatgggtagcaatcggaaatttgtcgacccttccgcagccttggatctgttaaaaggagccttcagaagtagcgaggaacagcagcaggacgtctctgaatttacacacaagctactggactggctggaagacgctttccaactggccgtcaatgttaacagcccccgcaacaaatcagaaaaccccatggtgcagctgttttacgggactttcttgaccgagggggtgcgcgaaggaaaaccattttgtaacaatgagaccttcggccagtatcctctacaagttaacgggtatcgaaatctggacgagtgtctggaaggggccatggttgaaggcgatgtcgaactgctgccatccgaccactccgtgaaatacggccaggagcgttggttcacgaaactgccaccagtgttaacttttgagctctccagattcgagtttaatcaaagtcttggtcaaccagaaaagattcacaacaagcttgagttcccccaaatcatctacatggacaggtatatgtatcgatcaaaggaactgattagaaataagagagagtgcatcagaaaactcaaggaagaaattaagatcctccaacagaagctcgagcggtatgtaaaatacggaagtggtccggcacggttcccactacccgatatgctgaagtatgtgatcgagtttgcaagcaccaaaccagcctctgaatcttgtcctccggagtccgatacccatatgaccctgccattaagttccgtgcattgttctgtttccgaccaaacttcaaaggagtcaacctccaccgaatctagttcgcaagatgtggaaagtacgttttcttcacctgaggattctctccctaaatccaagcctctgacatctagccgctcaagtatggagatgcctagccagccagctcctagaaccgtcaccgacgaagagataaactttgtgaaaacgtgcctgcaacgatggcggagtgaaatcgagcaggatatccaggacctcaaaacttgtatcgcatccaccacccagacaatcgaacaaatgtactgcgatccccttctgaggcaagtcccatacagattgcacgctgtgctggtccatgagggtcaggctaatgcaggacattactgggcatatatatataatcagccccgtcaaagctggttaaagtacaatgacattagtgtgaccgaatcatcttgggaggaagtggaacgggattcatacggagggttacgtaacgttagcgcctattgcttgatgtacatcaacgataaactgccctattttaatgccgaggcggcccctacagaaagtgaccagatgtcagaggtcgaagctctgtccgtggagttaaagcactacattcaggaggataactggaggttcgaacaggaggtggaagaatgggaggaagagcagtcatgtaaaattcctcagatggaaagtagcaccaacagttcaagtcaggactatagcacttcccaggagccttctgtagcctcttctcacggcgtacggtgtctttcaagcgaacacgctgttatagtaaaagagcaaaccgcccaggccatcgcaaacactgctcgcgcatacgagaaatccggggtagaggctgccctaagcgaagtcatgctttctcctgccatgcagggagttattttagcaattgcgaaggcaagacagacctttgatcgggatggttcggaagccgggttgataaaggcatttcatgaggaatactcccggctataccaactcgcaaaggaaacacccaccagccacagcgaccccagactccaacacgtattagtctacttttttcagaacgaggcgcccaagcgtgtggtagaacgtaccttactagaacaatttgctgacaagaatttgagctacgacgagcggtccatcagcattatgaaagttgcacaggccaagctgaaagagataggtcctgacgatatgaacatggaagaatataaaaaatggcacgaagactactcattgttccgaaaagtgagtgtctacctgctgacaggactcgaactttatcaaaaggggaaataccaggaggctctcagttatctcgtgtatgcttaccaatctaacgcagctctgttgatgaagggccctaggagaggcgtgaaagaatccgtaatcgctctctatcgtaggaaatgcctgcttgaattgaacgccaaagcagcttcactgttcgaaacaaacgacgaccacagtgtgacggaagggataaatgtaatgaatgaacttattattccctgtattcatctgatcattaataatgacatttcaaaggacgacctcgacgcaatagaggtaatgagaaaccattggtgttcatatttgggccaggatatcgccgaaaaccttcagctttgtttgggcgaatttctgccaaggctgcttgatccatcagcggaaataatagttcttaaagagcctcccaccattcgtcctaatagcccttacgatttatgttcccgattcgccgcggtcatggaaagcatccagggggtctccacagtgactgtcaagtag

SEQ ID NO: 249178 - RNA, 2274 nt, synthetic construct
  misc_feature 1..2274: note = Description of Artificial Sequence: Synthetic coding sequence
  source 1..2274: mol_type = other RNA
atggtgccagataccgcctgtgtgctcctgcttaccctggccgccctgggcgcgtccggtcagggacagtccccccttggctcagatcttggtcctcagatgctgcgtgagctacaagaaacaaatgcagcacttcaggatgtcagggagctacttcgacagcaggtgcgtgagattacttttctaaagaacactgtcatggaatgtgacgcctgcggaatgcagcaatctgtgcggacaggcctccccagcgtccgtccacttttgcactgtgcccccggcttttgtttccccggcgtcgcgtgtatccagaccgagagcggtgcacgctgcgggccctgccctgcaggatttacaggtaacggaagccactgtaccgatgttaatgaatgcaatgcccatccatgtttcccccgggttcgttgtatcaatacaagtccgggatttcgatgtgaggcttgcccaccgggatattctggcccgactcatcagggagtcggacttgccttcgcaaaggctaataaacaagtttgcacagacatcaatgagtgtgaaactggccagcataattgtgttcctaatagcgtatgcatcaacactagaggaagctttcaatgtggtccatgtcagccagggttcgtgggagatcaggcaagtggctgtcagaggcgtgcccaaaggttttgtccagatggatcccctagtgagtgccatgagcatgccgactgtgtcctggaacgcgacggctcaaggtcatgtgtgtgtgccgttgggtgggccggcaacgggatattatgcgggagagataccgacttagacggattcccggatgaaaagctccgatgcccagaaagacagtgcagaaaagataactgcgtgactgtgccaaacagcgggcaagaggacgttgaccgggacggaattggagatgcatgcgatcctgacgctgacggtgacggtgtgcccaacgagaaagataattgccccctggtaaggaacccggatcaacgcaacactgacgaggacaagtggggcgacgcttgtgacaattgcagatcacagaaaaatgatgaccagaaagataccgatcaggatggccgaggggatgcctgcgacgacgatatagatggcgatcggataagaaaccaagccgacaattgccctcgggtgcccaactctgaccagaaggactccgatggcgatggaataggtgacgcctgtgataattgcccgcaaaagtccaaccctgatcaggcagacgtagatcatgactttgtcggcgacgcttgcgacagcgatcaagaccaggatggcgacggacaccaagactcgagagacaactgcccaacagtacctaactccgcacaagaagattccgaccatgatggccagggcgacgcttgcgacgacgatgacgacaacgacggagtgcccgattccagagataactgccgcttggtccctaatccaggccaggaggatgccgatagagacggggtgggagacgtgtgccaagatgattttgatgcggacaaagtggttgacaagattgatgtatgtccagagaacgctgaggtcacccttacagactttcgtgcattccagacagttgttctcgacccagagggcgatgcgcagattgatcccaattgggtagtgctgaaccagggccgcgaaatagtacagactatgaactccgaccctggactcgccgtcggttacactgcttttaacggcgtagactttgagggaactttccatgtgaacactgtgactgacgacgactatgctggattcatttttgggtatcaggacagctcttcgttttatgtcgtaatgtggaaacagatggaacagacatactggcaagccaacccgtttcgtgcagtggccgagcccggcattcagttaaaagctgtcaaatcatctaccggcccaggtgaacaactgaggaatgcactgtggcacacaggtgataccgagtcccaagtgcggctgttgtggaaagatcctagaaacgtcggatggaaggataaaaagagttacaggtggtttctacaacatcgccctcaggtcggctacattagagtgcgcttctacgaaggaccggaattggttgctgatagcaacgtagtactggacacaacaatgagaggcggccgattgggcgtgttttgcttcagtcaggaaaatattatatgggccaacctgcgctatcgatgtaacgacacaattcccgaagattatgagacccatcagttgagacaggcttag

SEQ ID NO: 249179 - RNA, 2700 nt, synthetic construct
  misc_feature 1..2700: note = Description of Artificial Sequence: Synthetic coding sequence
  source 1..2700: mol_type = other RNA
atggataggaaagttgccagggagtttagacataaagtggattttttgatcgaaaatgatgccgagaaagattatctctatgatgttctgagaatgtaccaccagaccatggacgtggctgtgcttgtcggtgatttaaagcttgttattaacgaacccagccggttgcctctcttcgatgcaattcgtccgctcatacccctcaagcaccaagttgaatacgaccaactcaccccacgcaggtcaaggaagcttaaggaagttagactcgaccggctccatcccgagggactgggtctctcagtgagaggtgggttagaatttggctgtggactattcatttcacacctgatcaaaggggggcaagcagatagtgtcgggctgcaggtgggagatgagatcgtgaggatcaacggatattcgattagcagctgcacacatgaagaagtcatcaacctgatccgtaccaaaaaaaccgttagcattaaagtgaggcatatcggactcatacccgtgaagtcgagtcccgatgaacccctgacctggcagtacgttgaccagtttgttagtgaatctggcggcgtgagagggagtctgggcagcccgggaaatagggaaaataaagagaagaaagtgttcattagccttgtgggaagcagaggactcggctgtagcatcagcagtggcccaatccaaaagcctggtattttcataagccacgttaagcctggttccttatccgcagaggtaggattggaaatcggagatcagatcgttgaggtgaatggcgtagactttagcaacctcgaccataaggaagccgtgaatgtcctcaagtctagcagaagcctgaccatcagcattgtggccgccgcggggcgggagttatttatgactgatcgcgaaagactagccgaggcaagacaaagggaattgcagcgtcaggaactgcttatgcaaaagcgcttggccatggagtccaataagattctgcaggaacagcaagagatggagagacagaggaggaaagagatagctcagaaggcagcagaggagaacgaaagatacaggaaagaaatggagcagattgttgaggaggaggagaagtttaaaaagcagtgggaggaggattgggggtcgaaggaacaacttctgttgcctaaaacaatcactgcagaagtgcatcctgttcctctgagaaagcccaaatcattcgggtggttttatcggtacgatggtaaatttcccacaatccgtaagaaggggaaggataaaaaaaaggctaagtacgggagcctgcaagacctgagaaagaacaagaaggagttggagttcgaacagaagctgtataaagagaaggaagaaatgttagagaaggagaaacaactgaaaatcaatcgactcgcacaggaagtctccgagacagaacgcgaagatctcgaggagagcgaaaagatacagtactgggtagaacgcctgtgccagacgcgactggaacaaatctcatccgccgataatgaaatctcggagatgacaaccgggcctcctccccctccaccctctgtgtcacctttggctccaccccttcgaagattcgctggaggcctgcatctgcacaccactgacctcgacgacattcctttggatatgttctattatccccccaagaccccatccgctcttcccgttatgccccatccccctccctcaaatcctcctcacaaggtccccgcccctcccgtccttcccctgtccggacacgttagtgccagctcgtcaccatgggtgcaaaggactccgccacctataccaatcccaccaccacccagtgtccccactcaggatctgaccccgactcgcccattgccaagtgccctagaggaagccttgtccaatcatccctttcgcaccggtgataccggcaaccccgtggaagactgggaagcaaaaaaccactccggaaagcccaccaattcccccgtcccagagcaatcattcccacctaccccgaaaacattttgccccagccctcagccgccaagaggacctggggtctccaccatctccaaacctgtcatggtgcaccaagagcccaatttcatatatagacccgccgtgaaaagcgaagtcctgcctcaggaaatgcttaagagaatggttgtatatcagactgcttttaggcaggactttagaaagtacgaagaaggtttcgatccctacagcatgtttacgcctgagcaaattatgggaaaggacgtgcggcttttgaggattaagaaagaaggctctctggatctggctctggaaggtggtgtagactccccaatcggcaaggtggtggtgtcagcagtttatgagcggggtgccgcagaacgccatggaggcatcgttaagggcgacgaaattatggcaatcaacggcaagatagtgacggactacacgttggcagaggctgaggcagcgctgcagaaagcatggaatcaaggaggtgactggatcgatttagtggtggcggtgtgccccccaaaggaatatgacgatgagctggcttctttaccctccagcgtggctgaaagcccacaacccgtcagaaaactgctcgaagacagagcagcggtacatagacatggatttttgttacagctggagccaacagatctcctgctcaaaagcaaaagaggaaaccagattcacaggtag

SEQ ID NO: 249180 - RNA, 825 nt, synthetic construct
  misc_feature 1..825: note = Description of Artificial Sequence: Synthetic coding sequence
  source 1..825: mol_type = other RNA
atgattatttcacactttcctaagtgtgtagccgtgttcgcgcttctggccttatctgtcggcgcccttgacaccttcattgcagcagtgtatgaacatgccgtcattctgccaaaccgtactgaaacacctgttagcaaggaggaggctctgcttctgatgaacaaaaatattgatgtcctcgaaaaagctgtcaagttggccgcgaaacagggagctcatattattgtgacgcccgaagacgggatctatggatggatattcaccagggaatcaatctatccctatcttgaagacatccccgaccccggcgtcaactggataccctgccgtgacccatggagattcggcaataccccagttcagcagcgactgtcctgtctcgccaaggataactcgatttacgtcgtcgccaatataggagataagaaaccttgcaacgccagcgatagtcagtgccccccggacggaaggtaccagtacaacactgatgtggtgttcgacagccagggtaaattactagcacgctatcataagtataatttattcgccccagaaattcaattcgatttccctaaggactcagaactcgtaacgttcgacacaccttttggtaagtttggtatttttacctgcttcgatattttttcccacgatccggcggtagtcgtggtggacgagttccagctaacagccttttcgacacctcagcatggcaccactcgatgtccctcttcacgcctctttccctctattcaacatggacctagaccatgggaaagcatttacctccttcagatccccactaccccagcatgcacctag

SEQ ID NO: 249181 - RNA, 444 nt, synthetic construct
  misc_feature 1..444: note = Description of Artificial Sequence: Synthetic coding sequence
  source 1..444: mol_type = other RNA
atgatcatctcccatttccccaagtgcgtcgccgtctttgctctgctagcactatcagtaggcgccctggataccttcattgctgctgtctacgaacatgcggtgattttacctaaccggacagaaacccccgtgagtaaggaagaagctctcctccttatgaacaagaatattgatgtgctggaaaaagccgtgaagctcgccgccaagcagggtgctcacataatcgttactcctgaggatggtatctatggttggatctttacgagagaaagtatttacccctacctcgaggacatccccgaccccggagttaactggattccctgtcgcgacccatggaggaaaagtaagaagatgaacgaacccgtatcaaaggaactttgctatcactgccacagcgaatgcaatcaatatggccaatggaagctgtacaggacatag

SEQ ID NO: 249182 - RNA, 624 nt, synthetic construct
  misc_feature 1..624: note = Description of Artificial Sequence: Synthetic coding sequence
  source 1..624: mol_type = other RNA
atgattatatctcactttcctaagtgtgtagctgtgttcgcactcttggccctgtccgtcggcgctctcgatacctttatagctgccgtctacgagcacgccgtcattctcccaaatcgaactgagactcctgtcagcaaagaggaggccctcctactaatgaacaaaaacatagatgtactcgaaaaggccgtcaagcttgccgccaagcagggcgcccatataattgtaaccccagaggacggcatatatggctggatcttcacccgagagtcgatttacccttatctcgaggatatcccggatcccggggtgaactggatcccctgcagagacccatggcgctttggaaatacccccgtacagcaaaggctgagctgtctggctaaagacaacagcatctatgtagttgccaacattggtgacaagaagccctgcaatgcatctgattcacagtgtccaccagacggtagataccagtataacacagacgtggtgttcgactcacaaggtaaattattggcaaggtaccacaagggcgtcgagagtacccctcagaagcaatctcgatgtactactatgacatggaagcagcgagtggtttcctgctgctaccaaaattag

SEQ ID NO: 249183 - RNA, 303 nt, synthetic construct; identical to SEQ ID NO: 248577
  misc_feature 1..303: note = Description of Artificial Sequence: Synthetic coding sequence
  source 1..303: mol_type = other RNA

SEQ ID NO: 249184 - RNA, 1110 nt, synthetic construct
  misc_feature 1..1110: note = Description of Artificial Sequence: Synthetic coding sequence
  source 1..1110: mol_type = other RNA
atgagagcctgtatcagcctcgtccttgcagtactgtgtggacttgcttgggctgaggaccacaaagaatcagaaccactacctcagctggaggaggaaactgaggaagctctcgcttcaaacctttactctgcgcccacttcttgccaggggaggtgttatgaagcgtttgataaacaccatcaatgtcactgtaatgctcggtgtcaagaatttgggaattgttgcaaagactttgagtccctgtgttctgatcatgaagtgtctcactcatcagatgccatcacaaaagaggagatccagagtatctcagagaaaatctacagggccgatacgaacaaggcacagaaagaggatattgtgctgaatagccagaattgtataagtccatccgaaacgcgaaatcaggtggatagatgtcctaagcctttatttacatatgtcaatgagaaattgttcagtaaaccaacatacgccgcttttattaatctcctcaataactaccaacgagccacagggcatggcgagcacttttcagcccaggagctggccgagcaggatgcctttttacgcgagattatgaaaaccgccgtgatgaaggagttatattcattcttgcatcatcagaaccgctacggtagcgaacaggagtttgtcgacgatctgaaaaacatgtggtttggactatattccagaggtaacgaggagggggatagcagcggctttgagcatgtctttagtggggaggtgaaaaaaggcaaagttacaggatttcacaactggatacgcttctacctagaagagaaagaggggctggttgactattactcacacatatacgacggcccgtgggatagttatcctgatgttttagcaatgcagtttaactgggacgggtactacaaggaagtgggctcagcttttatcggtagctcacctgagtttgagtttgcgttatattcactctgctttattgctagacccggaaaagtctgtcaactgtccctaggaggatacccactggccgtgagaacctacacctgggataaatccacttacggtaacgggaaaaagtatatcgccaccgcttacatcgttagctcaacgtag

SEQ ID NO: 249185 - RNA, 852 nt, synthetic construct
  misc_feature 1..852: note = Description of Artificial Sequence: Synthetic coding sequence
  source 1..852: mol_type = other RNA
atgtgcaatacaccaacatactgcgatctcggtaaagcagcaaaggatgttttcaataaaggatacggattcggtatggtgaagatagatctcaagacaaagagttgctctggtgttgagttctcaacctccggccacgcctacactgacaccggtaaagccagtgggaatctggaaaccaaatataaagtgtgtaactatggacttacttttactcaaaaatggaacacggacaatactctggggactgaaatttcatgggagaacaaactcgcagaaggactcaagttgactctggacactatctttgtccctaatactggaaaaaagagcgggaaactgaaggcatcttataagcgggactgtttctccgttggcagtaatgtggatatcgatttctccggccccactatttatggatgggctgtgctcgctttcgaaggctggctggccggttaccagatgtcctttgacacagctaaatcaaagctctcccagaacaattttgctctaggctacaaggcagcggacttccagctacacacccatgtcaacgacggaactgagttcggtggtagtatttaccaaaaggttaacgagaaaatagaaacaagcataaacttggcctggacagccggcagcaacaacacaaggttcggcatcgctgctaaatacatgttggattgcaggacgtcccttagcgcaaaagtcaacaacgcctccctgattggacttggctatacccaaactctccgtcccggtgtgaaactcactctctccgctctcattgatggaaagaatttttcggcaggcggacacaaagtaggacttggatttgaactcgaagcatag

SEQ ID NO: 249186 - RNA, 621 nt, synthetic construct
  misc_feature 1..621: note = Description of Artificial Sequence: Synthetic coding sequence
  source 1..621: mol_type = other RNA
atggccgccaacaaacccaagggacagaacagtctggctttacacaaggtgataatggtaggctcaggcggggtgggcaaatcagctcttactctccagtttatgtacgatgaatttgtggaagattacgaaccaacaaaggctgatagttataggaaaaaggtggtattagatggagaagaggtgcagatcgacatcttggacaccgctggccaagaggactatgccgccatacgggataattacttcagatccggcgagggcttcttgtgcgtcttttcaatcacagagatggaatctttcgccgcaaccgcagactttcgcgaacagattttacgggtaaaggaagacgaaaatgtgccctttcttttggtaggaaacaagagcgatctggaggacaagaggcaggtttctgttgaagaggcaaagaatcgggcagagcagtggaatgtcaattacgttgagaccagcgctaagaccagggcaaatgtggacaaggttttcttcgacctcatgagggagattagagcacggaagatggaggattctaaggaaaagaacggtaaaaaaaagagaaagtcacttgccaaaaggatacgcgagaggtgctgcatattatag

SEQ ID NO: 249187 - RNA, 1170 nt, synthetic construct
  misc_feature 1..1170: note = Description of Artificial Sequence: Synthetic coding sequence
  source 1..1170: mol_type = other RNA
atgctggaagaaccccggccccggccccccccgtcaggtttagctgggctcctgttcctcgccctgtgctctagagcattgtccaatgaaattctgggtcttaaactccctggcgaaccaccgcttacagccaataccgtgtgtttaaccctctccggactgagcaagcgacagctcgggctgtgtcttcgtaatccagatgtaaccgcttcagcacttcaggggttacatatcgccgtgcacgagtgtcaacaccaactgagagatcagagatggaactgtagcgccctggagggagggggcaggctgccacaccattcagcgattttaaagaggggatttcgcgaatctgcattcagtttctcaatgctcgcggctggggtgatgcatgctgttgctactgcttgctcccttggcaagttggtctcttgcggatgcggatggaaggggtcaggtgagcaggatcgcctgcgggcaaaattgttgcaactacaagcactgagccggggtaaaagctttcctcattctctacccagccccggaccaggaagttcaccaagtcctggccctcaggacacctgggaatggggtggatgtaaccacgacatggattttggggagaagttcagtagggattttttggattcaagagaagcaccacgcgatatccaagccaggatgagaatacataacaatagagtgggaagacaggtggtgaccgaaaatttaaagaggaagtgtaagtgccacgggaccagcggctcttgtcagtttaaaacctgttggcgagctgctcccgagtttcgggctgtcggtgctgctctgcgcgaaagactgggccgggccatctttattgatacacataatagaaatagcggcgcattccagccacgactacggcctagacggctctcaggtgagttggtctactttgaaaagtcccccgacttctgtgaacgcgatccaactatggggagtcctggcacacggggtagggcctgtaacaagacttcaaggcttcttgacggatgcggttctctgtgctgcggccgtgggcacaacgttctccgccagactcgtgtggaaagatgccattgtaggttccattggtgctgctatgtcctgtgtgatgagtgcaaggtgacagagtgggttaatgtctgcaagtag

SEQ ID NO: 249188 - RNA, 576 nt, synthetic construct
  misc_feature 1..576: note = Description of Artificial Sequence: Synthetic coding sequence
  source 1..576: mol_type = other RNA
atgttagaggaaccacggccccgaccccctccctctggcttggcgggacttttgttccttgccttgtgctccagagccctgtcgaatgagattctgggtctgaaactgcctggcgaacctcccctcacggccaataccgtgtgtcttacattgtccggcttatccaaaaggcagctcggtttatgcctgcgcaaccctgacgtaactgcatcagctctgcagggactgcatatcgccgtccacgagtgtcagcatcagttaagagaccaaaggtggaattgctccgcgcttgaaggaggcggcagactgccacatcattccgctatactgaagagaggctttcgagagagcgcattttccttctcaatgctagccgcgggggttatgcatgccgtcgctactgcttgctctctgggcaaacttgtgagctgtggttgtgggtggaaaggctccggcgaacaggaccgtcttcgagcaaagctcctccagttgcaggccctatcaagagggaagcttccaggaactagtcgccatgagtgcgagtcaactacgacgggttggggagctcgatggtag

SEQ ID NO: 249189 - RNA, 309 nt, synthetic construct
  misc_feature 1..309: note = Description of Artificial Sequence: Synthetic coding sequence
  source 1..309: mol_type = other RNA
atgctggaagaaccgagaccacgacctccaccgtcaggactagccggtctacttttcctggctctctgcagcagagcactgtccaatgagatattggggctgaagctcccgggagaaccgcccctaacagctaatacagtctgtctaacactctcaggcttgtcaaagaggcagctcggcctgtgtctccgcaatcccgacgtaactgcgtccgctctgcagggccttcacatcgcagtccacgaatgccagcatcagctcagagaccaaaggtggaattgctccgcccttgaggggggtgggcgatag

SEQ ID NO: 249190 - RNA, 1050 nt, synthetic construct
  misc_feature 1..1050: note = Description of Artificial Sequence: Synthetic coding sequence
  source 1..1050: mol_type = other RNA
atgcacaggaatttcaggaagtggattttttatgtattcctctgcttcggagttctttacgtaaaacttggtgctctgtcgtccgtcgtggctctaggtgctaatatcatctgcaacaaaatacctggactggcccctcgccagagagctatttgccaaagccggcccgacgcgatcatcgttattggagaaggagcccagatggggattaacgagtgtcaataccaatttaggtttggccgatggaattgttccgctctcggtgagaagaccgtatttggacaggagttgagggtcggaagtagagaggcagcctttacttacgcaatcacagcagcaggtgtggcccacgcagtcactgctgcctgctcccagggtaacttgagtaattgcggctgtgatcgggagaagcaagggtattataaccaagcagaaggatggaaatggggggggtgttccgcagacgtcagatacgggatcgactttagtaggaggttcgtggacgccagggaaattaaaaaaaatgctagacgacttatgaatctgcacaataacgaggccgggcggaaagtgctggaagaccgtatgcagctcgagtgcaaatgtcacggagtgagtggatcatgcaccaccaagacctgctggactactctaccgaagtttcgagaagtcgggcatctactgaaggagaagtacaacgcagcagtccaggtcgaggttgtacgagcttcacgcctcagacaaccaacattccttaggattaagcagctccgctcgtatcagaaacctatggagacagacctggtttacatcgaaaagtcccccaactattgtgaggaagacgccgcaacaggatccgtaggaacgcagggaagattatgtaatagaacatcccccggcgctgatggctgtgacacaatgtgctgcggacgaggttacaatacacaccagtacacgaaggtttggcaatgcaactgtaaatttcactggtgttgctttgtcaaatgcaatacctgctctgagcggaccgaagtttttacatgtaaatag

SEQ ID NO: 249191 - RNA, 1062 nt, synthetic construct
  misc_feature 1..1062: note = Description of Artificial Sequence: Synthetic coding sequence
  source 1..1062: mol_type = other RNA
atgttgctgctctcacccagatccgccctcgtaagtgtctactgccctcaaatttttcttttactgtcttcaggctcatatctcgctcttagctccgtggtcgcgttaggcgccaatatcatatgcaacaaaatccctggcctcgctccgaggcaacgcgctatctgtcagtcccgcccggacgccatcatcgtcattggggagggagcccaaatgggtattaacgagtgtcagtaccagttccggtttggacggtggaactgttcggcccttggtgaaaaaacggtgttcggacaggaactgagagttggaagccgagaggcagcattcacttacgccatcactgccgcaggcgtggcccatgcagtcaccgcagcttgcagccaagggaacctgtctaattgcggctgtgaccgggaaaaacaaggatattataatcaggccgaaggatggaaatggggggggtgctccgccgatgtcagatatggcatcgacttcagtaggcggtttgtggacgcaagggagatcaaaaaaaacgcaagacggctcatgaacctccataataatgaggccggtagaaaagtacttgaggatagaatgcagctagagtgtaaatgtcatggagtcagtggaagctgcaccacaaagacgtgttggactaccctgccaaagttccgggaagtcggacatctgctcaaggaaaaatataacgctgcagttcaagtggaggtagtgcgggcatcccggctgcggcaaccgaccttcttgaggatcaagcagttacgatcataccagaagccaatggaaactgaccttgtctatattgagaagtcacccaattactgtgaggaggatgctgccaccggaagtgtaggaacccaaggtagactgtgtaaccggactagtcctggcgcagatgggtgcgataccatgtgctgtgggagaggctacaacactcatcaatacaccaaagtctggcagtgtaattgtaagttccattggtgctgcttcgttaaatgtaatacctgctcagagcgaactgaagttttcacttgtaaatag

SEQ ID NO: 249192 - RNA, 618 nt, synthetic construct
  misc_feature 1..618: note = Description of Artificial Sequence: Synthetic coding sequence
  source 1..618: mol_type = other RNA
atgcatcggaacttccggaagtggattttttacgtgttcctctgttttggtgtcctgtacgtgaaactgggcgcattaagctctgttgtggctttaggagctaacatcatttgtaacaagattcctggactcgccccgcgccagcgcgcaatctgtcagagccggcccgacgcgattattgtaataggcgaaggcgcacagatgggaatcaacgagtgtcagtaccagttccgctttgggcggtggaattgctctgccctcggcgaaaagacagttttcggtcaggaactacgggtgggatcccgcgaggctgccttcacctatgcgatcactgcagctggggtggctcacgcagtaacggccgcctgctctcagggtaatttgagcaactgtggatgcgatcgggagaaacaggggtattacaatcaagccgaagggtggaaatggggggggtgtagcgctgacgtgcggtatggtatcgacttttcacgcagatttgtggacgcccgagagatcaagaaaaacgctcgaagactgatgaatctccataataatgaagcaggaagaaagggacttctcggtcagcccagggtaacttcaagccccctgttcccctag

SEQ ID NO: 249193 - RNA, 1002 nt, synthetic construct
  misc_feature 1..1002: note = Description of Artificial Sequence: Synthetic coding sequence
  source 1..1002: mol_type = other RNA
atgtccgctccaccattctacagagccctgtcgtctgtggttgccctgggggccaacatcatctgcaataaaatccctggactggccccaaggcagagagccatctgtcagagccgcccagacgctattattgtcatcggcgaaggagcccagatgggcattaatgagtgccaataccaattcagatttggacgatggaattgctccgccctgggagagaaaaccgtattcggacaagagctaagggtgggatccagagaagccgcatttacttacgccattaccgcagccggcgtcgcacacgctgtcactgcagcttgctctcaaggcaacctttctaactgcggctgcgatcgagaaaaacagggttattacaatcaggcagaaggctggaaatgggggggctgctccgccgatgtgaggtacggaattgacttttctagaaggttcgtagatgcacgggaaatcaaaaaaaacgctcgcaggctgatgaacctgcataacaacgaggccggtcgcaaagttttggaggacaggatgcaattagagtgcaaatgccacggagtgtctggatcatgtaccacaaaaacatgttggacgacactgccgaaattcagagaggtcggtcacttactgaaggagaaatataacgccgccgtccaggtagaagtggtacgggcgtcccgcctgaggcaacctacgttcttacgaatcaagcagctccggtcataccaaaaacctatggaaaccgacctggtttacatcgagaagtcacctaattactgtgaggaagacgcagccaccggatctgttgggacacaggggagactgtgtaataggacctcaccaggagcagacggatgtgacacaatgtgctgtggccggggctataatacacaccaatatacaaaggtgtggcaatgcaattgcaaattccactggtgctgcttcgtgaaatgcaacacttgctctgaaagaactgaggtctttacatgtaaatag

SEQ ID NO: 249194 - RNA, 174 nt, synthetic construct; identical to SEQ ID NO: 248588
  misc_feature 1..174: note = Description of Artificial Sequence: Synthetic coding sequence
  source 1..174: mol_type = other RNA

SEQ ID NO: 249195 - RNA, 1119 nt, synthetic construct
  misc_feature 1..1119: note = Description of Artificial Sequence: Synthetic coding sequence
  source 1..1119: mol_type = other RNA
atgaacaagcggcgcctcctatacccaagcggctggctgcacggcccaagcgatatgcagggacttcttttctccaccctcctcctggccggcttggcccagttttgttgtagggttcagggcaccggcccccttgacactacccctgaaggaagaccaggagaagttagtgatgcacctcagagaaagcagttctgtcattggccctgcaagtgtccacagcagaaaccaagatgtccccctggcgtctctctcgtgagagacggctgcggttgttgcaagatctgcgcaaaacaaccaggcgaaatttgcaatgaggctgatttgtgtgatcctcataaaggcttatactgcgactactcagtcgaccggcctaggtatgaaacaggcgtgtgcgcttatcttgtcgctgtcggctgcgagtttaatcaggttcattaccacaacggccaagtttttcaacctaatccactcttctcctgtctctgcgtgtccggcgccatcggctgcaccccactattcattccaaaactggctgggtctcactgttcaggtgcaaagggaggcaaaaaatccgaccagagcaattgttcactcgagccactactccagcaattgagcacgtcctataaaaccatgcctgcctacaggaacttacctctgatctggaagaaaaagtgcctggtgcaagcaacaaagtggaccccttgttcccggacctgcggtatgggcatttccaatagggtcaccaatgagaattctaactgcgagatgagaaaagagaagagactgtgttacatccaaccatgtgactccaacatcctgaaaaccattaaaatacctaaaggaaaaacatgtcagcccacatttcaattaagcaaggcagagaaattcgtatttagcggctgtagttctacccagtcatataaacctactttctgcgggatctgcctggacaaacgctgttgcattcctaacaagtcaaagatgatcacgattcagttcgactgccccaacgagggttccttcaagtggaagatgctgtggataactagctgtgtgtgccaacgaaattgcagagaacccggcgacatcttctcagaactcaagattctctag

SEQ ID NO: 249196 - RNA, 996 nt, synthetic construct
  misc_feature 1..996: note = Description of Artificial Sequence: Synthetic coding sequence
  source 1..996: mol_type = other RNA
atgaaaatatctcgaggaagggtgtgtttagagagtgagaacaaggacgctggtgtcgcaggaagaaaacagttctgccactggccatgtaagtgtccccagcagaagcctaggtgtccgccaggagtgagccttgttagagatggctgcggatgttgtaagatttgcgcgaagcaacctggcgagatatgtaacgaagctgatctgtgcgacccacacaaaggactctattgtgattactccgtcgatcggccacgatacgaaaccggagtttgcgcatgtaaatccgtaggctgtgaatttaatcaggtacattatcataacggtcaggtgtttcagcctaatcccctattttcttgtctgtgtgtcagcggcgcaatcggatgcacccccctctttatccccaaattggccggatcccattgcagcggtgctaaaggcgggaaaaagtccgatcagtctaattgctctctggagcctctcctacaacagctgtccacctcctataagacaatgcccgcctatcgcaacctacccttgatttggaagaaaaaatgtctggtccaggcaacaaagtggaccccatgctctcgcacctgcggtatgggtatttccaacagagttaccaatgaaaacagtaattgtgagatgagaaaggagaagcgattatgctatatacagccctgcgactcaaacatcctcaaaacaattaaaattccaaaaggtaagacatgccagcccacattccagctcagtaaagcagaaaaatttgtgtttagtggatgcagttctactcagtcatacaaaccaactttttgtggaatctgcttagataaacgctgctgcattccaaataaatccaaaatgattactattcagttcgactgtccaaacgaaggctcatttaagtggaaaatgctatggattacatcttgtgtttgccagaggaactgtagagaacccggagatatattcagcgagttgaaaattctgtag

SEQ ID NO: 249197 - RNA, 1065 nt, synthetic construct
  misc_feature 1..1065: note = Description of Artificial Sequence: Synthetic coding sequence
  source 1..1065: mol_type = other RNA
atgcaaggtttgctgttttctacactgctgctggcaggattagcacagttctgttgccgcgtgcagggtacgggaccattagataccactccagaaggacggccaggtgaagttagtgacgcgccccaacgaaaacagttctgccactggccgtgtaagtgcccccagcagaagccgagatgcccccccggcgtgagcctggtccgcgacggatgtggatgctgcaaaatctgtgcgaagcaaccaggagagatctgtaacgaagctgatctgtgtgacccgcataaagggctctactgcgattatagcgtagaccgacctagatacgaaaccggagtgtgcgcatacttagtggcagtagggtgtgagtttaaccaggttcactaccataacgggcaggtgttccagccaaaccctttgttttcatgcctttgtgtcagcggcgctatcggttgtacacccttgttcataccaaagctggccggttctcattgctccggggcgaagggagggaaaaaatccgaccaatctaactgctcacttgaaccgctgcttcaacaactgtccaccagctataagacgatgcccgcttaccgtaacttacctcttatatggaagaaaaagtgcttagttcaagccaccaagtggaccccctgttcgcggacctgcgggatgggaatatcaaacagagtgacaaacgaaaactccaattgcgaaatgagaaaagagaaacgcctgtgttacattcagccctgtgacagcaatattctgaaaactataaagattcccaagggtaagacctgccagcccacatttcaactttcgaaggccgaaaagtttgtcttctccgggtgtagttccacacagtcttacaagccaactttctgcggcatttgcctggacaagcggtgctgcatccctaataagtcaaagatgattacgatacagttcgattgccccaacgaaggctcattcaagtggaaaatgctgtggataacaagctgcgtgtgccaacgcaattgcagagaacctggtgatatttttagcgaattaaaaattctttag

SEQ ID NO: 249198 - RNA, 693 nt, synthetic construct
  misc_feature 1..693: note = Description of Artificial Sequence: Synthetic coding sequence
  source 1..693: mol_type = other RNA
atgcagggccttctgttttctacactccttctagcgggattggctcagttctgctgtagagtgcaggggaccggacccttggacacaacccctgagggaaggcccggcgaagtgagtgatgctccccaacgaaaacagttctgtcattggccatgtaagtgccctcagcaaaagccccggtgtccaccaggcgtatctttagtgcgggacggatgcggatgctgcaaaatttgcgctaaacagcccggcgagatctgcaatgaagccgacctgtgcgaccctcacaaaggcctttattgtgactattctgtagaccggcccaggtacgaaaccggcgtttgcgcctatttagtcgccgtgggctgtgagtttaatcaggtgcactaccataatggtcaggtattccaacccaacccactcttctcttgtctctgtgtctccggtgcaataggctgcactccgctctttatccctaaactcgcaggaagccactgtagcggcgcaaaaggcgggaaaaaaagtgaccagagtaactgctctttggagcccctgctgcagcaactttctacttcctacaaaacaatgccagcttatcggaacttgcccctgatttggaaaaagaacgttctctgcaaacaacaaaatggcctgccagcccctgaacacgttggatgggaatatcttacgggctag

SEQ ID NO: 249199 - RNA, 393 nt, synthetic construct
  misc_feature 1..393: note = Description of Artificial Sequence: Synthetic coding sequence
  source 1..393: mol_type = other RNA
atgggcatctctaaccgagtaacaaatgagaattccaattgcgagatgaggaaagagaagcgattatgttatattcagccgtgcgattctaatatccttaagacgataaaaattccaaagggcaagacatgtcagcctacctttcaattatccaaggcagaaaagtttgtgttttccggatgttcatctacccaaagctataagcccacattttgcggcatttgccttgacaagcggtgttgcattcctaacaagagtaaaatgattacaattcagttcgactgccccaatgagggctcattcaaatggaagatgttgtggattacttcttgcgtctgtcagcgaaactgccgcgaacccggggacatcttttcagaacttaaaattctctag

SEQ ID NO: 249200 - RNA, 462 nt, synthetic construct
  misc_feature 1..462: note = Description of Artificial Sequence: Synthetic coding sequence
  source 1..462: mol_type = other RNA
atgtaccgcatgcaactgctctcctgtatagctctctctctcgcactcgttaccaactccgctcccacatcttcgtcgaccaagaaaacacagctgcagctagagcaccttctgcttgacctccagatgatcttgaacgggatcaacaactataaaaatccaaaactcacaaggatgcttacatttaaattttacatgccaaaaaaagccactgaattgaaacacctgcagtgcctggaggaagagctgaagcctcttgaggaagtattgaacctggcccagtccaaaaactttcatctgcggccccgggatctcataagtaatatcaatgtcattgttctcgagctcaaaggcagcgaaaccacctttatgtgcgaatatgctgatgaaaccgctaccatcgtggaatttctgaatcgttggatcaccttttgtcagagtattatctcaacccttacttag

SEQ ID NO: 249201 - RNA, 984 nt, synthetic construct
  misc_feature 1..984: note = Description of Artificial Sequence: Synthetic coding sequence
  source 1..984: mol_type = other RNA
atgtttccttctagacgcaaggctgcccagctcccctgggaggacggccgatcagggttgctgtctggtggacttccccgcaaatgttccgtgtttcatctgtttgtcgcctgcctttcgttgggctttttctccctgctctggttgcagctgagttgcagcggggatgtggcccgcgccgttcggggtcaaggacaggaaaccagcggcccccctagagcttgtccacctgaaccccctccggagcactgggaagaggatgcatcttggggaccccatcgtctagctgtcctagtccccttcagagaacgcttcgaagagctgcttgtgttcgtgccgcacatgcgcagattcctcagtcgaaaaaaaattcgtcatcacatttacgttctgaatcaagtggaccatttcaggtttaacagagctgccctgattaacgttggatttcttgaatcctccaactcaacagactacattgcaatgcatgatgttgatctccttccattgaatgaggagctcgattatggatttcctgaggccggcccttttcatgtcgcatccccagaactgcatccactctaccattataaaacctatgtggggggcatcttgttactgagcaagcagcattataggctgtgtaatggaatgagtaataggttttggggctggggaagagaagacgacgaattctacaggcgaatcaagggcgctggactgcagttattccgtccatctggtataaccactgggtacaaaacctttaggcacttacatgaccctgcctggagaaaacgagatcaaaaaaggatagccgcacagaagcaggaacagttcaaggtggatcgagaagggggtctcaatactgtcaaatatcacgttgcatctaggacagctctgagcgtaggtggggccccctgtaccgtgctcaatattatgctcgattgtgacaaaactgcaacaccatggtgcactttctcttag

SEQ ID NO: 249202 - RNA, 2598 nt, synthetic construct
  misc_feature 1..2598: note = Description of Artificial Sequence: Synthetic coding sequence
  source 1..2598: mol_type = other RNA
atggttgcaagcgctagagtgcagaaactagtgagaaggtacaaactagctatcgccacggctttagccatcttactgctgcaaggactcgtggtttggtcattctcagggctggaagaggatgaagcaggggaaaaaggccggcaaagaaagccgagacccctggaccccggagaagggagtaaagatacggactcctctgcagggaggaggggctcaactggcaggaggcacggacgctggagaggcagggccgagagcccaggcgtgccagttgccaaagtagtccgagccgtaaccagccgacagagggcaagtcgacgcgtgcctcccgcccccccacccgaggccccagggaggcagaatttgtctggcgcagcagccggagaggctttagtcggcgccgccggatttccacctcacggtgatacaggctccgttgagggtgcgcctcaaccgacagacaacggctttacacccaagtgcgagatagtcggaaaagatgcactctccgccctcgcaagggccagcaccaagcagtgccaacaggaaatcgccaatgttgtgtgccttcatcaagcaggtagcctgatgcctaaagcagtcccacgacactgtcagttgaccggtaagatgagccccggtatccagtgggatgagtctcaagcacagcaaccaatggatggaccccccgtgagaatcgcttacatgctcgtcgttcacgggagagccattcgacagctcaaacggctgctgaaagccgtctaccacgagcagcacttcttctatattcacgtcgacaagcgctccgattacttacaccgcgaggtcgtagaacttgcccagggttatgacaatgtcagagtgacaccctggcgcatggttactatttggggaggcgcttccttactgcgcatgtatctgaggagtatgcgggacctccttgaagtgccaggatgggcgtgggacttcttcattaacttaagcgccactgactaccctacaaggacaaatgaagagctggtcgcctttctgtccaagaaccgagacaaaaactttcttaagtcccacggacgcgacaattcaagatttatcaaaaaacagggcctagacaggttatttcacgaatgcgactctcacatgtggcgactgggagagaggcaaattccggctggaattgtggtggatgggggtagtgattggttcgtccttaccaggtcatttgtggaatacgtggtctacactgacgacccactggtggcccaattacggcagttttatacctataccctcctcccggctgagagtttctttcataccgtgctcgagaacagcctggcctgtgagacccttgttgataataatttacgggtcacaaattggaacaggaaattaggatgtaaatgtcaatacaagcatattgtggattggtgtggctgctccccaaacgactttaaaccccaagactttctccgactgcaacaagttagccgccccacgttctttgccagaaaattcgagtcgactgtcaatcaggaggtcttagaaatccttgatttccacctgtacggatcttacccccctggcacccccgcactaaaagcatattgggaaaacacctacgatgcagcagacgggcccagcggtctatcagacgttatgttaaccgcctatactgcattcgcccgactttcactgcaccatgccgcaacagctgctccacccatgggaacccctctttgcaggttcgagcctagggggctcccctcaagtgtgcatctgtacttctatgatgaccacttccaagggtacctggttacacaggccgtccagccttctgctcagggtcccgctgaaacccttgagatgtggttaatgccccagggaagtcttaaactgctcggccgatcagaccaagcctcgcgtcttcagtcgttggaggtgggaacagattgggaccccaaggagagactatttaggaacttcggaggcctgcttggtcctctagacgaacccgtggccgttcagagatgggcaaggggacccaacctaactgcgaccgttgtgtggatagatcctacttacgtggtcgctacttcttacgacatcaccgttgacacagaaacagaggtcactcagtacaagcccccactttctaggccactgcggccagggccttggaccgtgcgccttttacagttctgggaaccactaggtgagactcggttcctcgtgctccccctgacctttaaccgaaaacttccccttagaaaggacgacgcatcctggttacacgccggccctccccacaacgaatatatggaacagagttttcaggggttatcgagcattctgaatctccctcagcccgaactggctgaagaagccgctcagagacacactcaattaactggccctgcgttggaagcttggacggaccgggagctgagttccttttggtctgttgccggcctgtgtgctattggcccttctccttgtccttctctagaaccctgtcgccttacatcctggagtagcctgagtccggacccaaaaagcgagcttggccctgtgaaagccgatggaaggcttcgctag

SEQ ID NO: 249203 - RNA, 1503 nt, synthetic construct
  misc_feature 1..1503: note = Description of Artificial Sequence: Synthetic coding sequence
  source 1..1503: mol_type = other RNA
atgatcattagtcattttcctaagtgcgtggccgtattcgccctgctggcactgagtgtcggtgccctggacacattcatagcagccgtttacgagcatgccgtcatcctgcctaatcgcactgaaaccccagtcagcaaagaggaagcactactgctcatgaataaaaacatcgatgtgctcgaaaaagccgttaaactggccgcaaagcagggggctcatataattgtaacacctgaagatggaatatatggatggatctttacacgggaatcaatttacccatacctagaagacattcctgatccaggcgtcaattggatcccttgcagagacccgtggaggttcggtaacacacctgttcaacaaagactgtcatgtttggcgaaagataatagcatctacgtcgtcgctaatatcggagataagaagccctgcaacgcttccgattcccagtgccctccagacggcagataccaatataacacagacgtagtattcgattcccagggtaaactgctagctaggtaccataagtacaatctgttcgcccccgagattcaatttgatttccctaaggactcagaactggtgaccttcgataccccttttggcaaattcggaatttttacatgctttgatatcttttcgcacgatccagcagtcgttgttgttgatgagtcgatcgattctattctgtaccccacagcctggtataataccttgcctctgctctccgccgtgccgttccactccgcctgggcgaaggcaatgggagtcaatctcctcgccgcaaacacccataatacttctatgcacatgacaggatcaggaatctatgcaccagaagccgtcaaggtttaccattatgacatggaaactgaatccgggcagctgttactgtccgaattgaaatcccgcccacgccgagagcctacctatcctgccgcagtggactggcacgcttatgcctcaagtgttaagccctttagttcagagcagagcgacttcctcggtatgatttacttcgacgaatttacctttacgaaactgaaacgcaataccggtaattataccgcatgccaaaaagacctgtgctgtcacctgacatacaagatgagcgaaaagcgaacagatgagatatatgccctgggcgcttttgacggacttcacacagtagaggggcagtactatctccagatttgtgccctattgaagtgccagactaccgacctggaaacctgcggcgaaccagtgggatccgcatttaccaagtttgaggacttttctttgtccggcaccttcggaactagatatgtgttcccccagatcatcctgtctggctcccagttggctcccgaacgtcactacgagatatccagggacggtcgcttgagaagtagatcaggggcccccttacctgtcttagttatggcattatatggacgcgtttttgaaaaagaccccccacgcctggggcagggaagcggcaaattccaatag

SEQ ID NO: 249204 - RNA, 10704 nt, synthetic construct
  misc_feature 1..10704: note = Description of Artificial Sequence: Synthetic coding sequence
  source 1..10704: mol_type = other RNA
atggaaacatgtgattcacctcctatcagccggcaagagaatggccagtctacaagcaagctatgtgggacgacccagcttgataatgaggtgcccgaaaaggttgcaggaatggaacccgatcgagagaattcttctaccgacgataacttaaagactgatgaaagaaaatcggaggccctgctcgggttcagtgtggaaaacgcagccgccactcaggtcactagtgctaaggaaatcccgtgtaatgaatgtgccactagctttccatcccttcaaaagtatatggaacaccactgccccaacgcacgcctgcctgttcttaaagacgataacgaatccgaaatctcagagctagaggacagcgatgtggaaaacttaactggagaaattgtgtatcagccagatggctctgcatatattattgaagacagcaaagaaagcggccagaacgcccaaacaggcgccaacagcaaactcttctccaccgcaatgtttttggactcattagcctccgcaggggagaaatctgaccagtctgcctcggctcctatgagcttctaccctcagattatcaacacatttcatatcgcgagttccttgggaaaacccttcactgccgatcaggcttttccaaatacaagcgccttagcaggcgtgggacccgtgctgcatagctttagggtttatgaccttcgccacaagcgagaaaaggattacttaacatctgacggatctgccaaaaatagctgcgtgtcaaaggacgtgcctaataatgtggaccttagtaaattcgatggctgcgtgtctgatggtaagagaaaacccgtcttaatgtgtttcctgtgtaaattatcttttggatatatccgcagcttcgtaacacatgccgtccacgaccatagaatgacattgaatgacgaagaacaaaagctgcttagtaataagtgtgtgagcgccataatacagggaattgggaaagataaagagccactcatttcattcctggagcctaagaagtccacctccgtctacccccacttcagcacaaccaatcttatcggacccgatcccactttcagagggctgtggtccgcttttcacgtcgagaatggtgactcactgccagccggattcgcttttcttaagggctccgcatcaacctcgtcctccgcagagcagcccctgggcatcacccagatgcccaaagccgaagttaatctgggggggttgtccagcttggtagtgaataccccaatcacgagcgtgagtctgagtcactcttccagtgaatccagtaaaatgagtgaatctaaagatcaggaaaataactgtgagcgtcctaaagagagcaacgtgttgcacccaaatggtgaatgccctgttaagtccgaacctaccgagcccggcgacgaagatgaagaggatgcctattcgaatgagctcgacgatgaagaagtgcttggagagttgacagactccatcgggaataaagacttcccacttttaaaccagagcataagtcctttgtcatccagtgtattgaagttcattgagaagggaacctcttctagctcagctacagtctccgatgatacagaaaagaagaaacagacagccgcagtgagagcatccggcagtgttgcttccaattacggcatttctggtaaagatttcgcagacgcatcagcctccaaggacagtgccactgctgcgcacccctcagagatagcccgaggcgatgaagatagcagcgcgacaccacaccagcatggattcacaccatccacaccgggaactccgggccctggtggggatgggtcacccggcagcggaatcgaatgccccaaatgtgacacggtactgggaagctccaggtcgctgggcggccacatgacaatgatgcacagtcggaattcatgcaaaactttgaagtgcccaaaatgcaactggcattataagtaccaacagacactagaagcgcacatgaaagaaaagcatccagaaccaggaggctcttgtgtatattgcaaaacaggtcagcctcatccacgcttagcacgcggcgagtcttacacctgcggatacaagcctttccgctgcgaggtctgcaactattctactactaccaagggaaatctttcaatccatatgcaatccgacaaacacctgaacaatgtccaaaacttacaaaacggaaatggggaacaagttttcggccacagcgctccagcccccaacacttctctttcaggttgtggaacgccctctccatcaaagcctaagcaaaagcccacatggcggtgcgaggtgtgcgattacgaaaccaatgttgcacggaacctccgaattcacatgacttccgagaaacacatgcacaatatgatgcttctgcaacagaatatgaagcagattcagcataacctccatctaggactggcaccagcagaagcagaactgtaccagtactacctggcacaaaacatcggcctcactggaatgaagcttgaaaaccccgcggacccccaactcatgatcaacccctttcaactggatccggccaccgccgcagcactagccccaggtctcggagagttgtcaccctatatttctgacccagccttaaaactatttcagtgtgccgtgtgcaacaaattcactagtgacagtttagaagccctgtcagtgcacgtcagctctgaacgcagcctgccagaggaagaatggcgcgcagtcatcggagacatttaccagtgcaaactgtgcaactacaacacccaacttaaggctaactttcagttgcactgcaaaacagataagcacatgcagaagtatcagctcgtagctcacataaaagaaggaggcaagtcaaacgagtggcgcctgaaatgtatagcgatcggcaaccccgttcatttaaaatgtaacgcatgtgactattacacaaactccgtcgacaaattgaggttacacactacaaatcatagacatgaagccgctcttaaactatataagcatctacagaagcaggaaggcgctgttaaccccgaaagttgctactactactgtgcagtgtgtgactatactactaaagtgaagctgaatctggtgcaacacgtcagatcagtgaaacatcaacagaccgaagggcttagaaaactgcagctccaccaacagggtttggcccccgaggaagataatttgtcggaaatcttctttgttaaagactgccctccgaatgaactggagactgcttcattaggggcacgaacatgcgatgacgatttgaccgagcaacatgaggaagccgaaggagcaatcaagccaacagcagtcgcagaagacgacgagaaagacaccagtgagcgcgacaacagtgaaggaaagaactctaataaggactcagtgagtgtggccggcggcactcaacctttgctccttgcaaaagaggaggatgttgctactaagaggagtaagcctacggaggataataagttttgccatgagcaattttatcaatgcccatattgtaactataattccagagaccagagcaggattcaaatgcatgtgctgtcccagcactccgtacagcccgtgatctgttgccctctctgccaggacgtgttaagcaataaaatgcacttgcagctgcacctaactcatctccattcagtgtccccagattgtgtagaaaagttgctgatgacggttccagtcccagacgtaatgatgcctaactccatgctgctgcctgctgcagcctccgagaaatcagagcgggatactccagccgccgtgacagccgaaggatctggcaagtatagtggcgaaagtcccatggacgataaaagcatggccggtctagaagattccaaagccaacgtcgaggtgaaaaacgaggagcaaaaacccactaaagaaccgctggaggtctccgaatggaacaagaatagctccaaggacgtgaaaatccctgataccttacaagaccagttaaatgaacagcagaagcgccagcctctgagcgtgagcgacagacatgtctataagtaccgttgtaatcattgctcactagcgttcaagacgatgcagaaattgcaaatacactcgcagtaccacgcaattagagcagctaccatgtgtaatctgtgccaaagatcctttcgaacttttcaagcactcaaaaagcaccttgaggccggacatccagaactctcagaggcagagctccaacaactatatgcgtcattaccggtgaacggggaattatgggcagaaagcgagacaatgagtcaagatgaccacggcctggaacaggagatggagagagaatacgaagtagatcacgagggtaaagctagccctgtgggaagtgatagttccagcattccagacgatatgggaagcgaaccaaaaagaacactgccttttcgcaaggggcccaatttcacaatggagaaattcctggacccaagcaggccatataaatgtacggtgtgcaaagagtcttttacccaaaagaacatactgctggtccattacaacagtgtctcacacttacataagctcaaaaaagtattacaggaagcctccagcccagtgccacaggagactaactcgaacactgataataagccctacaagtgtagtatttgcaacgtcgcctactctcaatccagcactctcgaaatccacatgaggagcgttctccaccagactaaagcaagagcagccaaacttgaaccaagtggacatgtggccggcggtcacagcatagctgcaaatgttaattctccggggcagggaatgcttgattctatgtcactcgccgccgtcaatagtaaagacacacacctggatgccaaagaattaaataaaaagcagacccccgatctcatcagtgcccagcccgcccatcatccaccccaatctcccgctcagatccagatgcagttgcagcatgaactccagcaacaagccgcctttttccaacctcagtttctgaaccccgcattcctgccccacttcccaatgacccctgaggccctcttgcagttccagcaaccccagttcttgttccctttttacatccccgggacagagttttcattaggccctgatttaggactgccaggcagtgccacctttggtatgccaggaatgacaggaatggccggaagcctcctcgaggacttgaagcagcaaatccagactcagcatcacgtcggacaaactcaactgcagatcctccagcagcaagcccagcagtatcaagccactcagccacagctgcaaccccagaagcaacaacagcagcccccaccaccccaacagcaacagcagcaacaggcatctaaattattaaagcaggagcaatctaatatcgtcagcgctgactgtcagattatgaaggacgttccaagttacaaggaggcagaggacatttctgagaagcccgaaaaaccaaagcaagaattcatcagcgaaggagagggactaaaggagggcaaggacaccaaaaagcagaaaagtctcgaacccagcataccacccccccggatagccagtggagccagagggaatgcggcaaaagccctcctggagaattttgggtttgaactggtcatccaatataatgaaaacagacagaaggttcagaaaaaggggaagtctggtgaaggagaaaataccgataaactcgaatgcggtacatgtggcaaacttttctctaacgtcctcattctgaaatcccatcaagaacatgtccacggccagtttttcccatacgcggcactcgagaaatttgctaggcaataccgagaagcctatgacaaactttaccccattagtccatcttcacccgaaaccccccctccgcctccccctccacccccactaccacccgccccgccacagcctagctcaatgggccctgtgaaaattcctaacaccgtgtccacgcccttgcaggccccacctcctaccccaccacctcctcctccgccgcccccccctccacctccaccaccccctccaccgcctcctagcgcccccccccaggtacagctccctgtaagccttgatttgccactgtttccctccatcatgatgcagcctgtacagcacccagccctgcctccacagcttgcccttcaactaccacaaatggatgctctatcagctgatcttactcagctgtgccagcagcaattaggcctcgacccaaactttcttcgacacagccagtttaaacgccccaggactaggattaccgatgatcagctgaaaattctacgggcctacttcgatattaacaacagcccctcagaagaacagatccaagagatggccgagaagagcgggttgagccagaaagtgatcaagcattggttcaggaacacactcttcaaggaaaggcagagaaataaagactccccatataacttttctaacccccctattaccgtacttgaggacattaggatcgaccctcagccgacttctttagaacattataaatcagacgcttcatttagcaaaagatcttcgcggacccgattcaccgattatcaactccgagtgctacaagacttttttgataccaacgcctatcccaaggatgacgaaattgagcagctgagtacagtgctgaacctgccaacacgcgtgattgtggtctggttccagaacgcacgccagaaagcaagaaaatcgtatgaaaatcaggccgagaccaaagataatgaaaaaagagaactgaccaatgaacgttatattcgcacctccaatatgcagtaccaatgtaaaaaatgcaatgtggtttttccaagaattttcgatctcataacacatcagaagaaacagtgctacaaggatgaggatgatgatgcacaggacgagtctcaaacagaagattcaatggacgcaactgaccaggttgtgtacaagcactgcaccgtgtccggccagactgatgcagcaaaaaatgcggccgcgcctgccgccagcagcgggagcggaaccagtactccactcattccttcgccaaaacccgaacccgaaaagacatcccctaagcccgagtacccagcggaaaagccaaaacagtccgatccaagcccaccatcacagggaactaaacccgcccttcccttagccagtacatcctccgacccccctcaggccagcactgcacaacctcaaccccaaccacaacctccgaagcagccacagcttatcggtaggcccccctcagcttcacaaacccctgtcccttcatcccccctgcagatcagtatgacttctctccaaaatagcctcccaccgcagctcctccagtaccagtgtgaccaatgcaccgtggcttttcctacgttagaactgtggcaggaacaccagcacatgcactttctcgccgctcaaaatcaattcctgcactctccctttctagaacgcccaatggacatgccgtacatgatctttgatccaaataaccctctcatgaccggacagttacttggttcttctctcacacagatgccgccacaagctagcagtagccatacaaccgctcccacaacagttgccgcttccttgaagagaaagctggacgataaggaagataataattgcagtgagaaagaaggcggaaactcaggggaagaccaacacagggacaaacgcttgagaacaacaattactcctgaacaactagaaatcctgtacgagaagtatctgttggattccaaccccacaagaaaaatgttggatcacattgccagagaagtgggcctgaagaaaagggtcgttcaggtctggtttcagaatacgcgcgcccgcgaacgaaagggccagtttagagcagtcggtccagcccagtcccacaaaagatgccctttctgtcgcgccctcttcaaagcaaaatctgcgctggagtcccacattaggagtcggcattggaacgaaggtaagcaggcaggatactctcttcctccatcaccacttatttccaccgaagatggcggcgagagtccccagaaatacatctacttcgattatccatccttgcccctcaccaaaatcgacctctccagtgagaatgagttagcaagcactgtgagtaccccagtcagcaagacagccgaactatcccccaaaaacctcctgagtccctctagctttaaggccgagtgttcagaggacgtggagaacctgaacgccccacccgcagaggcaggttacgatcagaacaagacggactttgacgaaacatcctccataaacactgctatttccgacgcaactaccggagacgaaggtaacactgaaatggagtccaccaccgggagttcaggtgatgtgaaacctgccctttcaccaaaagagcccaaaaccttggatacacttcctaaacctgccactaccccgaccaccgaagtatgcgacgataagttcctgttctcgctcacctcacccagcatccatttcaatgacaaagacggcgatcatgaccagtcattctacatcaccgacgatcccgatgataatgcagatcgatccgagacatcttctattgctgatccctcatcaccgaacccatttggatccagcaacccttttaaaagtaagtcaaacgataggcctggccataagcgattcagaacccaaatgagcaatctccaattgaaagttctcaaggcgtgtttcagcgattacagaacccctacaatgcaggaatgtgaaatgcttgggaacgagattggtctgcctaaaagagtggtgcaggtgtggttccaaaatgctagagccaaggaaaaaaagtttaagattaatataggtaaaccatttatgattaaccagggagggaccgagggcaccaaacccgagtgcacattgtgcggcgttaagtactctgctcgtctgagcatcagagatcacatattcagcaagcagcatataagcaaagtgagagagacagtgggatcacagctcgacagggagaaagattatctggcccctactacagtccggcaacttatggcccagcaagaactcgacaggattaagaaggcctctgacgtgctcggtttgacggtgcaacagccaggcatgatggattcaagcagcttacacggaatcagcctccctacagcttacccaggcttgcccgggctcccaccggtcctactacccggcatgaacggccccagttccttgcccgggttcccccagaactccaatattgcatcaggcatgttaggatttcctacaagcgctacctcctctcccgccctgagcctctcttcagctcccaccaagcccctgctgcagaccccccctcctcccccacccccccccccaccacccccatcctccagcctttccggtcagcagacagagcagcagaacaaagagtcagaaaaaaaacagaccaaaccaaacaaagtgaaaaagataaaggaagaggagttagaagcgacaaaaccagagaaacacccgaagaaggaagaaaaaattagtagtgccttatccgtcctgggaaaggtggtcggcgagacccatgtggatccaattcaactacaggcactgcagaatgcaatagcaggagatccagcctcctttattgggggccagtttcttccctactttatccctggattcgcctcctactttaccccccagctccccggcacagtccaaggagggtattttccacccgtctgcgggatggaatcactgtttccatacggcccaacgatgcctcagacactggctggattatctccaggcgccctacttcagcagtatcagcagtatcagcagaacttgcaggaaagtcttcagaagcagcaaaagcagcagcaggagcagcagcaaaaaccagttcaagctaagacctccaaagtagagtcagatcagccccagaattcaaacgatgcctccgagacaaaagaagacaagagcaccgccaccgaaagtactaaagaagagccccaactggagtctaagtccgccgatttttctgacacttatgtggttccattcgttaagtatgagtttatttgtcgcaagtgccaaatgatgttcacagatgaggatgccgctgtgaaccaccaaaagtccttttgctacttcggacaacctctgatagacccccaggagaccgtgctgcgcgttcctgttagtaagtaccaatgcttggcatgtgacgtggccatatctgggaacgaggctctttcccaacacttacagtcttccctacacaaagaaaaaactatcaaacaggccatgcgaaatgctaaagaacatgtccgtcttctcccccacagcgtgtgttcccctaaccccaatacaacctctaccagccagtcagccgcatcttcaaataacacctacccacacctgagctgcttcagtatgaagtcctggcctaacatcctatttcaggcatccgcccgacgagccgcgagcccccccagttcccctccctccctgtccttgccgagtaccgtcacttcaagcctgtgttccacatccggagtgcaaactagcctgcccacagagtcatgcagcgatgagtccgactctgagctgagccaaaaactggaggatcttgataactcacttgaagtgaaagccaaaccagccagtggcctcgatggtaatttcaatagcattcgtatggatatgttctccgtctag

SEQ ID NO: 249205 - RNA, 1821 nt, synthetic construct
  misc_feature 1..1821: note = Description of Artificial Sequence: Synthetic coding sequence
  source 1..1821: mol_type = other RNA
atgactctgctgacattcagggacgttgctattgaattcagcctggaagaatggaagtgtctggacctagcacagcagaacctctacagggatgtgatgttggagaactaccgtaatttattttctgtgggcctcaccgtctgtaagcccggattaattacatgtctcgagcaaaggaaagaaccttggaatgtcaagcgccaagaagccgccgacggacacccagaaatgggttttcatcatgccacccaagcgtgtctggagctgctgggatcgagcgacctgccggcctctgcaagccagagcgccggtataacaggcgttaaccatcgtgcacagcctgggctcaacgtgtccgtagataagttcacagcgatgtcttcccacttcactcaggatttgttgccagagcaggggatccaggatgcttttcctaaacgcatcttgcgtggctacggtaactgtggactcgacaatctgtacttgagaaaagattgggaaagcttagacgaatgcaaattacagaaggactataacgggttaaatcagtgcagctccaccactcatagcaagatcttccagtataataaatacgtaaaaatctttgacaacttttcaaatctgcacaggcgcaatatctcaaacacaggcgaaaagccatttaaatgccaagaatgcggtaagtcgtttcaaatgctctcattcctaacagaacaccagaagatccataccggcaagaagtttcagaagtgtggtgaatgtgggaagacctttattcaatgtagccatttcactgaacccgaaaacatcgacacgggggagaaaccttacaaatgccaggagtgcaataacgttattaagacttgctctgtattaaccaaaaaccgaatttatgccggaggcgagcattacagatgcgaggagttcggaaaagtgttcaaccagtgcagccatttaactgaacatgagcatggtacggaagaaaaaccatgtaagtacgaggagtgttcaagcgtgttcatctcctgttcgtccttaagtaaccagcaaatgatattggctggggaaaaactctctaaatgcgaaacatggtataaaggatttaaccactctcccaacccgtcaaagcaccagcgaaacgagattggcggaaagccgtttaagtgcgaagaatgtgattccatcttcaaatggttctccgatctgacgaagcacaaaagaattcacacaggagaaaaaccttataagtgcgacgagtgcggcaaggcttatactcaatcatcacatctgagcgaacatcgacgcatacatacaggagaaaaaccataccagtgtgaggagtgcggcaaagtgttccggacatgtagcagtctgtccaatcacaaacgaacccattcagaagaaaagccctacacttgcgaagaatgtggtaacattttcaaacagttgtctgatcttaccaagcacaaaaaaacccatacgggtgaaaaaccctacaaatgcgacgaatgtggcaaaaactttacccagtcgtccaacctgatcgtccacaaacggatccatacgggggagaaaccatacaagtgtgaagaatgcggcagggtgttcatgtggttctcagacatcactaaacacaagaaaacccatactggagaaaaaccgtataaatgtgacgaatgtggcaagaatttcacccagtccagcaacctcattgtccataaaagaatacacaccggagaaaaaccttacaaatgcgagaaatgcggaaaggctttcactcagttcagtcaccttacagtccacgagtcaatacacacatag

SEQ ID NO: 249206 - RNA, 3804 nt, synthetic construct
  misc_feature 1..3804: note = Description of Artificial Sequence: Synthetic coding sequence
  source 1..3804: mol_type = other RNA
atgggcgatatgaaaacacccgactttgacgatttactggctgcttttgacatcccagacccaacttcactagacgctaaagaggcaatacaaacacccagcgaggagaatgagtcaccccttaagccacccggcatttgtatggacgagtccgtgagcctcagccattccggaagcgcaccagatgtgccagcagttagcgtcatcgtcaaaaacacttctagacaggaatcatttgaggccgaaaaagaccatatcacaccatctctcctgcataacggattccgagggtctgatctgccacctgatccacataactgcggcaagttcgactctaccttcatgaatggggactccgcccgatcattccctggaaagctggaacccccgaaatctgaacctctgccaacattcaaccagtttagccctattagctcacctgagcctgaggaccccattaaagataacggctttggcattaaacccaagcatagcgactcttatttcccccccccgttaggctgcggagctgtgggcgggcctgtcctggaggcgttagccaagtttcccgttcccgagcttcacatgttcgaccacttctgcaagaaggaacctaaaccagagccattgccactcgggtctcagcaagagcacgaacagtccggacagaacacagtggagcctcataaggatcctgacgctactcgttttttcggcgaagcactcgaattcaactcacacccgagcaatagtataggagagtcaaaaggcttagctcgcgaattgggaacctgttcctcagtccctcctcgacagcgacttaagccggcacactccaaactgtcttcatgcgttgcagcattagtagccctgcaggcaaagcgcgtggctagcgttaccaaggaggaccaaccaggccacacgaaggacctgagcggacccacaaaggaaagctcaaagggttcaccaaaaatgcccaagagtcctaaatccccccgttcaccactcgaggccacccgcaaatcaattaagccaagcgatagtcccagaagtatctgttctgattcctcctctaagggctcaccatccgtggccgcttcttcccctcccgccatccctaaagtacgtattaaaaccatcaagaccagctctggcgagattaaaagaaccgtgaccagaattctccctgaccccgacgacccctccaaaagtcctgtcgggagtccactgggatccgcaatagctgaagccccatctgaaatgcctggcgacgaagtgcccgtagaggaacacttccccgaggctggtactaacagcggatcaccccaaggagcgcgtaagggcgatgaatctatgaccaaggcctccgactcatctagcccgtcctgttcatccggccccagagtgcctaaaggagccgccccaggctcacagaccggcaagaagcaacagtctacagcactgcaggcctctacactggccccagccaatttgctgcctaaagcggtccatctagccaacctgaatctcgtgccacacagcgttgcagcgagcgtgaccgccaaatcctccgttcaaagaaggtcccagccccagttaacccagatgtctgtgccattagtccaccaggtaaagaaggctgcccccctgattgtggaagtgttcaacaaggtcttgcactcctcaaatccagtacccctatatgcccccaatttatccccccccgccgactctcggatacatgtcccagcctctggttactgttgtctcgagtgcggtgacgcctttgctcttgagaagagtctgtctcagcactatggtcgtcgctctgttcatattgaagttttgtgtactctgtgtagcaaaaccctgttattcttcaacaaatgtagcctgctaagacacgctcgagaccataagtccaaaggccttgtgatgcagtgcagtcagctattagtgaaaccaatcagcgccgatcagatgttcgtgagcgccccggtgaacagtacagccccagccgcaccagccccaagttcaagtccaaaacatgggctcacctcaggtagtgcatctccgccacctcccgcactaccgctatacccagatccagtacgcctaattaggtattcaataaagtgccttgagtgtcacaaacagatgcgcgactacatggtgctagctgctcactttcagaggaccacggaggaaacggagggcctgacatgtcaggtgtgccaaatgctgcttcccaaccagtgctctttctgcgcccaccagagaattcatgcccacaagtccccttactgttgccctgaatgcggtgttctgtgccgctctgcatattttcaaacgcacgtgaaagaaaattgtctgcattacgcccgaaaagtcggctataggtgcatccactgcggcgtagtgcatctcaccctcgcgctgctgaagtcccatatacaagaaaggcactgccaggtctttcacaagtgtgctttttgccccatggccttcaaaaccgctagctctaccgcggaccacagcgccactcagcaccccactcaaccgcatcggccttcccagctcatttacaaatgctcatgcgaaatggtgttcaacaaaaaaagacacatacaacagcacttttaccagaatgtcagtaagactcaggtcggcgtcttcaaatgtcccgagtgtcccctcctgtttgtgcaaaagcctgaattaatgcagcatgtaaagtccacacatggagtacctagaaatgttgacgaacttagcagcctgcaatcatccgccgacacatcctcttctcgtcctgggagtcgggttcccacagaaccaccagccacaagcgtcgcagcaagatctagttcactccctagtgggagatggggacgcccagaggcacaccgccgtgtggaagcacgccctcgacttcgtaatactggttggacctgtcaggaatgtcaggagtgggtgcccgacagggagagttatgtgagtcacatgaagaaaagtcatgggcgtactcttaaacggtacccatgtcgccagtgtgaacagagcttccatacccctaactcactaagaaaacacatcagaaacaatcatgacacagtgaagaaattctacacttgcggatattgtaccgaagactcccccagctttccaagaccttccctactagagtctcacatcagcctcatgcatgggatccggaacccagacctcagccaaacctccaaggttaagcctcccggcgggcactccccacaagtaaatcatcttaagcggcccgtttccggcgtgggtgacgccccaggaacaagtaatggagccaccgtctcaagcacaaaaaggcacaaatcactctttcagtgtgcgaagtgctcctttgccacggattcaggtctggaatttcagtcccacattccccagcatcaggtcgactccagcacggcccaatgtctactctgtggactctgctacacttccgcctcaagcttatcccgtcatttgttcattgttcataaggtacgcgatcaagaagaagaagaagaagaagaggccgctgccgccgaaatggccgtggaagttgctgagcctgaagaaggtagtggcgaggaggtgcccatggaaacgagagaaaatggtttagaagaatgcgctggcgagccgttatcagctgatccggaagcacgacgcctcttaggacccgccccggaggatgatggaggacacaatgatcattcacagccccaggctagtcaggaccaagattcacacacgttgtcacctcaggtttag

SEQ ID NO: 249207 - RNA, 2406 nt, synthetic construct
  misc_feature 1..2406: note = Description of Artificial Sequence: Synthetic coding sequence
  source 1..2406: mol_type = other RNA
atggacgaagacgagttcgagctccaaccacaggaacccaacagttttttcgacggaatcggggcggatgcgactcacatggacggcgatcagattgtggtggaaattcaagaagcagtgtttgtttcaaacatagtcgactcagacatcacggtgcataactttgttcctgatgacccagattccgtggtcattcaggacgttgtggaagacgtagtaatagaggaagatgttcaatgttccgatattctggaagaggcagatgtgagcgagaatgtgatcatcccagaacaggtgttggacagcgacgtcacagaagaagtgagcctcccacactgcaccgtcccagatgatgtcctggcctctgacatcactagcacatcaatgtctatgcctgagcacgttttgacttctgagtccatgcatgtgtgcgatattggtcacgtggagcacatggtgcatgattctgtcgttgaggccgagattataaccgaccctctgacttcagatattgtgagcgaggaagtattagtcgctgattgtgccccagaagcagtgatagacgcatctggaattagtgttgaccaacaagacaacgataaagcaagctgtgaggattatctcatgattagcctggatgatgctgggaagatagagcatgatggttcaaccggggtgacgatcgacgctgagtctgagatggacccttgcaaagttgatagcacatgccctgaagttattaaagtgtacatttttaaagctgaccccggcgaggatgacctgggcggcacagtagacatcgtggagtccgagcccgaaaatgaccacggagtcgaactgttggatcaaaacagctccattcgcgtgccaagagagaagatggtgtatatgactgtgaacgacagtcaacaggaggatgaagatctcaatgttgctgaaatcgcagatgaggtgtatatggaagtaattgtgggtgaagaggatgccgctgtggccgccgccgcggctgccgtgcacgaacagcaaatagatgaggatgaaatgaagacttttgtgcctattgcctgggctgccgcctatggaaataattccgacgggattgagaatcgcaatggcacagctagcgcactgcttcatattgacgagtcggccggattaggcaggttagcaaagcagaaacccaagaagaaacggagacctgacagcagacagtatcaaacagcaatcattattggtcccgatggccaccctttgacagtttatccatgcatgatctgcggcaaaaagtttaagagtcgcggctttctcaaaagacatatgaagaatcacccagaacacctggccaagaagaagtaccactgtacagattgcgattataccacaaataagaagatctcactccacaatcacctggagtcccacaagctgactagcaaagcagaaaaggctattgaatgcgacgagtgcggcaaacatttctcccacgccggagccctcttcacccacaaaatggttcacaaggagaagggtgccaataaaatgcacaagtgtaaattctgcgaatacgaaacagccgaacagggcctgctgaaccgacacttactcgcagtgcatagcaagaacttcccacacatctgcgtcgaatgtggtaaaggatttcgccacccatcagaactgcgaaaacatatgcgcatacacacaggggagaaaccctatcagtgccaatactgcgaatataggtcagccgactcttctaacctgaaaacccatatcaagacaaaacatagtaaagagatgccatttaagtgcgatatttgtttgcttactttttcagataccaaagaagtgcagcaacatactcttgttcatcaggaatccaagacccatcagtgtcttcattgcgaccacaaatcgagtaatagcagcgatttaaagaggcacgtgatctccgtgcacacaaaagattatccccacaagtgcgagatgtgcgaaaaaggcttccaccggccttctgagctgaagaaacatgtagcggtacacaagggaaaaaaaatgcatcaatgtagacactgcgattttaagattgccgacccctttgtgctgagcagacatattctcagcgtccatacgaaggatctcccctttagatgtaagaggtgtcgaaaagggtttcgccaacagaacgaattaaagaaacatatgaaaactcattctggtagaaaagtatatcagtgtgaatattgcgagtactccaccaccgacgcatccggctttaaacgacacgtcatttccatccacaccaaagattatccgcaccgttgcgaatactgcaagaaagggtttcgtcgacctagtgaaaagaatcaacatatcatgcgacatcataaagaggttgggttgccttag

SEQ ID NO: 249208 - DNA, 1176 bp, synthetic construct
  misc_feature 1..1176: note = Description of Artificial Sequence: Synthetic coding sequence
  source 1..1176: mol_type = other DNA
atggcctcccacaaactgttagttaccccgccaaaggccctcctgaagcccctatccatccccaaccagctgcttttgggcccgggaccctccaacctgcccccccggatcatggcggcaggaggtttacagatgatcggcagcatgtcaaaggatatgtatcagattatggacgaaatcaaggagggaatccaatatgtgtttcaaacacgcaatcccctgacattggtcatttcgggaagcggtcactgcgccctagaagccgcccttgtaaatgttctggagcccggagactcctttctggtgggcgcaaacggcatctggggacagcgcgcagtggacatcggggagaggattggcgctcgggtccacccgatgaccaaagaccccgggggccactacaccctgcaggaggtggaggaaggactggctcagcacaaaccggtgctgttgttcctcacccacggagagtcgagcaccggcgtgcttcagcccctcgacgggttcggcgagctgtgtcaccgatacaagtgcctcctattagtggacagcgttgccagcctcggaggaacacctctgtatatggatcgccagggcatcgatatcctgtatagcggttcccagaaggcgcttaacgcgccgcccggcacatcactgatctctttcagtgataaagcaaaaaagaaaatgtactcacgtaagactaaaccattcagcttttatctcgatatcaaatggctagcaaacttttggggatgtgacgaccaaccccgcatgtatcaccacaccatccctgttatttctctctactccctgcgggaatccctggcactgattgcggagcagggattagaaaattcgtggcgccagcatcgtgaggccgccgcatatctacatggtcggttgcaggccctcgggcttcagctcttcgtcaaggacccagcgttgaggctgccgacggtgacgacggtagctgtgccggccggatacgattggcgtgacatagtgtcatatgtaattgatcatttcgatatcgagatcatgggggggcttggcccgagcaccgggaaggtgctgcgcatcggtttactgggctgtaatgccacccgggagaatgtcgacagagtgacagaggcgctgcgagccgccctgcaacactgtccgaagaagaagctg

SEQ ID NO: 249209 - DNA, 1176 bp, synthetic construct
  misc_feature 1..1176: note = Description of Artificial Sequence: Synthetic coding sequence
  source 1..1176: mol_type = other DNA
atggcaagtcataagcttctggtcacaccccccaaagccttactgaaacctctttccattcccaatcaactgctcctcggccctgggccgagtaacctgcccccccgcatcatggctgccggtggactgcaaatgattggttccatgtccaaagacatgtaccagatcatggacgaaatcaaagaaggcattcagtatgtgttccagactcgaaacccactgacgctggtaatttcgggatctggtcactgtgctctcgaggccgcactggtcaatgttttggaaccaggcgattccttccttgtaggagcaaatggaatttgggggcagcgagccgtcgacattggggaaagaatcggcgcaagggtgcaccctatgacgaaagaccctggcgggcactacacactccaggaagtcgaggaaggtttagctcagcataagcccgtgttactcttcctgactcatggtgaaagctcgacgggggtgcttcaaccgttagatgggttcggcgagctgtgtcataggtataaatgtctcctcctggttgatagcgttgcctcacttggtggtaccccgctatatatggacaggcagggaatcgatatcctctacagtggatctcagaaggctttaaatgcgccgccaggcactagcctgatcagcttctccgacaaggctaagaaaaagatgtacagcaggaagaccaagcccttctccttttatctggatatcaagtggttggccaacttttgggggtgtgacgaccagccacgcatgtaccaccacactatccccgtcatctctctttattctcttagagagtccctcgccctcattgctgagcaggggctggagaattcatggagacaacatagggaggccgctgcttacttgcatggacgactccaggccctgggactgcagctatttgtgaaagacccagccctgaggctccccactgtcaccactgtggcagtccccgcagggtatgattggagggacatcgtgagttacgtgatcgaccacttcgatatcgaaattatggggggattaggcccttctactggcaaggtccttaggattgggcttctagggtgcaacgccacccgagagaacgtggatagagttacggaggctttgagggctgcactgcaacactgccccaagaagaagctg

SEQ ID NO: 249210 - DNA, 1176 bp, synthetic construct
  misc_feature 1..1176: note = Description of Artificial Sequence: Synthetic coding sequence
  source 1..1176: mol_type = other DNA
atggcgtcccataagctgctggtgaccccgccgaaggccctcctcaagccgctttcgatcccaaaccagctcctgctgggtccaggaccgagcaatctgcccccgcgcatcatggccgcaggaggactgcaaatgatcggatcgatgtccaaggacatgtaccagattatggacgaaatcaaggaagggatccagtacgtgttccaaactagaaatccactgaccctggtcatctcgggatcgggacattgtgccctcgaagccgccctggtcaacgtgctcgaaccaggagactcgttcctggtcggagccaacggaatttggggacaacgcgccgtggatatcggggaaaggatcggcgctcgcgtgcatccgatgaccaaggacccaggagggcactacacgttgcaggaagtggaagaagggttggctcagcacaaaccagtccttctcttcctgacccatggagaatcatcgaccggagtgcttcaaccacttgacggattcggagagctctgccacagatataagtgcctgctgctggtggacagcgtcgcctcccttggcggaactccgctgtacatggaccggcaaggaatcgacatcctgtacagcggaagccagaaagcgctgaatgcgcccccaggtacctcactgatttcgttctcagataaggcaaagaaaaagatgtactctcgcaaaaccaagccgttctccttctacttggacatcaaatggctggctaacttttggggctgcgacgaccagccgcggatgtatcatcacaccatacccgttatctcgctgtactcactgagagagtccctggccctcattgccgaacagggactcgaaaactcgtggcgacagcaccgggaggccgcagcctacctccatggaagattgcaggcactgggcctccagctgttcgtcaaggacccagcgctgcggctcccgaccgtgactacggtcgctgtcccggctggctacgactggagagatattgtgtcgtacgtgattgaccactttgacatcgagatcatgggtggcctgggaccctcgactggtaaggtgctgcgaattggcctcctggggtgtaacgcaacgcgcgagaatgtggatcgggtgacggaggcactgcgcgccgctttgcagcactgccccaaaaagaaactg

SEQ ID NO: 249211 - DNA, 1176 bp, synthetic construct
  misc_feature 1..1176: note = Description of Artificial Sequence: Synthetic coding sequence
  source 1..1176: mol_type = other DNA
atggctagccacaaactccttgtcacacctcccaaggctctcttgaagcccttgtctattcccaatcagctcctcctcggcccgggccccagtaatctcccacctcgaatcatggctgccggggggcttcagatgatcggctccatgagcaaagacatgtaccaaatcatggacgagatcaaggagggtattcagtacgtgttccagactcgcaatccactgactctcgtgatcagtgggtccgggcactgtgccctggaggctgccttggttaacgtgctcgaaccaggcgattctttcttggttggcgcaaacgggatctggggacaaagagccgtggatatcggtgagagaatcggtgctcgcgtccacccaatgacaaaggatcccggcggccactatactttgcaggaggtggaagagggtcttgcccagcacaagccagtcctgctgttcctgactcacggggaatcctctaccggtgttctgcagcccctggacgggtttggggaactgtgccataggtataagtgtctgctcctggttgacagtgtcgcctccctgggcgggacacctctgtacatggaccgacagggtattgacattctctacagcggatcccagaaggcactgaacgctccaccagggacgtctctcatcagcttcagcgacaaagcaaagaagaagatgtattctagaaagacaaagcctttcagtttctacttggacattaagtggctggccaacttttggggctgcgacgaccagccccggatgtatcatcatactatcccagtgattagcctgtactctctgcgggaatctctcgccctgatagctgagcagggtcttgaaaattcctggcgccagcatcgggaagcggcggcatatctgcacggccggctgcaggcccttgggttgcagctgttcgtgaaggacccagctttgcgcctgcctactgtcactaccgtggccgtacctgccggctatgattggcgggacattgtttcctatgttatagaccacttcgatatagagattatgggagggctgggcccgtctactggtaaggtgctcaggatcggtcttttgggctgcaatgccactcgcgaaaatgtggatagagtgaccgaagcgctccgagcagcgcttcagcattgtccaaaaaaaaaactc

SEQ ID NO: 249212 - DNA, 1176 bp, synthetic construct
  misc_feature 1..1176: note = Description of Artificial Sequence: Synthetic coding sequence
  source 1..1176: mol_type = other DNA
atggcctcccataaacttctcgtgactccgccaaaggcattgctgaagcccctgtcgattccgaaccaacttcttcttggacctgggccaagcaatctgcctcctagaattatggccgctggagggcttcaaatgattgggtcgatgagcaaagatatgtaccagattatggacgagattaaggaagggatccagtacgtctttcaaacgcgtaatccccttacccttgtgatatctggtagcggacactgtgcacttgaagcagcactggtgaatgttctggaacccggagatagctttttggtgggtgcaaacggaatctggggccagagagcggtggatattggcgaaagaattggggctcgtgtgcatccaatgaccaaggaccccggcggccactacactcttcaagaagtggaggaagggcttgcgcagcataagcctgtccttttgtttctgacccatggagaaagctccaccggggtgcttcaaccactggatggatttggagagctctgccaccggtacaagtgcttgcttctggtcgactccgtggcatccctgggtggaacccccctctacatggaccggcagggtattgatattctttactccggatcacagaaggcactgaacgcacctccgggaacttcgctgattagcttttccgataaggcaaagaagaagatgtattcgcgtaagaccaaacctttctcgttttacttggacatcaaatggctggcaaacttctggggttgtgacgaccaaccacggatgtaccatcatacgattccggtgatctcattgtacagcctgcgggagtccctcgccctgatcgcagagcagggactggaaaacagctggaggcagcatcgggaagccgccgcttacctgcatggtagactccaggcacttgggctgcaattgtttgtgaaggacccagctttgcgtctgccaactgtcactactgtcgcagtccctgcaggttacgactggcgcgacattgtctcgtacgtcattgaccatttcgatatcgagatcatgggcggtctgggcccatccactggcaaggtccttagaattgggcttcttggttgcaacgccaccagagagaatgtcgatcgggtgaccgaagccctccgcgccgctctccaacactgcccaaagaaaaaactt

SEQ ID NO: 249213 - DNA, 1176 bp, synthetic construct
  misc_feature 1..1176: note = Description of Artificial Sequence: Synthetic coding sequence
  source 1..1176: mol_type = other DNA
atggcctcccataagttacttgtaacgccgcctaaggcacttctgaaacctctatccatacctaatcagctccttctaggccccggccccagcaacctgccaccccggatcatggccgcaggggggctgcagatgatcggttctatgtccaaagatatgtaccagatcatggatgaaattaaagaaggaatacagtatgtttttcagacccgcaatccattgactctggtgatcagtggttctggtcattgcgcccttgaagccgcattagtgaatgtgcttgagccaggggactcgtttcttgtaggcgctaatggaatctggggccagcgggctgtggatatcggagagcgcataggcgctagggtccaccccatgaccaaggatccaggtggtcactataccctgcaagaagtggaggaggggcttgcccagcataaaccagtgctcctgttcctaacgcacggagagagtagcacgggcgtcctgcagccactcgacgggttcggcgaattgtgtcaccggtacaagtgtttactgctcgtcgactccgtcgcttctctgggggggaccccactgtacatggatagacagggaatcgatatcctgtacagcggctcccaaaaagcgctcaacgcacctccagggacatctctgatctccttttctgataaagctaaaaagaaaatgtactcacggaagacgaaacctttttccttctatctcgatattaaatggttggctaatttttggggatgtgacgaccagcctagaatgtatcaccatactatccctgtcatctccctgtactcactgagggaatcgctcgcgctgattgcagagcaggggttggagaattcgtggagacagcaccgcgaagcagcggcttatctacatggccgcctacaggctttgggcctgcagttattcgtgaaagatccagccctcagactgcccactgtcactaccgtggccgtccccgccggctacgactggagggacatcgtaagctacgtgatagaccacttcgacatcgagataatgggtgggctcgggccatcaacgggaaaagtgctgagaatcggcctactgggctgcaatgcaacacgggaaaacgtggaccgcgttacagaggctttgcgtgcagccttgcagcactgtcctaaaaaaaagctc

SEQ ID NO: 249214 - DNA, 1176 bp, synthetic construct
  misc_feature 1..1176: note = Description of Artificial Sequence: Synthetic coding sequence
  source 1..1176: mol_type = other DNA
atggcttcccataagctgttggtcacgccgccgaaggccctgctcaagcctctttcgatccccaaccagctgttgttgggtcccggaccttcgaatctgccccccaggatcatggccgctggcggtttacaaatgataggctccatgtccaaagacatgtaccagatcatggatgagattaaagagggcattcaatacgtctttcagactaggaaccccctgacgcttgtcatatcgggaagcggtcattgtgcattggaggccgctctggtgaacgtcctggagccgggcgactctttccttgtcggtgcgaatggtatctgggggcagagggccgtcgatatcggtgagcgtattggtgcacgtgtgcaccccatgaccaaggacccgggcgggcattacaccttgcaggaggtggaggagggcttggctcagcacaaaccagtccttctgttcctcacccacggcgagagctccactggggtgctccaaccgctggacggcttcggtgagctctgtcaccgttacaagtgcctcttgctcgtggactcggtcgcctcactgggaggcacccctctgtacatggatcgccagggtatagacatcctttactccggtagtcagaaagccctgaacgccccccctggtacttccctgatttccttttccgataaggccaagaagaagatgtatagtcgcaagaccaagcccttcagcttctacctcgacatcaaatggctcgctaatttctggggttgtgacgaccagccacgcatgtatcaccacaccatcccagtcatctccctgtacagcctgcgcgaaagtttggctctaatcgcggagcagggactggagaactcttggcgccagcatcgagaggcagccgcgtatttgcatggcagactgcaggccttaggcctgcagttgttcgtcaaggatcccgcgcttcgcctgcccaccgtgaccaccgttgccgttcctgctggctatgattggcgcgacatcgtctcttacgtgattgatcacttcgacattgaaatcatgggtggtcttggaccatctaccggtaaagtgcttcgcatcgggctcctcggttgcaacgctacgcgggagaacgtggaccgcgtcaccgaggcactcagagccgctcttcagcattgtcctaagaagaagttg

SEQ ID NO: 249215 - DNA, 1176 bp, synthetic construct
  misc_feature 1..1176: note = Description of Artificial Sequence: Synthetic coding sequence
  source 1..1176: mol_type = other DNA
atggcgtcgcataaattattagtaacgccgccgaaagcgctactaaaaccgctatcgataccgaatcaactattattaggtccgggtccgtcgaatctaccgccgcgtataatggcggcgggtggtttacaaatgataggttcgatgtcgaaagatatgtatcaaataatggatgaaataaaagaaggtatacaatatgtatttcaaacgcgaaatccgttaacgttagtaatatcgggttcgggtcattgtgcgttagaagcggcgttagtaaatgttttagaaccgggtgattcgtttctagttggtgcgaatggtatatggggtcaacgtgcggttgatataggtgaacgaataggtgcgcgagttcatccgatgacgaaagatccgggtggtcattatacgctacaagaagtagaagaaggtctagcgcaacataaaccggttttattatttctaacgcatggtgaatcgtcgacgggtgtattacaaccgctagatggttttggtgaactatgtcatcgatataaatgtctattactagttgattcggttgcgtcgttaggtggtacgccgttatatatggatcgacaaggtatagatatattatattcgggttcgcaaaaagcgctaaatgcgccgccgggtacgtcgctaatatcgttttcggataaagcgaaaaaaaaaatgtattcgcgaaaaacgaaaccgttttcgttttatttagatataaaatggttagcgaatttttggggttgtgatgatcaaccgcgaatgtatcatcatacgataccggttatatcgttatattcgctacgtgaatcgttagcgctaatagcggaacaaggtttagaaaattcgtggcgtcaacatcgtgaagcggcggcgtatttacatggtcgtttacaagcgctaggtttacaattatttgtaaaagatccggcgttacgtctaccgacggttacgacggtagcggttccggcgggttatgattggcgagatatagtatcgtatgtaatagatcattttgatatagaaataatgggtggtctaggtccgtcgacgggtaaagtactacgaataggtttattaggttgtaatgcgacgcgtgaaaatgttgatcgtgtaacggaagcgttacgagcggcgttacaacattgtccgaaaaaaaaatta

SEQ ID NO: 249216 - DNA, 1176 bp, synthetic construct
  misc_feature 1..1176: note = Description of Artificial Sequence: Synthetic coding sequence
  source 1..1176: mol_type = other DNA
atggcgtcgcacaaactgctggtgactccgcctaaagccctgctcaagccgctcagcatccctaaccaactcctcctgggcccgggaccatccaaccttcccccacgaatcatggcggccggaggcttgcaaatgatcggatccatgtcaaaagatatgtaccaaatcatggacgagatcaaggagggaattcagtacgtgttccagactcgcaacccgctgactctggtgatcagcggatcaggacattgcgcgctggaagcggcactggtgaacgtcctcgaaccaggtgacagctttctggtgggagctaacggcatttggggtcagagggcagtggacatcggtgaacgcatcggagctcgggtgcacccaatgactaaggaccctggcggacattacacgctgcaggaagtggaagagggactggcccagcataaacctgttctgcttttcctgacccacggagaatcctccactggcgtcctgcaaccgctggacggattcggagaactgtgtcacaggtacaagtgcttgttgcttgtcgattctgtcgcctccttgggaggaactcctctgtacatggatagacaggggatcgacattctctacagcggatctcagaaagccctgaacgcgcccccgggaacctcgctgatctcattctccgacaaagccaagaagaagatgtattcacgcaagaccaaacccttctcgttctacctggatatcaagtggctggccaacttttgggggtgtgacgaccaacccagaatgtaccatcacaccatcccggtgatctccttgtattcgcttcgagaatccctggcactcattgccgagcagggactggaaaattcctggcgccaacacagggaggccgctgcctacctccacggccggctccaggccctgggcctgcagctgtttgtgaaggacccggcactgcggctgccaaccgtgaccaccgtggcggtgccggccggatacgactggcgggacatcgtgagctacgtgatcgaccacttcgatatcgagattatgggtggacttggaccatccaccggaaaggttcttcgtattggcctgctgggatgcaatgcgacccgcgaaaacgtcgaccgcgtgaccgaggcgctgcgggccgcattgcaacactgcccaaagaagaaactt

SEQ ID NO: 249217 - DNA, 1176 bp, synthetic construct
  misc_feature 1..1176: note = Description of Artificial Sequence: Synthetic coding sequence
  source 1..1176: mol_type = other DNA
atggcttctcacaagctgctggtgaccccccccaaggcactcttgaaacccctctccattccaaatcagttacttctgggcccaggccccagtaacctgcctcctcgtattatggcagccggcgggttgcaaatgattggttcaatgtctaaggacatgtatcagattatggacgagattaaagagggtatccaatatgtcttccagacacggaatcctttaaccttggtcatctctggatcgggacattgcgccctggaggccgctttggtgaatgtgctcgagccaggggacagttttctagtcggagctaacggcatctggggccagcgtgccgtggacatcggggaaagaatcggggcacgggtgcacccgatgaccaaggatcctggaggccactacaccctccaggaggtggaagaaggcctggcacagcacaagccagtgttgctgtttctaacacacggagaatcaagcaccggagttctgcaacccttggacggatttggggagttatgccataggtacaagtgcttgttgttggtggactcagtcgcatccttgggcggaacgcccctgtacatggaccggcaaggcattgatattctctactccgggagccagaaggctttgaacgccccccctggaacctccttgataagcttctccgacaaggccaagaaaaagatgtactcgagaaagacaaagccctttagcttctacctggatattaaatggctggcaaacttttgggggtgcgacgatcagccgcgcatgtaccaccacacgatcccagtgatcagcttatacagtctgagagaaagcttggctctgatcgccgaacagggtttagaaaattcctggcggcagcacagagaagcagctgcatacttacacggccggctacaggcattgggactgcagttgtttgtgaaagatcccgcgttgcgcctgccaacagttactaccgtagccgtgcccgcgggatatgattggagagatattgtgagttacgtgatcgaccactttgatattgagatcatgggaggcctggggcccagcacaggaaaagttctacgaattggactgttgggttgtaatgcgacacgcgagaatgttgatagggtcactgaggcactgcgggctgccctccagcactgtcccaagaagaaactg

SEQ ID NO: 249218 - DNA, 1176 bp, synthetic construct
  misc_feature 1..1176: note = Description of Artificial Sequence: Synthetic coding sequence
  source 1..1176: mol_type = other DNA
atggcctctcataagctgttggtgacaccgcccaaagctttactgaagccactgtcgattccaaatcagctgctgttaggccccggtccatccaaccttcccccacgaattatggccgccgggggcctacagatgatcgggagcatgagcaaggatatgtatcaaattatggacgagatcaaagagggtattcagtatgtgtttcagacacggaatcctctgaccctagtgatatctgggtccggccactgcgccctggaggccgccttagtgaacgttttggaaccaggagacagttttttagtcggcgcaaatggaatctggggacagagagccgtggacatcggagaacggattggcgcaagggtccatcccatgaccaaggaccccgggggccattacacactacaagaggtcgaagaaggcttagcgcagcataagcctgtcctcctcttcctaacacacggagaaagctcaaccggggtcctgcaaccactggacggctttggcgagttatgtcacaggtacaagtgccttctgctggtggacagtgttgcctctctgggtggaactcctttgtacatggacaggcagggtattgacatcctgtatagcggttctcagaaggcgcttaatgcaccacctggaacgtcactgatctcctttagcgacaaagctaagaaaaaaatgtattcaagaaagaccaaaccatttagcttctacctagacataaaatggctggccaacttctggggttgtgacgatcagccccgaatgtaccatcatacaatcccagtcattagtctctactcgctgcgcgagagcctcgccctcattgctgagcaaggactagagaacagctggcggcagcaccgagaggccgcagcttacctgcacggcaggctacaggccctgggacttcagctgttcgtgaaggacccagctctccggcttcctactgtcacgactgtggccgtccccgctggctacgattggcgcgacattgtgagctatgttattgatcattttgatatcgaaattatgggcggtctgggcccctcaacaggaaaggtgctaaggattgggttacttggatgcaatgctaccagggaaaacgtggatcgggtgacagaggctcttcgcgcagcactgcagcactgtcctaaaaagaaacta

SEQ ID NO: 249219 - DNA, 1176 bp, synthetic construct
  misc_feature 1..1176: note = Description of Artificial Sequence: Synthetic coding sequence
  source 1..1176: mol_type = other DNA
atggcttcccacaaattgctcgtgacgccccctaaggcactccttaagcctctttccattcccaaccagctccttctcggtccagggccttcgaatctcccacccagaattatggcagcaggtggcctgcagatgatcggttcaatgagcaaggacatgtaccagattatggatgaaatcaaggaaggaatacaatacgtgttccagaccagaaacccactcacccttgtgatctccggctccggacactgcgcactcgaagccgcactggtcaatgtgctcgaacctggagatagctttctggtgggagcaaatggcatatgggggcaacgcgcagtggatatcggagagcggattggagcccgggtgcaccctatgacgaaggaccctggaggacactacacccttcaggaagtggaagaggggctggcacaacacaagccagtgctcctgtttcttactcacggcgaatcctcgactggagtgctgcaacctctggatgggtttggtgaactgtgtcacagatacaaatgtctccttctcgtggattcggtcgcttctcttggagggacccccctgtacatggatcggcaggggattgatatcctttactcaggctcgcaaaaagctcttaacgcgccaccaggtacgtcgctgatttcatttagcgataaggcaaagaaaaagatgtactccagaaagaccaagccttttagcttttacctggacatcaagtggttggccaatttctggggatgcgatgaccaacctaggatgtaccatcacactattcctgtgatcagcctgtactctcttcgcgaaagcctggctcttattgcagaacaaggtcttgaaaactcgtggaggcagcatcgggaagcagctgcatacttgcacggaaggctgcaggcgctcggacttcagctcttcgtgaaggatcctgcacttcggcttcctaccgtgaccaccgttgcagtgccggcaggctatgactggcgggacatcgtgagctacgtgatcgaccattttgacattgagattatgggaggacttggcccttccaccggaaaagtccttcgtattggtctgctgggctgtaacgctaccagggagaacgtggacagagtgaccgaggcattgcgagcggcgctccagcattgtcctaaaaagaagctc

SEQ ID NO: 249220 - DNA, 1176 bp, synthetic construct
  misc_feature 1..1176: note = Description of Artificial Sequence: Synthetic coding sequence
  source 1..1176: mol_type = other DNA
atggccagtcataagctgctggtcaccccacccaaagctttgctcaagccacttagcatccccaatcaattactactgggcccggggccttctaatcttcccccccggatcatggcggccggcggattgcaaatgatcggctccatgtcgaaggatatgtaccaaattatggatgagattaaggagggcatccagtacgtattccagacccgaaatcctctgacactggtgattagcggctccggacactgcgcgctcgaggccgccctggtgaacgttttagaaccaggtgactcatttctggtgggcgcaaatgggatctggggtcagagggcagtggacatcggtgagcgaataggcgcacgggttcaccctatgacgaaagatcctggaggccattatactctgcaagaggtggaagaaggactagcacaacataaacccgttctgttgtttctaacccacggtgaaagttccacaggcgtcctccagcccctcgatggcttcggggagctgtgccatcggtataagtgtctgctgctagtagacagcgtggctagtctggggggtacacccctctatatggatagacagggaattgacatcttgtactcaggctctcagaaggcacttaatgctcctcctgggacgagcctgatctctttcagcgataaagccaaaaagaaaatgtatagtaggaagactaagccgttttcgttttacctagacatcaagtggctggccaatttttgggggtgtgacgaccagcctaggatgtatcatcatacaatcccagtgatctcgctgtattccctgagggaatccctagctctgattgccgagcagggtctcgaaaattcatggcgtcagcaccgtgaagccgccgcgtatcttcacggcaggttacaggctctgggcttgcagctgttcgttaaagatcccgctctgagattgcccactgtgacaactgtagctgtgcctgccggctatgactggcgcgatattgtaagctacgtaattgaccatttcgatattgagattatggggggcctgggtccctcaacagggaaagtgctccgaatcgggctgcttggatgtaatgctaccagggaaaatgtggaccgggtaaccgaagccctgcgtgccgccctccaacactgtccaaagaaaaagctt

SEQ ID NO: 249221 - DNA, 1176 bp, synthetic construct
  misc_feature 1..1176: note = Description of Artificial Sequence: Synthetic coding sequence
  source 1..1176: mol_type = other DNA
atggccagccacaaactgctggtgaccccgccgaaagcactgctcaagccgctgtctattccgaaccaactgctcctggggccggggccgtccaacttgccaccgcggatcatggcggctggaggactgcaaatgatcgggtcgatgagcaaggacatgtaccaaatcatggatgaaatcaaagagggaatccagtacgtcttccagaccagaaaccctctgaccctggtgatctccggatcgggacactgcgccttggaggccgcgctcgtgaacgtgctggagcctggagactcgttccttgtcggcgccaacggtatttggggacaacgtgcagtcgatatcggagagcgcatcggagcgcgcgtgcacccaatgaccaaggacccgggtggtcattacaccttgcaagaagtcgaagaaggactggcgcagcacaagcctgtcctgttgttcttgacccatggagagtcctcgactggagtgcttcagccactcgatggattcggggaactgtgccacagatacaaatgtctgctcctggtggattcggtggcaagcctcggaggaactccgctgtacatggaccggcagggtattgatatcctctacagcggatcacagaaggctctgaatgcaccaccaggaacctcactgattagcttcagcgacaaggccaagaaaaagatgtactcgcgcaagactaagccgttctccttctatttggacatcaagtggctggcaaatttctgggggtgcgacgaccagccccgcatgtaccatcacactatcccggtgatttccctttactccctcagagaatccctggccctgatcgccgaacagggccttgaaaattcatggcggcaacaccgggaagctgccgcctatctgcatggaaggctccaggcgctgggattgcagctttttgtgaaagaccctgcactccggcttccaactgtgaccactgtggcagtgccggccggatacgactggcgggatatcgtgtcatacgtgattgaccacttcgacatcgagatcatgggagggctgggacctagtaccggaaaggtgctgcgcatcggactgctgggatgcaacgcgactagagaaaacgtggaccgcgtgactgaagccctccgtgcggctttgcagcattgcccgaagaaaaagctg

SEQ ID NO: 249222 - DNA, 1176 bp, synthetic construct
  misc_feature 1..1176: note = Description of Artificial Sequence: Synthetic coding sequence
  source 1..1176: mol_type = other DNA
atggcctcccataagcttctcgttacacctccaaaggccctgctgaaacccctctccattcctaaccaattgctcctgggtcctggaccgagcaaccttccaccgagaataatggctgcaggcggcttgcagatgatcggatccatgtcaaaggacatgtatcagatcatggacgaaataaaagagggaatacaatatgtgtttcagacgagaaatccattaactctggtcataagtggttctggccattgtgccctggaagccgcactggtgaatgtgctggagcccggggactcgttcttagtcggcgccaatggaatttggggtcagcgagcggtggatatcggtgaacggattggagcccgcgtccaccccatgaccaaagatccaggcgggcactatacactccaggaggtggaagaaggtctagctcagcataaacccgtccttctgttccttacacacggcgaatccagtacaggggtgttgcaacctcttgacggattcggggaactctgccatagatacaagtgcctgctgctggtggattcagtggcatccttgggggggacaccactgtacatggacagacagggaatcgatatcctgtattcgggtagtcaaaaggccttgaacgcgcctcccgggacctcccttatttctttctccgataaggctaagaaaaagatgtacagccgcaaaactaagcctttctcgttctatctggatattaagtggcttgcaaatttttgggggtgtgacgaccaaccccgaatgtatcatcatactatcccagtcatatccctctattcattacgcgagtcactggccctcatcgccgaacagggcctggagaactcttggcggcagcatcgcgaagccgcggcatatctgcacggaagactccaggctctaggactgcagctgtttgtcaaggacccagctctccggctgccaacagttacaacagtcgctgtgcctgccggctacgactggcgtgatatcgtgagctatgtcattgaccacttcgacattgagatcatggggggcctcggcccctctaccgggaaggttctccggatcgggcttctggggtgtaatgccacacgcgagaatgtagatcgtgtcaccgaagctcttagagccgccctgcagcactgtccaaaaaagaaactg

SEQ ID NO: 249223 - DNA, 1176 bp, synthetic construct
  misc_feature 1..1176: note = Description of Artificial Sequence: Synthetic coding sequence
  source 1..1176: mol_type = other DNA
atggccagccataagctgttggtgacaccccccaaggcactcctgaagcccctctccatccctaatcagctgctcctggggcccggcccctcaaaccttccaccccggatcatggcggcaggtggcctgcagatgattggttcaatgtcaaaggatatgtaccagattatggatgagatcaaagagggtatccaatatgtcttccaaactcgtaatcccctcacactggtgattagtggctccggtcattgtgcactggaggcagctcttgtgaatgtgttagagcccggtgacagtttccttgttggcgctaacggcatctgggggcagcgggctgtggacattggagagcgcatcggggccagagtgcacccaatgacaaaagaccccggcggacactacacactgcaggaagtggaggagggtctagcccagcataagcccgtgctgctattcctaactcacggggaaagctcaacaggtgttctgcagcccttggacggttttggagagctctgtcatcggtataagtgtttgcttttggtggattctgtggcctcgctgggcgggacgccactgtatatggacaggcagggcatagatatcctgtattcaggaagccagaaggcactgaatgcacctccaggcacctccctcatctcctttagcgataaggccaagaagaaaatgtactcaagaaagacaaagcctttcagtttttacctggatataaagtggctggccaacttctggggctgtgacgaccagccgaggatgtatcaccataccatcccggtaatttcgctgtattccttgcgagagagccttgcgctgatcgccgagcagggcctggagaatagctggaggcagcacagagaggctgcggcatatctgcacgggcggcttcaagcacttggactgcagctgtttgtgaaagaccccgctctacgccttcctacagtgaccaccgtggcggtgccagcaggatacgactggcgagatattgtctcttatgtcatagatcactttgatatcgagatcatggggggtttaggaccgtctacagggaaggtgctgcgaataggcctcttaggatgtaatgcaacgcgcgagaacgtggatcgagtgaccgaagcacttagagctgcgctgcagcattgtccaaaaaaaaaacta

SEQ ID NO: 249224 - DNA, 1176 bp, synthetic construct
  misc_feature 1..1176: note = Description of Artificial Sequence: Synthetic coding sequence
  source 1..1176: mol_type = other DNA
atggccagccacaagttgttggtcaccccacctaaggccctgctcaaacccctttcaatccctaaccagctcctgctggggccgggcccgtcgaacctgccgccccgcatcatggcggctggtggcctgcaaatgattggatcaatgtctaaggatatgtatcaaatcatggacgagatcaaagagggcatacagtacgtgttccagacccgtaacccgctgaccctggtcatttctggcagcggtcactgcgccctggaggcagctctggtgaatgtgctggagccaggcgactccttcctggtgggagctaacggtatctggggacagcgagccgtggacatcggagaacgaatcggggcgagagttcatccaatgactaaggatccgggcggacactacaccctccaggaagttgaggaagggctcgcccaacacaagccagtactcctgtttctcacccatggtgagtcgagcaccggagtgctccagcctcttgatggattcggagagctgtgccatcggtacaagtgtttgctcctggtggattccgtggcaagcctcggaggaactcccctctacatggaccgccagggaattgatatcctctactcgggaagccaaaaggcgctgaacgcaccacctggaacctccctcatctccttctcggataaggcgaagaagaaaatgtacagcagaaagactaagcctttctccttctatttggacattaagtggctcgccaatttctggggatgcgatgaccaaccgcgcatgtatcaccacaccattccagtgatcagcctctactcactccgcgaaagcctggccctgatcgcggaacagggcctggagaactcatggcgacaacatcgcgaggcagcggcttatcttcacggacgcctgcaagccctgggactgcagttgttcgtgaaggaccccgcgctccgcctcccaactgtgactaccgtggcagtcccggctggatacgactggcgggacatcgtgtcctacgtgatcgaccacttcgacatcgaaatcatgggcggcctgggccctagcactggaaaagtcctgcggatcggattgctgggatgcaacgccacccgcgaaaatgtggacagggtgactgaggccctgcgggctgcactgcagcattgccccaagaaaaagttg

SEQ ID NO: 249225 - DNA, 1176 bp, synthetic construct
  misc_feature 1..1176: note = Description of Artificial Sequence: Synthetic coding sequence
  source 1..1176: mol_type = other DNA
atggctagtcacaagctgctggtcactcctcctaaggccctgctgaaaccactatctattcccaaccagctgctgctcggccctggcccatccaacctgccaccaaggatcatggctgctggcggtctgcagatgattggctcgatgtctaaagatatgtaccagatcatggacgagataaaggaagggatccaatatgtgttccagactaggaaccccttgacgttggtcatttctgggtccggacactgtgccttggaagcagctctcgtcaacgtgctcgagccgggcgattccttcttggtgggggccaatgggatttggggacagcgggccgtcgacatcggcgagagaataggcgcacgagtgcatccaatgacaaaggatccagggggacactacactctgcaggaggtggaggaaggactggctcagcacaagcctgtccttctatttttgactcacggcgagagctccactggtgtcttgcagccccttgatggcttcggggaactgtgtcacaggtacaaatgcctcctccttgtggacagcgttgcttcactggggggaacacctttatatatggatcggcagggcattgacatcctgtactcaggaagccagaaggctctgaatgccccccctggcacctcgcttatctccttctcagataaggcgaagaagaaaatgtatagcagaaagacgaagccattttctttctacctggacataaagtggctcgccaatttttggggctgcgacgatcagcctcgcatgtatcaccacactatccctgtcatttcgttgtatagcctcagggaatccctggccctgattgctgaacaaggactcgagaactcttggcggcagcaccgagaggccgctgcatacctccacggtagactgcaggccctgggattgcagctgttcgtcaaggacccagccttacggcttcccaccgtaactaccgtcgccgtccccgccggttacgattggcgtgatatcgtgtcctacgttatcgatcattttgatatcgaaatcatggggggtcttgggcctagcaccgggaaggttctccgcattggcttacttggctgcaatgccacgcgcgaaaatgtggatcgggtgacagaggcgctacgagccgccctacaacattgccccaagaaaaagctg

SEQ ID NO: 249226 - DNA, 1176 bp, synthetic construct
  misc_feature 1..1176: note = Description of Artificial Sequence: Synthetic coding sequence
  source 1..1176: mol_type = other DNA
atggcaagccacaaattgctcgtgactccgcctaaagcgttgctcaaaccactctcaatcccaaaccagcttctgcttggtccgggaccctccaacctcccacctagaattatggcagcaggaggacttcaaatgataggatcaatgtccaaagatatgtaccagattatggatgagattaaggaaggaatccaatacgtgtttcaaacgcgcaaccctcttactctggtcatttcgggttccggacattgtgctcttgaagcagcactggtgaacgtgctggaacctggcgattcgttcttggtcggagcgaatgggatttggggtcaaagggccgtggacataggggagcggattggtgcccgagtgcatccgatgaccaaggatccagggggtcattacacgttgcaggaagtggaggaagggctcgcgcagcataagccagtcttgcttttccttacccacggtgaaagctcgaccggcgtgcttcagcctctcgacggctttggggaactgtgtcacagatacaaatgccttcttctggttgattcggtggcgtcgctgggcggaaccccactttacatggataggcaaggaatcgacattttgtattcgggctcacaaaaagccttgaatgcaccgcccggaactagcttgatttccttctcagacaaggcaaagaagaagatgtactctaggaaaactaagccttttagcttttaccttgacatcaagtggctggcaaacttttggggctgtgacgatcaaccacggatgtatcatcacaccatccccgtgatatcgttgtattccctcagagagtcacttgccctgattgcagagcaaggactcgaaaattcatggagacagcaccgcgaggcagcggcttacctccacggtcgacttcaagcactcgggctgcagctgtttgtcaaggacccagccctccgccttcccaccgtgactaccgtggcggtccccgcgggctacgattggagagatatagtctcctacgtgattgatcatttcgacatcgagattatgggcggcttgggaccatcgaccggtaaggtgctgagaatcgggcttcttggatgcaacgcaactcgggaaaacgttgatcgcgtcactgaagcactgagagccgcgctgcagcattgtcctaagaagaaactt

SEQ ID NO: 249227 - DNA, 1176 bp, synthetic construct
  misc_feature 1..1176: note = Description of Artificial Sequence: Synthetic coding sequence
  source 1..1176: mol_type = other DNA
atggcctcccacaagctgctggtaactccccctaaggctcttcttaagcccctttcaattcctaaccaactgctgttgggacctggaccatcaaatttgcccccccggataatggccgccggcgggctgcagatgattgggtcaatgtccaaggacatgtaccagattatggatgagatcaaggaggggatacaatatgtctttcagaccagaaacccactgaccctcgtcatttctgggtccggtcactgcgccttggaggcagcactggtgaatgttttggaaccaggggacagctttctcgtaggagcaaatgggatttggggccagagagccgttgatatcggtgaaagaattggtgcccgcgtgcaccccatgactaaggaccccggcggacattatactctgcaagaggttgaagaggggctggcacagcacaagccagtccttctatttcttacacacggtgagtcttcaactggcgtcttgcagccccttgacggattcggcgaattgtgccaccgctacaagtgtctgctgctagtcgactctgttgccagcctgggcggcacacctctgtacatggacaggcaaggaattgatatcttatattctgggagccagaaagcactcaacgccccccccggaactagtcttatcagtttcagtgataaagcgaagaagaagatgtactctcggaagactaagcccttctctttctacctcgatataaaatggctagccaacttttggggttgcgacgatcagcctagaatgtaccatcacaccattcccgtgatctctctttactcgttgagagagtctcttgcacttatagcagagcaaggccttgagaattcctggaggcagcacagagaggccgccgcttatctgcatggcaggctgcaagcgctgggacttcagctctttgtcaaggaccccgccctgcgtctaccaactgtaaccactgtggccgtgccggccggctatgactggcgggacatcgtgtcttacgtgatcgatcactttgacatcgaaatcatgggtggtttgggacccagcacagggaaagtcctgcgcattgggttgttgggatgcaatgccacgcgtgaaaatgtagacagagtaacagaagcactgcgagcagcactgcagcactgccccaagaaaaagtta

SEQ ID NO: 249228 - DNA, 1176 bp, synthetic construct
  misc_feature 1..1176: note = Description of Artificial Sequence: Synthetic coding sequence
  source 1..1176: mol_type = other DNA
atggcgagccacaaactgctggtcaccccacctaaggctttgcttaagccgctctcgatcccaaatcagctccttctcgggccaggaccatcaaaccttccgccaaggattatggcagcaggtggactgcaaatgataggatcgatgtccaaggacatgtaccagattatggacgaaatcaaggaaggaatacaatatgtctttcagactcgaaatccacttactcttgtcatttcaggctccgggcattgcgcccttgaggcagctcttgtgaatgtgcttgagcctggtgattcatttcttgtgggagcaaatggaatctggggtcaacgcgcagtcgacatcggagaaagaattggtgctagagtccatccaatgaccaaagacccaggaggacattataccttgcaggaagtggaagagggactcgcccaacataaacctgtgctgctgtttctcacccatggagaaagctcgactggagtgttgcagcctcttgatggattcggagaactctgtcacagatacaagtgtctgctgctggtcgattcggttgcatcactgggcggaactccactgtacatggataggcaaggtatagacattttgtactccgggtcccagaaagccctgaacgcgcctcctggtacttccctgattagtttcagcgataaggcaaagaagaaaatgtactcccgtaagaccaaacccttttcattttacctcgatatcaagtggctggctaacttttggggctgtgatgatcaaccacggatgtatcatcacaccatccctgttatatcgctgtactctctcagggagagcctggctctgattgcagaacaaggtctggaaaacagctggaggcaacacagggaagccgcagcctatcttcacgggaggctgcaagcccttgggcttcagctttttgtgaaggatcctgcacttcgactcccaaccgtgaccacggtggcagtgcctgcgggctacgattggcgagacattgtgtcgtatgtgatcgatcattttgatatcgagattatggggggactggggccttccactgggaaagtgctccggattggactgctgggctgcaacgcaacccgggagaatgtggaccgcgtcacggaagcactgagagccgcactgcagcattgcccaaagaagaagctc

SEQ ID NO: 249229 - DNA, 1176 bp, synthetic construct
  misc_feature 1..1176: note = Description of Artificial Sequence: Synthetic coding sequence
  source 1..1176: mol_type = other DNA
atggcctcgcacaagctcctggtgactccaccgaaggctctcctgaagcctctctcaatccccaatcaactgctcctgggccctggaccttccaatttgcctccgcgaatcatggccgcagggggactccaaatgatcggtagtatgtcgaaagacatgtatcagatcatggacgagattaaagaaggaatccaatacgtgttccaaactaggaatcccctgaccctggtgatcagcgggtccggacactgcgcgctggaagctgccctggtgaacgtcctggaaccaggcgactcgtttctcgtgggcgcgaatggaatctggggacagagagctgtggacatcggagagcggatcggtgcgcgcgtgcacccgatgactaaggaccctggcggacactatactttgcaggaggttgaagagggactcgcgcagcacaaaccagtcctcttgtttttgacccacggagagagcagcactggcgtccttcagccgctcgacggcttcggagagctttgtcaccggtacaaatgcctgctgctcgtcgactccgtcgcctccttgggaggcactcctctctacatggatcgccaggggattgacatcctctactcgggctcgcagaaggcactgaatgcaccgccaggaacttcccttatctcattttcagataaggctaaaaagaaaatgtacagccgcaaaaccaagccattcagcttctacctcgacatcaagtggctggccaacttctggggctgcgacgaccagccgcgcatgtaccaccacaccatccctgtgattagcctgtattcactccgcgaatcgctggcgctgattgccgaacaggggctcgaaaactcctggagacagcaccgggaagcggcagcatatctccacggccgtctgcaagccctgggcctccaactcttcgtgaaggatccggccctgagacttccgactgtcactactgtggccgtcccggcaggctacgattggcgcgatatcgtgtcatacgtgattgatcacttcgacatcgagatcatgggaggcctgggaccgtcgaccggtaaggtgcttcggatcggactgctcggatgcaacgccactcgcgaaaacgtggatcgcgtaaccgaagccctgcgggccgcactgcagcactgcccgaagaagaaactt

SEQ ID NO: 249230 - DNA, 1176 bp, synthetic construct
  misc_feature 1..1176: note = Description of Artificial Sequence: Synthetic coding sequence
  source 1..1176: mol_type = other DNA
atggccagtcacaaactgcttgttacaccacccaaagcccttctgaagccgttgtccattccaaatcagcttctcctaggccctggaccaagcaatctcccccctcgcataatggcagcaggaggactgcagatgattggatcaatgagcaaggacatgtatcaaatcatggacgaaatcaaagaggggattcagtatgtgttccagacccggaatccactgactttggtgatctctggatccgggcattgtgccctggaggccgccctcgtcaacgtcctcgaacccggggacagcttcctcgtgggagctaacggcatttgggggcagcgggccgtcgacatcggcgaacgcatcggtgcaagggtgcatcctatgacaaaggatcccgggggtcattacactctgcaggaggtggaggaagggttagcccaacacaaaccagtccttctcttccttactcacggggagagctcaactggtgtcctacaaccactggacggcttcggtgaactgtgccatcgatacaagtgtctactcctggttgattccgtggcctctttgggggggacccccctgtacatggatcggcaaggcatagacatcctgtatagcggctcccagaaagcgctgaatgcgccacctggaacctccttgattagcttttccgacaaagcgaagaaaaagatgtactctagaaagacaaaacccttcagtttttatctagacatcaagtggctggccaacttctggggctgcgatgatcagcctcggatgtaccatcataccatccctgtaatctccttatactctctgcgtgagagtcttgccctcatagctgagcagggcctcgagaacagctggcgtcagcacagagaggcggcggcttacctccatggtaggctccaggccctgggcctgcagctattcgtcaaggatcccgccctgaggcttcccacagtaactacagttgcagtacctgccgggtatgattggcgtgatatcgtgtcttatgtgattgaccactttgatattgagatcatgggaggcttaggaccttccactggtaaagtcctaagaatcggattgctaggttgtaatgctaccagagaaaacgtggatcgggtcaccgaagccctccgagccgcactgcagcactgccctaaaaaaaagctg

SEQ ID NO: 249231 - DNA, 1176 bp, synthetic construct
  misc_feature 1..1176: note = Description of Artificial Sequence: Synthetic coding sequence
  source 1..1176: mol_type = other DNA
atggcgtcccacaagctcctcgtgactccgccaaaggcccttctcaagcccctctcaatccctaaccaactgctgcttggtccgggtccttcgaaccttccacctagaatcatggcagccggtggactgcagatgatcggttcgatgtcaaaagatatgtaccagattatggacgagattaaagaggggattcaatacgtgtttcaaactcgcaacccattgaccctggtgattagcgggtcaggccactgcgcccttgaagcagcgctcgtgaacgtgctggagcccggtgactcgttcctggtgggagccaacgggatctggggacagagagccgtggacatcggagaacggatcggtgcacgtgtgcaccctatgactaaggatccaggtggccattacactctgcaagaggtggaagaaggactcgcccagcacaaacctgtcctcctctttcttacccacggagagtccagcactggagtcctccagccactggatggcttcggtgaattgtgccaccgctataagtgtctcctgcttgtggacagcgtggcatcactgggaggtacgccgctgtacatggatcgccaggggattgacattctgtatagcggctctcagaaagccctgaacgcaccacccggaacttcacttatctccttctcggacaaggcaaagaaaaagatgtactctaggaaaactaagccattttcattctaccttgacattaagtggctggccaacttttgggggtgtgacgaccagcctaggatgtaccatcatactattcctgtgatctcgctttactcactgcgagaatcccttgcccttattgcggagcaaggacttgaaaattcgtggagacaacatcgggaagcagcggcataccttcacggtcggcttcaggctttgggtctgcagttgttcgtgaaggatcctgcactgcggctccccaccgtcaccacggtggcggtgcctgcaggctacgactggcgggacatcgtgtcctacgtgatagatcactttgatatcgagattatgggaggcctcggaccttcgactggtaaagtgcttcggattggactgctggggtgtaatgcgaccagggagaatgtggatagggtgactgaggcactgcgagctgccctgcagcattgtcctaaaaagaagttg

SEQ ID NO: 249232 - DNA, 1176 bp, synthetic construct
  misc_feature 1..1176: note = Description of Artificial Sequence: Synthetic coding sequence
  source 1..1176: mol_type = other DNA
atggcgtctcacaagctgctggtgacacctcctaaggccctcctcaaaccactcagcatccctaaccagctgctgctaggacccggacccagcaatctgcccccgaggataatggccgccgggggccttcaaatgataggtagcatgtcaaaggatatgtatcagatcatggacgagatcaaggagggaatccagtacgtgttccagacccgcaaccctctgacattagtgatttccggctccggccactgtgccctcgaagcggcgttggtgaatgtgctggaaccaggggattcctttctggttggtgctaatggaatttggggccagagagccgttgacataggcgaacggatcggagcgcgcgttcaccccatgactaaggatcctggcggacactacacactgcaggaagtggaggagggtttggcccaacacaaacctgtgctcctgtttttgacacacggcgagtcttccacaggcgtactgcagcctctggatggcttcggcgaactctgccatcgctataagtgccttctgcttgtggattccgtcgcaagtttgggaggcacacccctgtatatggatcgacagggtatcgacatcctatattccggaagtcagaaggccttaaacgcaccccctgggacttccctcataagcttttctgacaaagccaaaaaaaagatgtattctagaaagacaaagcccttctccttctatttggacattaagtggttagccaatttttggggttgtgacgatcagccgaggatgtaccatcacaccatacccgtgatctcgctctactctctccgtgaatctctagccctcatcgctgagcaggggctcgagaacagctggaggcaacaccgcgaggccgccgcttatcttcacggcaggctccaggccctgggactgcagttgttcgttaaagacccagctttacggctgccgacggtgaccaccgtggcagtgcctgcaggctacgattggagagatatcgtgtcatatgtgatcgaccacttcgacatcgaaatcatgggagggctgggtccctctacaggcaaagtgttgcggataggactgcttggttgtaacgccacgcgggaaaacgtcgaccgtgttacagaagctctacgtgcagccctgcaacactgccctaagaaaaagctc

SEQ ID NO: 249233 - DNA, 1176 bp, synthetic construct
  misc_feature 1..1176: note = Description of Artificial Sequence: Synthetic coding sequence
  source 1..1176: mol_type = other DNA
atggccagccataaacttcttgtgactccgccaaaggctctgttgaagcccctgtccattcccaaccagctgctgctcggaccaggtccgtccaatctgcctccaaggatcatggcagcaggaggacttcagatgattggttcgatgtcgaaggatatgtaccaaatcatggatgagattaaggaaggcattcagtatgtctttcaaactcgaaaccctcttactctggtgatcagcggctctgggcattgcgcacttgaagcagcgcttgtgaacgtgcttgaaccaggagacagctttcttgtcggtgcaaatggaatctggggccaaagagctgtcgacataggggagagaatcggagccagagtccatcctatgactaaggatccaggcggccactacacccttcaagaagtggaggaaggtctggcccagcataagcctgtgctcctgtttcttacgcatggagaatccagcaccggagtcctccaacctcttgatggatttggcgaactttgtcatcggtacaagtgtctcctgctcgtggatagcgtggcatccctgggtgggactcctctgtacatggacagacaaggcattgatatcctctacagcggtagccaaaaggcattgaatgcaccccctggaacctcgcttatctcgttcagcgacaaggcgaaaaagaaaatgtactcccgtaagacgaagcctttctctttttacctggatatcaagtggctggccaacttttggggatgcgatgatcagcctcgtatgtaccatcatactataccagtgatctcactgtactcgcttcgcgagtcactggctctgatcgctgagcaaggactggaaaactcatggcggcaacatcgagaagccgcagcgtacctgcacggtcggttgcaggcccttggtttgcaactcttcgtgaaagatccagcactgaggctgccaactgtgactactgtcgcagtgccagcgggttacgattggcgggatatagtgtcatacgtgatcgaccatttcgacattgagattatgggtggcctcggcccatcaaccgggaaggtgcttaggatcgggctcctggggtgcaatgcgaccagagagaatgtggatcgcgtcactgaagcacttagagccgccctccaacattgccctaaaaagaagttg

SEQ ID NO: 249234 - DNA, 1176 bp, synthetic construct
  misc_feature 1..1176: note = Description of Artificial Sequence: Synthetic coding sequence
  source 1..1176: mol_type = other DNA
atggcctcacacaagctgctcgtgactccgccgaaggcgctgctgaaaccgctgagcattccaaatcaactcttgctgggaccgggaccttcgaatctcccgcctcggataatggcagccggcggactccagatgatcggctcaatgtcgaaggacatgtaccaaatcatggatgaaatcaaagaaggtatccaatatgtgttccaaactcggaaccccttgactctggtcatcagcggatccgggcactgcgctctggaagcagctttggtcaacgtcctggaacctggtgattccttcctggtgggagctaacgggatttggggtcagcgcgcagtcgatattggagagaggataggcgctagagtccacccgatgaccaaggaccccggcggacattacactctccaagaggtggaagaaggtctggcgcagcacaaaccagttctgctgtttttgacccacggagagtcgtcgactggcgtgctccagcccctggatggctttggcgaactgtgtcatcggtacaagtgcctgttgctcgtggattcagtcgcaagcctcggcggaactcccctgtacatggataggcagggaatcgatattctgtactccggatcacagaaggcactgaacgccccgccaggaacctcgctgatctcgttctctgataaggcgaaaaagaaaatgtacagcagaaagacgaagcctttctccttttatctcgacatcaaatggttggcgaacttctggggctgcgatgaccaaccgcggatgtaccaccacaccatcccagtgatctccctctacagcctccgagaatccctggccctcattgcagagcaggggttggagaattcatggcggcagcatcgggaggccgccgcctacttgcatggtcggcttcaggccctcggcttgcagctctttgtgaaggacccggccctgcgccttccaactgtgaccacggtggccgtcccggctggttacgactggcgggacatcgtctcctacgtgatcgaccatttcgacatcgagattatgggcggattgggaccttccaccggcaaggtgcttcggatcggactgctcggttgcaacgctactcgcgagaacgtggacagagtgaccgaagccctccgagcggcgctgcaacactgtccaaagaaaaagctc

SEQ ID NO: 249235 - DNA, 1176 bp, synthetic construct
  misc_feature 1..1176: note = Description of Artificial Sequence: Synthetic coding sequence
  source 1..1176: mol_type = other DNA
atggctagccacaagttgttggtgactcctcccaaagcccttctgaagcccctgtcaattcccaaccagttgcttctgggtccaggaccttcaaatttgcccccacgtatcatggctgccggtggtttgcaaatgatcggatccatgtctaaagatatgtaccaaatcatggatgagatcaaggagggtatccagtatgtatttcagaccaggaacccactgacactcgtgatatctggaagtggccattgtgcactcgaggccgccctggtcaatgtgctggagcccggagattctttcctcgtcggcgcaaatggcatttggggacagcgcgcagtggatataggcgagcgcatcggagcccgcgtgcaccctatgactaaggaccccggcggtcactacactctccaagaggtagaggagggactggcacagcacaaacccgtattgctctttctgacccacggagagagcagtactggcgtcctccagcccctggacggcttcggagagctttgccacaggtacaagtgtctgctgttggtggattcagtcgctagcctgggaggaaccccactctatatggaccgccagggaatcgacatactgtattccggatctcagaaggccttgaacgctccacctggtacttctctcatttccttctctgacaaggctaagaagaaaatgtacagcaggaagactaaacctttctcattttacctcgatatcaagtggctggctaatttttggggttgcgacgaccagcctaggatgtaccaccataccattcctgtaatcagtctctacagcttgcgcgagtcactggctctcattgcagagcaaggcctggagaactcatggcgccaacatagggaagccgctgcctacctccatggtcgtctgcaagctctcggccttcagctcttcgtcaaagaccctgccctgagactgccaaccgttaccactgtcgccgtgcccgccggctacgattggcgcgatattgtgagttatgtaatcgaccactttgacatcgagatcatgggaggcctgggtccttcaactggaaaggtactgagaatcggattgctgggatgtaacgctacccgtgagaatgtcgacagggtcaccgaagccctcagagcagcactgcagcattgccccaaaaaaaagctc

SEQ ID NO: 249236 - DNA, 1176 bp, synthetic construct
  misc_feature 1..1176: note = Description of Artificial Sequence: Synthetic coding sequence
  source 1..1176: mol_type = other DNA
atggcaagccacaagctcctcgtcacgccgccgaaagcgctgctgaagccactctcaattcctaatcagctcttgctggggccgggtccttccaatctgcctccgcgcatcatggccgcaggtgggctgcaaatgatcggtagcatgagcaaagatatgtatcaaattatggacgagatcaaagagggaatccagtacgtattccagacccgaaatcctctgacactcgtaattagcgggagcggtcactgcgccctcgaagccgccctggtgaacgttctggaaccgggtgattcctttttggtgggcgccaacggcatttggggacagcgtgcggttgacatcggtgagcgcattggcgcccgggttcatcctatgaccaaagatccagggggccattacacattgcaagaggtagaggaaggtctagcacaacacaaacctgtccttctgtttctgacccacggtgaatccagcaccggtgtcttgcagcccctggatggtttcggtgagctatgtcaccgctacaagtgtctgctccttgtcgatagcgtggcatcactgggtggtactccattatatatggacagacaaggtatagacatcctgtattccggaagccaaaaagctttgaatgcaccacccggcacaagcttgatcagcttcagcgataaagcgaagaagaagatgtactcacgaaaaacgaagcctttcagcttctatttggacatcaagtggctggcgaacttctggggttgtgacgatcaaccgagaatgtaccaccataccattccggtcatctctctgtattccctccgcgaatcattagcgctaatagcggagcaagggttggagaacagttggcgccaacatcgcgaggctgcggcctatctgcatggtcgcttgcaggctctgggcctgcaactattcgttaaagatccggctctccgtttgccgactgttaccacggtggccgttcctgcgggatatgattggcgcgacatagtctcctacgtgattgaccactttgatatcgaaattatgggaggtctgggtccaagcaccgggaaggtgctgcgcatcggcctgctggggtgtaacgctacccgggaaaacgtggatcgcgtcaccgaggcactccgggcggccctccagcattgcccgaagaaaaagtta

SEQ ID NO: 249237 - DNA, 1176 bp, synthetic construct
  misc_feature 1..1176: note = Description of Artificial Sequence: Synthetic coding sequence
  source 1..1176: mol_type = other DNA
atggcgagccataaactcctcgtgactcccccgaaggccttgcttaaaccgttgtcaattccaaaccaactcctgcttggacctggcccatcgaaccttccgccccgcataatggcggccggaggcctgcaaatgattggatccatgtccaaggacatgtatcaaatcatggatgagatcaaggaaggaattcagtacgtctttcagacccggaaccctctcacgctggtcatttccggaagcggacactgcgcacttgaagcagcactcgtgaatgtgctggagccaggggattcatttctggtaggagcaaacggaatttggggccagagagccgtggacataggggagaggattggcgctagagtccatcctatgactaaggaccccggtggtcactacaccctgcaagaagtggaagaaggcctggcgcaacataagcctgtgcttctgtttttgacccatggagagtcctcgactggggtgctccagccactcgacggttttggggaactttgtcataggtacaagtgccttctgctggtggattccgtggcgtcgctgggaggaactccactgtacatggatcggcagggtatcgatattctttactcgggatcgcagaaagcacttaatgcccctcctgggactagcctgatctccttttcggataaggctaagaagaagatgtacagcagaaagaccaagccattctcattttacctcgacatcaaatggcttgccaacttctggggctgtgatgatcagccccggatgtaccaccataccattcccgtgatctccctgtacagcctccgagagagccttgcgctcatcgcagaacaaggcctggaaaattcttggaggcaacatagagaagcggcggcgtaccttcacggtcggttgcaagcactgggcctgcaattgttcgtgaaagatccagcccttcgacttcctactgtgacgactgtcgcagtaccggcaggttacgactggcgtgatattgtctcgtacgtgatcgaccacttcgatatcgagattatgggagggcttggtccttcgaccggtaaggttctcagaattggactgctcggatgcaatgcaacccgggaaaacgtagatcgcgtcaccgaagccctgcgcgctgcactccaacattgtcctaagaaaaaactc

SEQ ID NO: 249238 - DNA, 1176 bp, synthetic construct
  misc_feature 1..1176: note = Description of Artificial Sequence: Synthetic coding sequence
  source 1..1176: mol_type = other DNA
atggcgtcgcacaaacttctggtgacgccgccgaaggctctgctgaaaccgctctcgatccccaaccagttgctgctgggacctggaccttccaacctgccgccgcgcatcatggccgcggggggcctgcaaatgatcggctccatgagcaaagacatgtaccaaatcatggacgaaatcaaagaggggattcaatacgtctttcagacgcgcaacccactgactctcgtgatttcgggcagcggacactgtgctctcgaagcggccctcgtgaacgtgttggaacctggagactcgttcctggtgggagcaaatggaatttggggccaacgcgccgtggatatcggagagcgtatcggcgcaagagtgcatccgatgaccaaggatcctgggggacattataccttgcaggaagttgaggaggggcttgcacaacacaaaccggtgctcctgttcctgactcatggagagtcaagcactggagtgctccagcccctcgatggattcggtgaactgtgtcaccgatacaagtgcctgctgcttgtggacagcgtggctagcctgggcgggactccgctgtacatggaccggcaaggaatagacatcctctacagtggatcccaaaaggctctgaatgccccgcccggcaccagcctgatcagcttctcggacaaggcaaagaagaagatgtactcccgcaaaactaagccctttagcttctacttggacatcaaatggctcgcgaacttctggggctgcgatgatcagccgaggatgtaccatcacactatcccagtgatttcgctgtactcccttcgggaatcacttgcactcatcgcagaacagggactggaaaattcatggagacagcatcgggaggctgcggcgtacctccatggacgtttgcaagccctgggactgcagctctttgtgaaggatcccgcgctccgcttgcctaccgtaacgaccgttgcggtccccgcaggatacgactggcgagacatcgtttcgtacgtgatcgaccatttcgatattgagataatgggaggtctgggaccgtccactggaaaggtcctccggattggcctcctcggttgcaatgcaactagagaaaacgtggatcgggtgaccgaagccctccgcgccgccctgcaacactgcccaaagaagaaactg

SEQ ID NO: 249239 - DNA, 1176 bp, synthetic construct
  misc_feature 1..1176: note = Description of Artificial Sequence: Synthetic coding sequence
  source 1..1176: mol_type = other DNA
atggcatctcataaacttctggtgacacctccgaaggcactgctgaagccgctgagtattcctaaccagctcctgttgggtcctggccctagtaacttaccgcctcgtattatggcagcaggcgggcttcaaatgattggttcgatgtcaaaggatatgtaccagattatggacgaaataaaagaaggcatccagtatgtgtttcagaccaggaacccgctgacgcttgttatctctgggtccggccactgcgccttggaagctgcactggtgaacgtgcttgagccaggcgacagttttctggtgggcgctaacggtatctggggccagcgggctgtcgatataggagaacgcatcggggctcgggtccatccaatgaccaaggaccctggaggtcattacaccctccaggaggtcgaagaaggactcgcgcagcacaagccggtcttacttttcctgacccacggagagtcaagcactggggtgttgcaaccactggacggctttggcgagctatgccacaggtacaagtgtctgttgttggtagattcagtagccagtttagggggcaccccactgtatatggacaggcagggcatcgacatattgtacagtgggtcacagaaagctctgaacgctccacctgggactagtttgatctcattttctgataaagctaaaaagaagatgtattccaggaagacaaagcctttcagcttctatctcgacattaaatggctggcgaacttctggggatgcgacgatcagccgcgcatgtaccaccatacgatccctgttatttccctgtactccctgcgtgagagccttgcgcttattgcagaacagggtttggaaaatagctggagacagcatcgagaagccgcggcctatctgcacggccgactacaggcgttgggtttacagctgtttgttaaagatcccgccctgaggttgcctactgtaactaccgtggcggtgcccgccggatatgattggagagacatcgtgagttacgtaattgaccatttcgacattgaaatcatgggtgggttgggtcctagcaccggcaaggtgcttcggatcggtctgctggggtgtaatgcaactcgggaaaacgttgatcgggtcaccgaagctctacgcgcggctctgcagcactgcccgaaaaagaagctt

SEQ ID NO: 249240 - DNA, 1176 bp, synthetic construct
  misc_feature 1..1176: note = Description of Artificial Sequence: Synthetic coding sequence
  source 1..1176: mol_type = other DNA
atggcctctcataagcttctcgtgactccaccgaaggccctcctcaagcccctgagtatcccgaatcaacttcttctggggcccgggcctagcaacctaccccctcggatcatggccgccggagggcttcagatgattggctcaatgagcaaagatatgtaccaaataatggacgagattaaagaaggtatccaatacgtattccagaccagaaacccactcacattggtgatttccggatccggacattgtgccctggaggccgcactggtaaacgttttagagcctggtgacagcttcctggttggtgcaaatgggatttggggccaacgcgccgtcgatattggggagagaataggggctcgagttcatcctatgacaaaagatcccgggggccactacaccttgcaggaggtggaggaggggctggcgcaacataaacctgtgctgttattcctaacacatggggagtcatccaccggagttcttcagccactggacgggttcggcgagctctgccatagatataagtgcctgctgctggttgacagtgtggcttcattgggggggactcctttgtatatggacagacagggaattgacatactgtactccgggtcccagaaagctctcaacgcccccccagggacgtcactcatttctttttccgacaaagccaaaaaaaagatgtactcacgcaagaccaaaccgttctccttctacctcgatattaaatggcttgccaacttttgggggtgtgacgaccagcctaggatgtaccatcatacgatccctgttatttctctgtactctctgcgagaaagtctggccctgatcgcagaacagggtctcgagaatagttggcggcagcatcgagaggcagccgcttacttgcatggacgccttcaggcccttggactgcaactcttcgtgaaggatcctgccctgagactgcctactgtgacaaccgtggccgtcccggccggatacgactggcgtgacattgtgagctacgtaatcgaccatttcgacatcgaaattatgggaggcctggggccctcgaccgggaaagtgttaaggatcggacttttgggctgcaatgccaccagagaaaacgtggaccgtgtcaccgaggccctgagagcggctttacagcactgtcctaagaagaagctc

SEQ ID NO: 249241 - DNA, 1176 bp, synthetic construct
  misc_feature 1..1176: note = Description of Artificial Sequence: Synthetic coding sequence
  source 1..1176: mol_type = other DNA
atggcctcgcacaagctgctggtgacgccaccaaaagccctgctgaagccgctgagcatccctaaccagcttttgcttggcccaggaccgtcgaatctccctccgcgcatcatggccgcggggggactgcagatgatcgggtcaatgtcgaaggatatgtaccagatcatggacgagatcaaggagggaatccagtacgtgtttcagacccgcaaccccctcacccttgtcatcagcggatcaggtcactgcgccttggaagccgccttggtgaatgtcttggagccaggggatagctttctggtcggagcgaatggtatctggggccagcgcgcggtggatatcggtgaacgcatcggagcacgggtgcatccgatgaccaaggatccggggggacattacactctgcaagaagtggaggaaggactggcgcagcacaagccggtgcttctgtttctcacccacggtgaaagcagcactggggtgctccaacctctggatggatttggagagttgtgccatcggtacaaatgcttgctcctggttgattcggttgcgtcgctggggggaactccactgtacatggacaggcagggaatcgacattctttacagcggctcccagaaggccctcaacgcccctccgggcaccagtctgatctccttctccgacaaagcgaagaaaaagatgtactcccgcaagactaagcctttttcgttctaccttgacatcaaatggctggcaaacttttggggttgcgacgatcaaccgcgcatgtaccatcacaccatccccgtgatctcactttactccctgcgcgagtcactggcgcttatcgccgaacagggactggaaaacagttggcggcaacacagagaggcagctgcttaccttcacggacgcctgcaggccttgggactccaattgttcgtgaaggatccagccctgcggctgccgaccgtgaccaccgtcgctgtgcccgccggatacgattggagagacatcgtgtcatacgtgatagatcacttcgatatcgagattatgggaggtctgggccctagcactggaaaagtcctcagaattggactcctgggatgcaacgcaaccagggaaaatgtcgaccgcgtgaccgaagcgctcagagccgctctgcagcattgtcctaagaagaagctg

SEQ ID NO: 249242 - DNA, 1176 bp, synthetic construct
  misc_feature 1..1176: note = Description of Artificial Sequence: Synthetic coding sequence
  source 1..1176: mol_type = other DNA
atggcctctcataaactgttggttaccccgcctaaggctttactgaaacccctcagtatccctaatcagctcctcctggggcctggcccttccaacctgccaccgagaatcatggctgccggcggccttcagatgatcggatctatgagcaaagacatgtaccagattatggacgagattaaggaaggcattcagtatgtgttccagactcggaatccactcacccttgtgatttcgggtagcggccactgcgcgttagaagctgcactagtgaatgttctggagcctggtgatagttttctggtgggagcaaatggcatttggggacagcgcgccgtggatatcggcgagagaataggagcacgcgtccaccccatgaccaaggaccccgggggtcactataccctgcaggaggtggaagaagggctcgcacaacataagcctgtgctgctgttcttgacacatggcgaatcctcaaccggagtgcttcagcctctcgacggatttggcgaactgtgccacaggtacaaatgcttgctcctggtggatagcgtggcgtccctggggggtacaccactgtatatggatagacaaggaatcgatatactgtatagcgggagtcagaaagctctaaacgcgcccccaggaacaagtctgataagcttttcagataaggccaagaaaaaaatgtatagcagaaaaacgaaaccattctccttttacctggatatcaagtggctggcgaatttttggggatgtgacgatcagccgagaatgtatcatcataccattcctgttatatccctgtatagcctgcgggagtcactcgctctgattgctgagcaggggctggaaaattcatggcgccagcatcgagaggccgccgcctacctgcacgggcggcttcaggctctcggcctgcaactgttcgtgaaggaccccgcactccgtctgccaaccgtgacgactgttgcagtccccgccggctatgattggcgcgacatcgtttcatatgtaatcgatcacttcgatatcgagattatgggagggttagggccctccactggcaaagtgctgaggattggcctgctgggctgcaatgccacgagagagaatgtggacagagtcacagaagccttgcgagccgcgctgcaacattgcccaaaaaagaaactc

SEQ ID NO: 249243 - DNA, 1176 bp, synthetic construct
  misc_feature 1..1176: note = Description of Artificial Sequence: Synthetic coding sequence
  source 1..1176: mol_type = other DNA
atggctagtcacaaattgctcgttactccaccaaaggctttgcttaagccgctttctatccctaatcagttactgttaggtcccggtccgtcaaacctgccacccaggatcatggctgcaggtgggctgcagatgattggttctatgagtaaggacatgtaccagataatggacgaaattaaagaaggcatccagtatgtgtttcagactcggaaccctctgacgttagtgatctcaggcagtggtcattgcgccctcgaggccgccctcgtgaacgtgcttgaaccaggggatagcttcttggttggcgccaatgggatctggggccagcgcgctgtggacattggtgaaaggatcggagcacgtgtccaccccatgactaaagatcctgggggtcattatacgttgcaggaagtcgaagagggacttgctcagcataaacctgtgctcctattcctgactcacggagaatcttccacaggtgttctgcagcccctggatggattcggtgagctttgccaccgatacaagtgcctcctgcttgtagattcggtggcaagcctcggcgggactccactgtatatggacaggcaggggatcgacatcctttacagtggtagccagaaagcgctgaacgccccgccagggacctcgctgatctcattcagtgataaggcaaagaaaaaaatgtattctcgtaaaacaaagccctttagcttttatctggacataaagtggctggccaacttttggggatgtgatgatcaaccaagaatgtatcatcatacaatccccgtgatctctctgtactctctgagagagagcctggccttgatagccgagcagggtctggagaatagctggagacaacatcgagaggcagctgcttatctccatggacgcctccaggctctcggtcttcagttgttcgtcaaagaccccgccctgcgtttgccgacagtgactaccgtggcagtgccagccggctacgactggcgggacatcgtatcatacgtaattgatcacttcgatatagagatcatgggtggtttggggccctcgactggcaaggtgctgcggatcgggttactgggttgtaacgcaacgcgggagaacgtcgaccgcgtgacagaagccctgcgcgctgctttacagcactgtcccaagaagaaactg

SEQ ID NO: 249244 - DNA, 1176 bp, synthetic construct
  misc_feature 1..1176: note = Description of Artificial Sequence: Synthetic coding sequence
  source 1..1176: mol_type = other DNA
atggcctcacataagttgctggtgacgccacccaaggcgctcctcaagccgctgtcgatcccgaaccagctcctcctgggaccggggccatcgaacctgccaccgcggattatggccgctggcggactgcagatgatcggttccatgagcaaggacatgtaccagattatggacgagattaaggaaggaatccagtacgtgttccagacccggaatccgctcaccctcgtgatctccggatcaggacattgcgccctcgaggccgctctggtgaatgtgcttgaaccaggggatagttttctcgtgggagcgaatggcatctggggacaacgggcagtcgatattggtgagaggatcggcgctcgcgtccatcctatgaccaaagaccccggaggacactacacgcttcaggaggttgaagaaggactggcccagcacaagccggtgcttctgtttctgacgcatggcgagtcaagcacgggcgtgctgcaaccgttggatggcttcggcgagctctgccatcgctacaaatgcctccttctggtagactccgtggcaagcctgggaggaactccactgtacatggaccgccaggggatcgatatcctgtactcaggatcgcaaaaggccctgaatgcacctccgggaacttcgcttatctccttcagcgataaggccaaaaagaaaatgtactcaagaaagactaaacctttcagcttctatctggatatcaaatggctcgccaacttttggggttgcgatgatcaaccccggatgtaccaccataccatccccgtgatctcactgtactcactgcgcgagtccctggcgctcatcgctgagcagggcctcgaaaactcctggcggcaacacagagaagcagcagcatacttgcatggacgattgcaggcactcggactgcaacttttcgtgaaagacccagccctgagactcccaaccgttaccactgtcgccgtgccggccggctacgactggcgcgacatcgtctcgtacgtgatcgaccatttcgacatcgagattatgggtgggcttggaccatccactggtaaggtcttgcgaattggccttcttgggtgtaacgccactcgtgagaacgtggaccgagtgaccgaggctctgagagcggcgctccagcattgcccaaagaagaagctc

SEQ ID NO: 249245 - DNA, 1176 bp, synthetic construct
  misc_feature 1..1176: note = Description of Artificial Sequence: Synthetic coding sequence
  source 1..1176: mol_type = other DNA
atggcgtcacacaagcttctggttaccccccccaaggcacttttgaagcctctgtcaataccgaatcagcttttgcttggacccggaccttctaacttgccccccagaatcatggccgctggtggtttgcagatgatcggctctatgtcaaaggacatgtaccagatcatggatgaaatcaaggaaggaattcaatacgtatttcagactaggaatccgttgacgctcgtgattagtggctcaggccattgtgctttggaggcggctttggtgaacgttctcgagcccggcgactcttttcttgtaggtgctaacggcatctggggccaaagggctgtggatatcggtgagaggataggagcccgcgtacatccaatgactaaagatcccggaggtcactataccttgcaggaggtggaagagggtcttgctcaacacaaacctgtccttctgttcctgactcatggagagagtagtacaggcgtactgcaacctttggatggcttcggtgaactgtgccaccgctacaagtgcctcctcctcgtagacagcgttgcatcactgggtggcacaccgctgtacatggacaggcagggaattgatattctctactcaggctcacaaaaagctttgaatgcccctccaggcacctctcttatatccttctctgacaaagcaaaaaagaaaatgtacagtaggaagaccaagccgttctctttctacctggacattaagtggcttgctaatttttggggctgtgacgaccagccaagaatgtaccatcacaccatccccgttatatctctttatagtctccgcgaaagcctggctctcatcgcggagcagggcctggaaaattcctggagacaacaccgcgaagccgcagcttatctgcacggcagattgcaggcgttgggtcttcagttgttcgtaaaagaccctgctctgagactgcctaccgtcaccaccgtcgcagtgccggccggttatgattggagggatattgtctcatacgtgatcgaccacttcgacatcgaaatcatgggtggtctcggtccaagtacgggcaaagtactgagaatcggtctccttggctgtaatgccacgagagagaatgtcgacagagtaactgaagctcttagggccgctctgcaacactgtccaaagaaaaagctc

SEQ ID NO: 249246 - DNA, 1176 bp, synthetic construct
  misc_feature 1..1176: note = Description of Artificial Sequence: Synthetic coding sequence
  source 1..1176: mol_type = other DNA
atggcctcacacaagctgctagtcacaccacctaaagcgttgcttaaacctctgtctatcccaaaccagctccttttggggcctggaccctcaaacctccctcccagaattatggccgcaggtggactgcagatgatcggtagcatgtcgaaagacatgtatcagatcatggacgaaatcaaagaaggaatccagtacgtttttcagactagaaatcctcttaccctcgtgatctccggatcaggccattgcgccctagaagccgccctggtgaatgtgttagaacctggtgattcgtttctggtcggggcaaacggaatctggggccagagagcagttgatatcggagagagaataggagcccgcgtgcaccccatgactaaagaccccggcgggcactacacactgcaggaggttgaagaaggattggcacagcacaagccagtcctcctttttctgacacacggtgaaagttcaacgggagtcctgcagccactcgatggcttcggcgagctgtgccatcgctataagtgcctgctgctggtggattccgtggcctcgctaggaggcaccccgctgtacatggatcggcaaggcattgacatcttatactctggaagtcagaaggctctcaatgcaccccctggaacatctctgatctcttttagcgacaaagccaagaagaagatgtacagtagaaaaacgaaacccttttctttctatctggacataaaatggttagcgaatttctggggttgtgacgatcagcctagaatgtaccatcacacgatccccgtcataagtctttattctttgcgagagtcactcgcattgatagccgagcagggtcttgaaaactcctggagacagcaccgagaggccgccgcatacttgcacggaagactccaagccctgggtctgcagctgttcgtgaaagatcctgccctgaggttaccaaccgtgactacagtggctgtgcccgctggttacgattggagggatattgtcagttatgttatcgaccacttcgatatcgagattatggggggattgggtccctctactggtaaggtcctccgaatagggctcctgggttgcaacgcaacacgcgaaaacgtagatcgcgttaccgaggccctgcgtgcagctctgcagcattgccccaagaagaagttg

SEQ ID NO: 249247 - DNA, 1176 bp, synthetic construct
  misc_feature 1..1176: note = Description of Artificial Sequence: Synthetic coding sequence
  source 1..1176: mol_type = other DNA
atggcatcgcataaactgcttgtcaccccacccaaagcacttctgaagcccctgtccattcccaatcagctcttgctcggacctggaccaagcaacctcccacccaggattatggcagcaggtggtctgcagatgattggcagcatgagcaaggacatgtaccagatcatggacgaaatcaaggaaggtatccaatacgtgtttcaaacccgcaacccacttacgcttgtcataagcggatccggtcactgtgcgctggaagcagctcttgttaacgtccttgaaccaggtgattcgtttcttgtgggcgcaaacggaatttgggggcagagagcggtggatatcggagagcgcattggcgctcgtgtccatcccatgaccaaggatcctggtggacattacaccttgcaggaagtcgaagaaggactcgcacaacataagcctgtgctgctttttctgactcatggtgaatcctcgactggcgtgctgcaacccctggacggatttggagaactttgtcatcgatacaagtgcctccttttggtcgattccgtggcatcacttggcggtaccccgctgtatatggacaggcagggtattgatatcctttactccggaagtcaaaaggctctcaatgcaccccccgggacctcattgatctcattttcagacaaggcaaagaagaagatgtactcccggaaaacgaagccgtttagcttctacctcgacattaagtggctggcaaatttctggggttgcgatgaccagcctcggatgtaccaccataccatccctgtgatatcactgtacagccttagagaatccttggcgctcatagctgagcaaggactcgaaaattcttggcgccagcatagagaggccgcggcgtacctgcatgggcggctgcaggcacttggacttcagctttttgtcaaggatcctgcattgcgacttcccactgtcaccactgtcgctgtgccagcaggatatgactggcgcgatattgtcagctacgtgattgatcactttgatatcgagattatgggtgggctgggcccatccaccgggaaggtgctgagaattggacttctcggttgcaatgcaacccgagagaatgtcgatcgggtcactgaagctctgagagccgcactccaacattgtcccaagaaaaaactt

SEQ ID NO: 249248 - DNA, 1176 bp, synthetic construct
  misc_feature 1..1176: note = Description of Artificial Sequence: Synthetic coding sequence
  source 1..1176: mol_type = other DNA
atggccagccacaagctcctcgtgactccgcctaaagcactcctgaagccgctcagcatcccgaaccagctgctgctggggccgggaccttccaaccttccgccgagaatcatggcagcaggaggattgcagatgatcggctcaatgagcaaagacatgtaccagattatggatgaaatcaaggaggggattcagtacgtgttccaaaccagaaaccctctgactctggtgatttcaggctcaggccattgcgccctggaggccgcacttgtgaacgtcctcgaacctggggactcattcctcgtgggcgccaacggaatctggggtcaacgggctgtcgatattggagaaaggatcggagcgagggtgcaccccatgaccaaggatccaggaggacattataccctgcaagaggtggaagaagggctggcgcagcacaaaccggtcctgctctttcttacccacggtgaaagctccaccggggtgctgcagccgctggacggattcggggaactgtgtcacaggtacaagtgcctgctgctggtcgattcggtggctagcctcggaggaaccccgttgtacatggaccgccagggtatcgacatcctgtactcaggaagccagaaagcactgaatgccccgccgggaacttcacttatctcattctcggataaagcaaagaagaagatgtactctaggaaaactaagccattcagcttctacctggacatcaagtggctggcaaatttctggggctgcgacgaccagccgcgcatgtatcaccataccattcctgttatctcgctgtactccctgcgggagtcattggccctcattgcggaacagggcctcgaaaactcctggagacaacatagagaggcggcggcatacttgcacggccgcctccaggcacttggactccagctgttcgtgaaggatcctgccctgcgcctcccgaccgtgactacggtggcagtgccggccggatatgactggcgcgacatcgtctcctatgtcatcgaccactttgacatcgagatcatgggaggcctgggaccgagcacggggaaggtgctgcgcattggattgctgggatgcaacgcaactcgggaaaacgtcgatcgcgtgactgaagcgctgcgcgctgctctccaacattgtccaaagaaaaagctg

SEQ ID NO: 249249 - DNA, 1176 bp, synthetic construct
  misc_feature 1..1176: note = Description of Artificial Sequence: Synthetic coding sequence
  source 1..1176: mol_type = other DNA
atggcatcccataaactactcgttacacctcctaaagctcttcttaaaccactctccatccccaatcagctgctattggggccaggaccaagtaatctccctccccggataatggcagccggggggcttcagatgatagggtccatgtccaaagatatgtaccagatcatggatgaaataaaggaagggatacagtatgtgtttcagacacgaaatccacttacactggtcattagtgggtcaggacactgtgctctggaagccgccctggtgaatgttctggaaccgggggatagtttcctggtgggagccaacgggatctgggggcagcgagctgttgatatcggggaaagaatcggagctagagtgcatcccatgactaaagacccaggagggcactacacattacaggaagtggaagaaggactcgctcagcataagccagtgctgctgtttctgactcacggggagtcttccacaggggttctacagccacttgatggatttggagagctatgtcatcgatataaatgtctgctgcttgtagattccgtggcttcccttggaggaacaccgttatatatggataggcagggaatcgatattttgtattcaggatcccagaaggccctcaatgcccccccagggacttctctcatctctttttctgataaggctaaaaaaaaaatgtatagtcgcaaaactaaacccttttctttttatttagatatcaaatggcttgcgaatttctgggggtgtgacgatcagcctcgcatgtatcatcatacaatccccgttatttctttatattcactgcgggaatccctagcccttatcgcagagcagggactcgaaaactcgtggcggcagcacagggaagccgcagcatatctccacgggcggctccaagccctcgggctgcagctgtttgtaaaagatcctgccctccgacttccaacagtgactacagtggccgtaccagctggatatgactggagggacatagtatcctacgtcattgaccacttcgatatcgaaatcatgggagggctggggccttcaacagggaaagtgcttaggattgggcttctggggtgtaacgccacaagggagaacgtggatagggtcacagaggcccttcgagccgctctgcagcactgccctaaaaagaaattg

SEQ ID NO: 249250 - DNA, 1176 bp, synthetic construct
  misc_feature 1..1176: note = Description of Artificial Sequence: Synthetic coding sequence
  source 1..1176: mol_type = other DNA
atggcgtctcataaacttctagtgacgccgccaaaggcattgctgaagccgctttcaatccccaaccaactgctactcggcccaggtccctctaacctgcccccgcgcattatggctgccgggggactgcagatgattggctctatgtccaaagatatgtatcagatcatggatgagatcaaggaaggcatccagtacgtgttccagactcgaaatccgcttacgttggtcatttctggtagtggtcactgtgcattagaggctgccttggtcaatgtgctcgaacccggggacagttttctggtgggagccaatggaatctgggggcagcgggccgtagacattggcgagcggatcggggcccgcgttcacccaatgacgaaggatcccggtggccactacactctacaggaagtggaagaaggcctcgcccagcataagccagtgctgttattcctaacacatggtgaaagctccactggggtcctgcagcccctagacggattcggcgagctatgtcaccgctataagtgcttgctactagtggattccgtagcaagcctgggaggcacaccgctgtacatggaccggcaggggattgatatcctgtattctgggagtcagaaagcattgaatgcacctccgggcacaagcttgatctccttttctgacaaagccaagaagaagatgtactcccggaagaccaaaccgttctccttttacctggatatcaagtggttagctaacttttggggatgtgacgaccagcctaggatgtaccatcacactattccggtgattagcctttactccttgcgggagtcattggctcttatcgctgagcagggcttggagaactcttggcggcagcatcgcgaggccgcagcttacctgcacggcaggcttcaggctttagggctgcagctgttcgtgaaagacccagccctccggctgccaactgtgactacagtggcggtcccagccggctacgattggcgcgatattgttagctacgtcatcgaccacttcgacatagagataatggggggacttgggccttcgacaggcaaggtgctgcgcattggcctgttaggatgcaacgctacccgggagaatgtcgaccgggtcacagaggccctgcgcgctgccctgcaacactgtcctaagaaaaaactg

SEQ ID NO: 249251 - DNA, 1176 bp, synthetic construct
  misc_feature 1..1176: note = Description of Artificial Sequence: Synthetic coding sequence
  source 1..1176: mol_type = other DNA
atggcctcccacaagttactagtcaccccaccaaaggcactactcaagcctctgagtatccctaaccagctcctgctgggccccggtccctctaacctgccaccccgaatcatggcagccggcggcctgcagatgattgggagtatgagcaaggatatgtatcaaatcatggatgagattaaagagggcattcagtacgttttccagacccgaaatccactgaccctcgtcatcagcggctctggccactgcgccctggaagccgctctggtgaacgtgctggagcctggagacagttttctggttggtgctaacgggatttggggacaaagagccgttgacatcggagaaaggattggcgctcgagtccatccaatgactaaagatccaggtggccactatactttgcaagaggtggaagagggcctggcccaacacaagccagtgctgttattcttaacccacggcgaatctagtacaggtgttttgcagcctctggacggattcggcgagttatgccacaggtacaagtgcctgctcctcgtcgatagcgtggcctccctgggtggcacccccctatatatggacaggcagggaatagacatcctgtactccggctcacagaaggccttaaacgcccctcctggtaccagtctaataagctttagtgataaagccaaaaagaagatgtacagtcgcaagaccaagccattctccttttacctggacatcaaatggttagccaacttctgggggtgcgacgatcaacctaggatgtaccatcacacaataccagtgatttcactctatagtctgagggagtccctggctctgatcgctgaacagggtctggagaactcttggcgccaacatcgggaggctgctgcatacttacatgggcgcctgcaggctctgggcctgcaactgtttgtcaaagaccctgctctgcgtctccctactgttaccacagtcgccgtccctgctggatacgactggcgagatatcgtgagttacgtgatagatcattttgatatagaaatcatgggggggctgggccctagtactggcaaagtgctgagaatcggcttgctgggctgtaacgccacaagagagaatgtggaccgggtcacagaggctctgagagcagccctccagcattgcccaaagaaaaagctg

SEQ ID NO: 249252 - DNA, 1176 bp, synthetic construct
  misc_feature 1..1176: note = Description of Artificial Sequence: Synthetic coding sequence
  source 1..1176: mol_type = other DNA
atggcgagccataagctcttggtgactccaccgaaggccctgctgaagcctctaagcataccaaatcagcttctcctcggcccaggacccagtaacctgcctccccggattatggccgcggggggcctgcagatgatcggctcgatgtcgaaagatatgtaccagattatggatgaaatcaaggaaggaattcagtatgtgttccagacgcgtaatcccctaacccttgtaataagtgggtcaggtcactgtgctctggaggctgctctggtgaacgtgctcgagcctggggactccttcctcgtaggagctaatggcatttggggtcagcgagccgtagacattggcgagaggattggcgctcgtgtgcatcccatgacgaaagaccccggaggccattacaccttgcaggaggtagaggaggggctggcacaacacaagccagtgttgcttttccttacccatggagagtcatcaactggagtgctgcagcccctcgacgggtttggtgagctgtgtcatcggtacaaatgcctgctgcttgtggacagtgtggcctccttgggaggtaccccactttacatggacagacagggcatcgatatcctttactccggctctcagaaggccttgaacgctcctcccgggactagcctgatttcattttccgataaagccaaaaaaaagatgtattcccggaaaaccaaaccattttccttctacctagatatcaagtggttggccaacttctggggctgtgacgaccagccacgaatgtaccaccacactatccccgtcatttctctctactcactgcgggaatcactagcactgatcgctgaacaagggctcgaaaactcttggagacaacaccgcgaagccgcagcatatttacatggcagattgcaagccctcggacttcaactttttgtgaaagatccggccctgcgcctccccacagtgaccaccgtcgctgtgcctgcagggtatgactggcgggacatcgtgtcctatgtgatcgaccacttcgatatcgagatcatgggaggtctgggtccaagcactggcaaggtgcttcggatcggcctgcttggttgtaacgccaccagagagaatgtggaccgcgtgactgaggcacttcgggccgcactccagcactgtccaaaaaagaaactc

SEQ ID NO: 249253 - DNA, 1176 bp, synthetic construct
  misc_feature 1..1176: note = Description of Artificial Sequence: Synthetic coding sequence
  source 1..1176: mol_type = other DNA
atggcatcgcataaacttctggtcaccccaccgaaggccctgctgaaacccctttcgatccccaaccagctgctgctgggaccgggcccatcgaacctgccgccgcggattatggccgcgggaggactccagatgatcggatccatgagcaaggacatgtaccagattatggatgaaatcaaggagggaatacaatacgtctttcagactcgcaatcccttgacccttgtgatctccggttctggacactgcgctctggaggctgcccttgtcaatgtgctggagcctggcgattctttcctggttggagccaatggaatttgggggcaacgggcggtggatatcggcgaaaggatcggcgcaagagtgcatcccatgactaaggacccgggaggccactacaccctgcaagaggtggaagagggcttggctcaacataaaccagtcctccttttcttgactcacggagaatccagcacgggcgtcctgcagcctctcgacggtttcggagaattgtgtcaccgctacaagtgcctcctgctggtggatagcgtggcgtcacttggagggacccccttgtacatggaccggcagggaatcgatattctgtactccgggtcacagaaagccctgaacgccccaccgggcacctcattgatctcattctccgacaaggccaagaagaaaatgtattcaaggaaaaccaaacctttctcgttctacctggacatcaagtggcttgctaacttttggggatgtgacgatcagcctcggatgtatcaccacacgatcccagtgatctctctctactccctcagagagtcgctcgctctgatcgcggaacagggattggaaaactcgtggcgccagcacagggaagccgccgcatacctccatggccgcctccaagccctgggacttcaattgtttgtgaaagacccagcactccgactcccgaccgtgactactgtggctgtgccggcggggtacgattggcgcgacatcgtttcctacgttatcgatcacttcgatatagagatcatgggaggcctggggccgtcgacgggcaaggtcctgaggataggactgctgggctgcaacgccactcgggaaaatgtggacagagtgaccgaggccctcagggcagcgctccaacattgcccgaagaagaagctg

SEQ ID NO: 249254 - DNA, 1176 bp, synthetic construct
  misc_feature 1..1176: note = Description of Artificial Sequence: Synthetic coding sequence
  source 1..1176: mol_type = other DNA
atggctagccataagttgctcgtgacgcccccaaaagccctattgaaaccactgtccattccaaatcagttgctgcttggccccggaccctcaaacttgcccccacgtataatggccgctggcggtctgcagatgataggctctatgagcaaagatatgtaccagataatggatgaaattaaagagggcattcagtacgtcttccagacccggaacccacttaccctggtcatttctggcagcggccattgcgcactggaagcagccttagtcaatgtgctggagccgggcgatagctttctggtgggtgcaaacgggatctgggggcagagggcggtggacataggcgaaaggatcggtgctagagtgcaccctatgacgaaggacccaggcggacattatacactgcaggaggtcgaggagggactggcacagcacaaaccggtgctgctgttcctgacccatggtgagtcttccacaggagtgctgcagccactggatggcttcggcgaattgtgtcaccggtataaatgcctgcttctggtggattctgttgcaagtcttgggggcaccccattgtacatggatagacaaggaatagacattttgtattcagggagccaaaaggcattaaacgctcctcctggcacgtcactcataagtttctcagacaaggcaaaaaaaaaaatgtacagcaggaagaccaaaccgttttctttctacctagacatcaaatggctcgccaacttttggggatgtgatgatcaaccccggatgtaccaccataccatcccagtgatctctctgtactccctaagggaatccctcgcgttgatcgctgagcaaggccttgagaactcatggaggcagcatcgggaggcagccgcctacttacacggtcgcctgcaagctttggggctgcagctcttcgtaaaagatccagctctccgattgccaaccgtgactacagtagctgtccccgccggctacgactggcgggacattgtgtcttacgttatagaccacttcgatatcgaaatcatgggcgggctgggccctagtacaggcaaggtcctccgaatagggctgcttggatgcaatgctactagggagaacgtggaccgagtgacagaggccttgcgtgccgcattacagcactgtcctaaaaaaaaactg

SEQ ID NO: 249255 - DNA, 1176 bp, synthetic construct
  misc_feature 1..1176: note = Description of Artificial Sequence: Synthetic coding sequence
  source 1..1176: mol_type = other DNA
atggcatctcataagctgttagttaccccccctaaggcattgctgaagcctttaagtattcccaatcagcttttactaggccctggcccttcaaatctccccccacggatcatggcggctggtggacttcagatgattgggagtatgagtaaagatatgtaccaaatcatggatgagattaaggagggaatccagtatgtttttcagacccggaatcctctaactttggtcatcagcggttccggccattgcgctcttgaggccgcactggtgaatgtcctggagccaggcgactcgttccttgtaggcgcgaacggtatctggggacagagagctgtggatattggagagagaattggcgctcgggtgcaccccatgaccaaggaccccggcgggcactatactctgcaggaggtggaagagggactggctcaacataagcccgtgctattatttctcactcacggtgagtccagcaccggtgtactccagccactggacggtttcggcgaactgtgccatagatacaagtgtctgctgctggtcgactccgtagcatcactcgggggcactcccctttatatggatcgccaggggatagacatcctctactcggggagccaaaaggcgctaaacgcaccaccggggacatctctcatatccttcagcgacaaggccaagaaaaagatgtacagtcgtaagacaaagcctttcagcttttacctggacattaaatggttggccaacttctgggggtgtgatgaccagccacgcatgtatcaccacaccatcccagtcatcagtttgtacagcctgcgagagtctctggcattaatagcggagcagggcctggagaattcctggcgtcagcacagggaagcggcagcctacctgcatgggcgtctccaggccctgggattgcagctatttgtgaaagatcctgccctccggttacctaccgtcacaaccgttgctgtccccgctggctacgactggcgtgatatcgtctcttatgtgatagatcatttcgatattgagattatgggcggattgggtccatcaacgggaaaggtgctccgcatcgggctgctggggtgtaatgccactcgggagaacgtcgaccgggtgacggaagccctgcgggcagcactgcagcactgccccaagaagaagctc

SEQ ID NO: 249256 - DNA, 1176 bp, synthetic construct
  misc_feature 1..1176: note = Description of Artificial Sequence: Synthetic coding sequence
  source 1..1176: mol_type = other DNA
atggcaagccataagttgcttgtcaccccgccaaaggcactgctcaaaccactttcgatccctaatcaacttctgctgggccctggtccgtcgaacctgccgcccagaattatggcggcaggtggactccagatgattggatcgatgtccaaggatatgtaccaaatcatggatgagataaaagagggaattcagtacgtgtttcagacccgaaaccccctgacccttgttattagcggcagcggccattgcgcccttgaagcggcgctggtcaacgttctggaaccaggggattcctttctggtgggagccaacgggatttggggacagcgagcagtcgacatcggggaaaggattggagcacgggttcaccccatgactaaagatcctggtggacattacaccctgcaggaagtggaagagggtcttgcacaacataagcctgtgctgttgtttttgacgcatggtgaatcgagcaccggggtgcttcagccgcttgatggatttggtgaactgtgtcacaggtacaaatgccttttgctcgtggactcagtcgcaagcctcggtgggacgccactgtacatggataggcagggcattgatatactttactccggtagccagaaggcacttaatgcacctccgggtacctcactgattagcttttcagataaggccaagaaaaagatgtactcccgcaaaaccaagcctttttcgttttacctcgacattaagtggctcgccaatttctggggctgcgatgatcaacctcggatgtatcatcacaccatcccagtgattagcctgtactcattgcgggagtccttggcactcatcgcagagcaagggctggaaaactcatggagacaacaccgggaagcggcagcctacctgcatgggcggcttcaagcactcgggcttcaactctttgtgaaagaccctgcacttcgcctccctactgtgaccactgtggccgtgccggcaggttatgactggagagatatcgtgagctacgtgatcgaccattttgatatagagataatgggcgggctgggaccctccaccggaaaggtgctgcgaattggactgcttggatgtaacgcaactcgggaaaacgtcgaccgggtgacggaggccctgagagcagcgctgcaacactgcccaaagaagaagctg

SEQ ID NO: 249257 - DNA, 1176 bp, synthetic construct
  misc_feature 1..1176: note = Description of Artificial Sequence: Synthetic coding sequence
  source 1..1176: mol_type = other DNA
atggcttctcacaagttgcttgtgactccaccgaaggctcttctgaaaccgctctctatccctaatcaactgctcctgggaccgggaccgtcgaacctgcccccgcgcatcatggctgctgggggcctccagatgatcggatctatgtcgaaggacatgtaccagattatggacgaaatcaaagaaggaattcagtacgtctttcaaacccgcaatcctctcaccctggtcatctcaggcagcggccactgcgcgttggaagcggcgttggtcaacgtgctcgagccaggtgactccttcctcgtgggcgcaaacggcatctggggacagagggcagtcgatatcggcgagcggatcggcgcgcgggtgcatcccatgaccaaggatccgggcggacattacaccctgcaggaagtggaggagggactcgcacaacacaagcctgtgcttctgttcctgacccatggagagtcctccactggtgtgctgcagccgctcgacggatttggagagctctgccaccgctataagtgcctgctccttgtggattccgtcgcctccctcggaggaactcccctctacatggatagacaaggcatcgacatcctgtactcaggtagccagaaggccctgaatgccccaccaggcacttcgcttatctccttctccgataaagccaagaagaaaatgtactccagaaagactaagccattttcgttctatctcgacattaagtggctggcaaacttctggggttgcgacgatcagccgagaatgtaccaccatacgatcccggttatttctttgtactcgctccgggaatcactcgcacttatcgcagaacagggtctggagaacagctggcggcagcaccgcgaagccgcggcctatcttcatggtaggctgcaggcgctgggactgcaactgtttgtgaaggacccggccttgcggctgcctaccgtcactacggtggccgtcccagcgggttacgactggcgagacatcgtaagttacgtgatagaccattttgatatagaaatcatgggaggcctcggacctagcactgggaaggtgctgaggatcggcctgctgggatgtaacgccacccgcgaaaacgtggaccgggtcaccgaggctctgagagcggccctgcaacattgcccgaaaaagaagctg

SEQ ID NO: 249258 - DNA, 1176 bp, synthetic construct
  misc_feature 1..1176: note = Description of Artificial Sequence: Synthetic coding sequence
  source 1..1176: mol_type = other DNA
atggcctctcacaagctgttggtcacccctccgaaggcgctcctgaaaccgctgtccatcccgaatcaactcctcctggggcctggaccatccaacctcccacccagaatcatggccgctggaggcctgcagatgatcggatcgatgtctaaagacatgtaccagataatggatgaaatcaaagagggtattcagtacgtgttccagaccaggaacccgctcaccctggtgatctcagggtcagggcactgtgccctggaagccgccctcgtgaacgtcctggaaccaggtgattcgttcctcgtaggagctaatggaatctggggccagagagccgtggacattggcgaacggatcggcgctagggtgcatccgatgaccaaggacccgggaggccactacactctgcaggaggtggaagaaggactcgctcaacataagccggtgctgctcttcctgacccatggagagtcgtccactggtgttctccaaccgctggatggattcggagagctctgccaccgctacaagtgccttttgctggtggactccgtcgcctcgctgggcggcactccattgtacatggatagacagggaatagatatcctctatagcggatcacagaaggcactgaatgcccctccaggaaccagcctgatttcgttctcagataaggccaaaaagaagatgtactccaggaaaaccaagccattcagcttctatctggacatcaagtggctcgccaacttttggggatgcgacgaccaacctcgaatgtaccatcacaccatcccggtcatctcactgtacagcctgcgcgaatcgctggccttgatcgcggaacaggggctggagaactcgtggcgccagcaccgcgaagccgctgcttaccttcatggccggctgcaggcgttggggctgcaactgttcgttaaggacccagccttgcggctcccgaccgttactactgtggccgtcccggctggatacgactggcgcgatatcgtttcatacgtgattgaccacttcgacatcgagattatgggaggattgggcccttcgacgggcaaagtgcttcgcatcggcttgctgggttgtaacgctacccgcgagaacgtggatcgcgtgacggaggctctgcgggcagccttgcaacattgcccaaagaaaaagctc

SEQ ID NO: 249259 - DNA, 1176 bp, synthetic construct
  misc_feature 1..1176: note = Description of Artificial Sequence: Synthetic coding sequence
  source 1..1176: mol_type = other DNA
atggcgtcgcacaaactcctcgtgactccgcccaaagcgctcctgaagccactgtcgatcccaaatcagctccttcttggaccgggaccgtcaaacctcccacctaggattatggccgccggaggactgcaaatgatcggctccatgtcaaaagatatgtatcaaatcatggacgaaatcaaggagggaatccagtacgtgtttcagacgaggaacccactcacgctcgtcatttcaggaagcggccattgcgctctggaagcagcattggtgaacgtgcttgagccgggagattctttcctggtgggggcaaacgggatctggggacagagggctgtagatatcggtgagcgcattggagcgcgtgtgcaccctatgaccaaggatcccggaggacactacaccctgcaggaggtggaggaaggactggcccagcataagccggtgctgctgtttctgacccacggtgagtcgtcgaccggggtgctgcagccgctcgatggattcggagagctctgtcatcgctacaaatgtctgcttctggtggactccgtggcatccctgggaggtactcctctgtacatggacagacaaggaatcgatatcctgtactccgggtcacagaaggccctcaacgctccgccaggcactagccttatctcgttctccgacaaggcaaaaaagaagatgtactcgagaaagaccaagccattctcattctacctcgacattaagtggctcgctaacttctgggggtgcgacgaccagccaagaatgtaccatcacactatcccggtcatttccctgtactcccttcgggaaagcctggcacttatcgctgaacagggccttgagaacagctggcgacaacatagagaagccgcggcatacctgcatggaaggctccaggcactgggactccaactcttcgtcaaagatcctgctctgcgcctcccgaccgtcacgaccgtggcggttcctgcaggttacgactggcgcgacatcgtgtcatatgtgatagaccactttgatatcgaaatcatgggaggcctgggaccttcgaccggaaaggtcctgcgtatcggactgctgggatgcaatgccactagagagaatgtggacagagtcaccgaagcactgcgcgcggccctgcaacactgcccaaagaaaaaactc

SEQ ID NO: 249260 - DNA, 1176 bp, synthetic construct
  misc_feature 1..1176: note = Description of Artificial Sequence: Synthetic coding sequence
  source 1..1176: mol_type = other DNA
atggcttctcacaagctcctggtaacgcctccaaaggcactgctgaagcctctgtcaattcccaatcagctgctgttaggccccgggcctagtaatctgccacccaggatcatggcagcagggggtttgcagatgatagggtcaatgagtaaagacatgtatcagatcatggatgagattaaagagggcatacaatatgtgttccagacgcgtaatccgctgacgctcgttatcagtgggagtggacactgcgcactagaggccgcccttgtgaatgttcttgagcctggagattcattcctggtgggggccaacggcatctggggccagcgggctgttgatattggcgagcggatcggggctcgagtgcacccaatgaccaaggatcctggaggccattataccctacaggaagtcgaggaaggtcttgcacagcacaaacctgtgctgctcttcctgactcatggggaaagctctacgggggtgctccagcctcttgacgggttcggggaactgtgccatcgctataagtgtctgttactggtagattcagtggcctctttaggaggtacgccactctacatggatcggcagggaatagacatactctactctggcagtcaaaaggctctgaatgcccctccagggacgagtctcatcagcttcagcgataaggcaaaaaagaaaatgtacagcaggaagaccaaaccattcagtttctatctggatatcaaatggctcgctaacttttggggatgtgatgaccagccgaggatgtaccatcatactatacccgtgattagcctctatagcctgcgcgaatctttggctctcatcgccgaacagggcctggaaaatagctggcgccagcaccgcgaggcggcggcctatctgcatggaaggctccaggcattaggcctgcagttgtttgttaaagacccagcactgagactccctaccgttaccactgtggcagtgcccgcgggctatgactggagagatatcgtcagttatgtgatcgaccattttgatatcgagatcatgggcggtcttgggccatccacagggaaagtcctgcggatcggtcttttagggtgtaacgctacgcgcgaaaatgtggacagggtcacagaggccttaagggccgctcttcagcattgcccaaaaaaaaagctg

SEQ ID NO: 249261 - DNA, 1176 bp, synthetic construct
  misc_feature 1..1176: note = Description of Artificial Sequence: Synthetic coding sequence
  source 1..1176: mol_type = other DNA
atggcatcgcataagctccttgtcactcctcctaaggccctgctgaaacccctctctattcccaaccagcttctgctcggacccggacctagcaacctgccacctagaattatggccgcgggaggtttgcaaatgatcggatctatgtcgaaagacatgtaccaaatcatggatgaaatcaaggaaggaattcagtatgtgttccagactagaaatcctctcactcttgtgattagcggctccgggcactgtgcactggaggcagcgttggtgaacgtcctcgaaccgggagattcgtttctcgtcggtgcgaacgggatttggggtcaaagggcagtggacatcggagaacggattggtgcccgggtgcatcctatgaccaaagatccaggagggcactacaccttgcaagaggtcgaagaaggtctggcccaacacaagccggtgttgcttttccttactcacggagaaagctcaaccggggtcctccaaccactcgatggatttggtgaactgtgccacagatacaagtgtttgcttcttgtggattccgtggcctcgctcggcggaacccccctctacatggatcggcagggaatcgacatcctgtattcgggctcccagaaagcactcaacgcaccgcctggtaccagcttgatctcgttctcggacaaagccaaaaagaaaatgtactccagaaagaccaagccattttcgttttacctcgatatcaagtggctcgcaaacttttgggggtgtgatgatcagccacggatgtaccatcacaccattccagtgatctcgctgtactcgcttcgcgagtccctggcactgatcgcggagcagggacttgagaatagctggagacaacatagagaagctgcagcataccttcacggacgtctgcaggcactgggcctccagctgtttgtgaaggatcctgcacttagactcccgaccgtgacgactgtcgctgtgcccgcaggatacgactggcgcgatattgtgtcgtacgtgattgaccactttgatatagaaatcatgggaggactggggccgtcgaccggcaaggtgctgaggatcggtctgctgggctgtaacgccactagagaaaatgtggatcgggtcacggaggcgcttcgagcggcacttcagcactgtcctaagaagaagctc

SEQ ID NO: 249262 - DNA, 1176 bp, synthetic construct
  misc_feature 1..1176: note = Description of Artificial Sequence: Synthetic coding sequence
  source 1..1176: mol_type = other DNA
atggcttcccacaagctgcttgtcacacctcccaaggcattgctgaagcccctttccatacctaaccagctgctgcttggccctgggccttccaatctgccccctaggataatggccgctgggggcctccagatgatcgggtccatgtccaaggacatgtaccagattatggatgagatcaaggagggcatacagtacgtctttcaaaccagaaatccactcaccttggttattagtggcagcggccactgcgctttggaggcagccctggttaatgtgctggaaccaggcgatagcttcttggtgggagccaacggaatatggggtcagcgcgccgtggacataggcgagaggattggagcaagggtgcacccaatgacaaaagaccctggggggcattacactttgcaggaggtcgaagaagggttggcccagcacaaaccagtgttgctgtttctgacacacggcgagagttcaaccggggttctgcagccacttgacggattcggcgagctgtgtcatcgctataagtgtctgctgctggtcgactccgtggcctctctcggaggtacccccctttacatggaccgccaaggaattgacatcctgtactctggatcacagaaggccctgaacgcccccccaggtacttcactcatatccttctccgataaggcaaagaagaaaatgtacagccggaaaaccaagccattctctttctacctggacataaaatggctggccaatttttgggggtgcgacgaccagccacggatgtatcatcacacaatacctgtgatctccctttacagcctgcgcgaatctctggcgctcattgccgagcaaggtttggagaacagttggagacagcatcgggaggccgctgcctatctgcacggaaggctgcaggccctcggactgcaactctttgtaaaagaccccgcactgaggctgcccaccgtgactaccgttgcagtaccggccggatatgactggagagacatagtatcatacgtgattgaccattttgacattgaaattatgggtggcctcggcccctcaacaggcaaagtactgaggatcggcttgctgggctgtaacgctacccgcgaaaatgttgatcgagtaacagaggcccttcgcgcagctctgcagcattgcccgaagaagaagctc

SEQ ID NO: 249263 - DNA, 1176 bp, synthetic construct
  misc_feature 1..1176: note = Description of Artificial Sequence: Synthetic coding sequence
  source 1..1176: mol_type = other DNA
atggcttcacataaactcttagtgacacctccaaaagccctgcttaaacccctgagtataccaaatcagcttctgttggggccagggccatctaacttaccacccagaataatggccgctggggggctccagatgatcggatccatgtcaaaagatatgtaccagatcatggacgaaatcaaagaagggattcagtatgtgtttcagacaaggaacccactgacacttgtaatatctggatccggacactgtgctcttgaagccgctctagtcaacgttctggaaccaggagattcgttcctggttggagcgaacggaatatggggacagcgagctgtcgatatcggggagcggatcggggctcgggttcatcctatgactaaggatcccggaggacattatactcttcaggaagtagaagaagggctcgcacagcacaaacctgtcctccttttcctgacacacggagaatcttctactggagtgctccagcctttagatgggtttggagagctttgtcatcggtataaatgtcttctgctggtggacagtgttgccagtcttggggggacacctctctatatggatcgacaggggattgatatattatattcagggtctcaaaaagcgcttaatgctccacctgggacatctctcatctctttctccgataaagctaaaaaaaaaatgtactccagaaaaacaaaaccattcagtttttatctagacatcaaatggctcgccaatttctggggatgtgatgatcagcctcggatgtatcaccacactataccagtgatatcactatattcactgcgggaatctctggctttaatagctgagcaggggttagaaaactcctggagacagcaccgggaggccgccgcatatctccatggaaggttgcaggctctggggctgcagttatttgtgaaagatcccgccctcaggctccctactgtcacaacggtggccgtaccagccgggtacgattggagggatatcgtgtcctatgtgattgatcattttgatattgaaattatgggggggcttgggccatccactgggaaagtgctaaggataggactgctcgggtgcaacgccactcgcgaaaatgtggaccgggtgacagaagccctgcgggctgcactacagcactgccccaagaaaaagctt

SEQ ID NO: 249264 - DNA, 1176 bp, synthetic construct
  misc_feature 1..1176: note = Description of Artificial Sequence: Synthetic coding sequence
  source 1..1176: mol_type = other DNA
atggctagtcataagcttctggtcacccccccaaaagcactgttgaagcctctttcgattccgaaccaactcctcctgggtccagggccgtcgaatctcccccctcgtataatggcagcggggggactccaaatgatcggctcgatgtcaaaagacatgtatcagatcatggacgagatcaaggaggggatccagtatgtcttccagacccggaatccccttacactcgtaatctcgggttcgggtcattgcgcactcgaggccgccctggtcaacgttcttgagccaggagacagctttctggttggagctaacggtatatggggacaaagagctgttgatatcggtgaacgaataggggcaagagtacaccctatgacgaaggaccctggtggccactacacgttgcaggaggttgaggaaggactcgcgcaacataagccggtcctcctgtttctgacacatggtgagtcttctactggggtcctgcaaccattggatggctttggggaactctgccacaggtacaagtgtctcctgttagtagattccgttgcatcgctgggtggtacccccctctacatggatcgacagggcatagatatactttacagcggtagtcagaaagccctaaacgccccacctggcacgtcacttatatcattttcggataaggctaaaaagaagatgtactcaaggaagacgaagcccttcagtttttacctcgatatcaagtggcttgctaatttctggggctgtgatgatcagcctcgaatgtatcatcataccattccggtcatctccctctacagtctgcgcgaatctctggcccttattgctgagcaggggctcgagaattcgtggcgccagcaccgcgaagcggccgcgtacctccacggccgcctccaggctcttggattacagcttttcgtgaaggatccggcactgagattgccgacagttaccacagtcgcagtacctgctgggtacgactggagagacatcgttagttacgttattgatcactttgatatcgagattatgggaggtcttggtccatcaaccggaaaagtcctccgcattggactcctgggatgcaacgccacgcgtgagaatgtggatcgcgtaacagaggcgttgcgtgccgcactccaacactgtcccaaaaagaaattg

SEQ ID NO: 249265 - DNA, 1176 bp, synthetic construct
  misc_feature 1..1176: note = Description of Artificial Sequence: Synthetic coding sequence
  source 1..1176: mol_type = other DNA
atggcaagccacaaacttctggtgaccccaccgaaggcgctgctcaagccactttcgatccctaaccaacttctgttgggccctgggcctagcaacctgccacctagaataatggcagcgggtggcttgcaaatgataggaagcatgtccaaggacatgtaccagatcatggatgagattaaagaagggatccaatacgtttttcaaacgcgcaacccgctcaccctggtgattagcggatcgggtcattgtgcattggaagcagcacttgtgaatgtcctggaaccgggggactcctttcttgtgggcgcaaacggaatctggggccaaagagcagtggacataggagaacgtatcggtgctcgagtgcatcctatgaccaaagatcctggaggacattacacgctgcaagaagtggaagaaggactggcacagcataagcctgtgctcctctttctgacccacggagagtcgagcacgggtgtgctccagccactggatggttttggagaattgtgtcatcggtacaagtgcctcctgttggtggattcagtggcatcgcttggtgggacgcctctctacatggaccggcaagggattgacattctttacagcggatcgcaaaaggcccttaacgctccacctggcacctctctgatttcgttttccgataaggcaaagaagaaaatgtacagccgtaagaccaagccattttcattttacctggacatcaagtggctggccaacttttgggggtgcgacgatcaaccaaggatgtaccaccacaccatccctgtgatttccctgtacagccttcgggaatcgcttgcacttattgcagagcaaggacttgaaaatagctggaggcaacatagagaggcggcggcatacctgcatggccgtctccaagcactgggcctgcagcttttcgtgaaagatcccgccctcagattgcccactgtgactactgtggcagtgcccgcaggatacgactggcgcgacatagtgtcgtacgtcattgaccacttcgatatcgagatcatgggagggctgggaccgtcaaccggcaaagtgcttcgaattggactcctgggatgcaacgcaacccgagaaaatgtggacagagtgaccgaagccctcagagctgccctgcagcattgccccaaaaagaaactt

SEQ ID NO: 249266 - DNA, 1176 bp, synthetic construct
  misc_feature 1..1176: note = Description of Artificial Sequence: Synthetic coding sequence
  source 1..1176: mol_type = other DNA
atggctagtcacaaacttctggtgactccacctaaagctctgttgaagcccctctccattccaaaccagttactgctgggaccagggccttccaatttgcctcccagaataatggctgccggtgggttgcagatgatcgggagcatgtcaaaagacatgtatcaaatcatggacgaaattaaggagggtatccagtacgtgtttcagacccgcaacccgctgactctggtcatcagcgggtcaggacattgtgctctggaagcggccctggtcaacgtgctggagcccggcgacagctttctagtgggagctaatggcatctgggggcagagggcggtcgatattggcgagaggattggtgccagagtacaccctatgacaaaggatcctggtggacattataccttgcaggaagttgaagaaggcctggcgcagcacaaaccggttctgctgttccttacccatggggaatctagcacaggcgtactgcagccactcgatggatttggagagctgtgccatagatacaaatgtttgttgctggtggactcagtggcctccctgggtggcaccccgctgtatatggacaggcagggaatagacatcctgtattcaggttctcaaaaagcactgaatgcgccaccagggacgtctttgatcagcttttctgacaaggctaagaaaaagatgtactcaaggaagactaaacccttttctttctatctcgacatcaagtggcttgccaatttctggggttgcgatgaccagccccggatgtaccaccacactattccagtcattagtctgtactccctcagagaaagcttagcactgatcgcagaacaaggactcgaaaatagctggaggcaacatcgagaggccgcggcctatctgcacgggaggctccaggctctgggattacaactgttcgtgaaggatccagctttgcgactacctaccgtgactaccgtggccgttcctgctgggtatgactggcgggacatcgtaagttatgtgatagatcactttgatattgagatcatgggcggattgggtcccagcactggtaaggtgcttaggatcggactccttggctgcaacgctacacgggagaatgtggaccgagtgacagaggcattgcgtgccgcattacaacactgcccaaagaaaaagtta

SEQ ID NO: 249267 - DNA, 1176 bp, synthetic construct
  misc_feature 1..1176: note = Description of Artificial Sequence: Synthetic coding sequence
  source 1..1176: mol_type = other DNA
atggcaagccacaagctgctcgtcacacctccaaaggcccttttgaagccactgtccatcccaaatcaactgctcttgggaccaggcccaagcaatctcccgccaagaatcatggccgccgggggcctgcagatgatcggatcaatgtcaaaagacatgtatcagattatggatgaaattaaggaaggaatccaatacgtgttccaaactaggaatcctttgactctggtcataagcggcagcggccactgtgcccttgaggccgctctcgttaacgtgctcgagcccggtgactcctttcttgtaggtgcgaacggcatatgggggcaacgcgccgtcgatatcggtgagagaattggagctagggtgcaccccatgacaaaggaccctgggggccattacactcttcaggaggtggaagaggggcttgcccagcacaaaccagttctgctgttcctcacccatggcgaatcaagcacgggggtgctgcagccattggatggctttggggagctgtgtcatagatacaaatgcctgctgctggtcgatagcgtggcaagtctggggggcacaccactgtacatggataggcaaggtatcgacatactgtactctggctcccaaaaagccctcaacgccccccccgggacctcccttatatctttctccgataaagcaaagaagaaaatgtattctaggaagaccaaaccctttagcttttacttggacatcaaatggctggctaatttctgggggtgcgacgatcagccgcgcatgtaccaccacacgatccccgtaatctctctctactctctgagggagagtcttgccctgattgctgaacagggtcttgaaaactcctggcgccaacatcgagaggccgcagcgtacctgcacggcaggttgcaggctctggggctgcagttgttcgtgaaagaccctgctctcaggctgcccacagtgaccaccgtggctgtcccagctggatacgactggagagatatcgtgtcctatgtgatcgatcacttcgacatcgagatcatgggagggctcggtcctagtacaggtaaagttctccggatcggattgctcgggtgcaatgccacgcgcgaaaacgtcgacagagtcaccgaagccctgagggcagcgcttcagcactgccccaaaaagaaattg

SEQ ID NO: 249268 - DNA, 1176 bp, synthetic construct
  misc_feature 1..1176: note = Description of Artificial Sequence: Synthetic coding sequence
  source 1..1176: mol_type = other DNA
atggccagccacaaattgttggtgactccacccaaagcacttcttaaacctttatccatcccaaaccaacttttgctgggacctggaccgtctaatctgccaccccgtattatggctgcaggtggattgcagatgattggttccatgtccaaagatatgtatcaaattatggacgagattaaagaaggtatccagtatgtattccagacacgaaacccgcttactcttgtgatctccggaagcggacactgtgcactcgaagcagctttggtcaatgttttggaaccaggagattcgttcctcgtgggagctaacggaatatggggtcaaagagctgtggatatcggagagagaattggagctcgggttcaccctatgacaaaggacccgggaggacactacacattacaagaggtggaggaaggattagctcaacataaaccagtcttacttttccttactcatggtgaatcttcaacgggggtacttcaacccctagatggctttggagagctctgtcatcgatacaagtgcttactcctggtggatagtgtggcgtcgctggggggaactccattgtatatggatcgacaaggtatagatatcctgtattcaggatcacaaaaagcacttaatgctcctccggggacttcactcattagtttctctgataaggctaaaaagaagatgtattctcgtaaaacaaaaccattttccttttatcttgatataaaatggcttgccaatttttggggatgtgatgatcaacctcgcatgtatcaccatacaattccagttattagtctttactctttgagagagtcactggccttgatagcggagcagggtctcgaaaactcatggagacaacaccgcgaggctgctgcatatttacatggtagattacaagctttgggattgcaacttttcgttaaggatcccgcattacgactcccaactgtcactacggtggcagttccagcaggatatgattggagagatattgtatcttacgtaattgatcatttcgacattgagatcatgggaggactcggcccaagtacaggaaaggtgcttagaatcggactgttgggatgcaacgcaactagagagaatgttgatagggttacagaagcactgcgtgcagcactgcaacactgtccaaagaagaaactc

SEQ ID NO: 249269 - DNA, 1176 bp, synthetic construct
  misc_feature 1..1176: note = Description of Artificial Sequence: Synthetic coding sequence
  source 1..1176: mol_type = other DNA
atggcctcccacaaactgttggtgacaccaccaaaggcccttttaaagcctttgtcaattcccaaccaactgctccttgggcccggacccagtaatttaccccctaggattatggcagcagggggactgcaaatgatcggtagtatgtctaaagatatgtaccagataatggatgaaatcaaggaaggaattcaatacgtgtttcagacaaggaatcctctgactctggtaattagtggatccgggcactgcgcgcttgaagcagcgttggtgaatgtgctcgaaccaggggacagtttcctcgtgggcgctaatggaatctggggccagagagctgtggacattggggaaagaataggggcccgtgtacaccctatgacaaaagacccgggcggtcactacacgttacaagaagtggaagagggcctggcacagcataagcctgtactgcttttcctcactcatggggagtcaagcacaggcgtcctccagcccctggacggtttcggggagctgtgccaccggtataaatgccttttgctcgttgatagcgtggccagcctgggcgggacgccactgtacatggaccgccaggggattgacatactctacagtggaagccagaaggctttgaatgctccaccgggaactagtctcatttcctttagtgacaaagccaaaaagaagatgtatagtaggaaaaccaagcctttctcattctacttagatattaagtggctggccaatttttggggttgcgatgaccagcctcgcatgtaccaccataccatcccagttatttccctctacagcctgcgtgaatccctggcgctcatcgcagagcaggggcttgaaaattcctggagacagcatcgggaagcagcagcatacctgcatggcagactgcaggccctgggcttacaactgttcgttaaagatcccgcccttcgtttacccacagtaacaacagtagccgtacccgctggatatgattggagagacattgttagctacgtcatcgatcactttgacattgaaatcatggggggccttggtccctctactggcaaggttctgaggatcggcctcctgggatgcaatgccacacgggaaaacgtggaccgggtcacagaggctcttcgggcagccttacagcattgtcccaagaagaagctg

SEQ ID NO: 249270 - DNA, 1176 bp, synthetic construct
  misc_feature 1..1176: note = Description of Artificial Sequence: Synthetic coding sequence
  source 1..1176: mol_type = other DNA
atggcatcacataagctgctggtgactcctccaaaggctcttctcaagcctctgtccattcctaaccagcttcttcttggtcccggaccttccaatctccctcccagaattatggcagccggaggactccagatgattggtagcatgtccaaggatatgtaccaaatcatggacgagatcaaggaaggtatccaatacgtgttccaaactcggaaccccttgactctcgtaatttccggtagcggacactgtgcactggaggcggcgctcgtgaacgtccttgaacctggagactcgttcctcgtgggagcaaacggcatttggggacaaagagcggtggatatcggggaaagaataggagcgcgcgtgcatcctatgacgaaggatcctggaggtcactacaccctccaggaggtggaggaaggactggcccagcataagccggtgctgctgtttctgacgcacggggagtcatcgactggtgtgctgcaacctcttgatggttttggagaactttgccatagatataagtgtctgctcctggtggactcggtggcgtcactcggtggtacccctctgtatatggataggcaaggtatcgatattctctatagcggatcacagaaggcactgaacgccccacccggtactagcctgatctcattcagcgataaggcaaaaaagaaaatgtactcgcgcaagaccaaacctttttccttctaccttgacattaagtggctggcaaacttttggggttgtgacgaccagccaagaatgtaccaccatactatccctgtgatttcgctgtacagcctcagagagtctctcgcactgattgccgaacaggggctggaaaacagctggcggcaacatcgtgaggcagcagcgtaccttcatggacgcctgcaagccctcggccttcaactgttcgtgaaggatccagcacttagacttcctactgtcaccaccgtggcagtgcctgccgggtacgattggagagacatcgtctcctacgtgatagatcattttgacattgaaatcatgggtggccttggtccttccacgggcaaggtgttgcgcattggacttttgggatgtaatgcaaccagagaaaacgtggatcgggtgaccgaggctttgagggcggccctgcagcactgtcccaagaaaaaactt

SEQ ID NO: 249271 - DNA, 1176 bp, synthetic construct
  misc_feature 1..1176: note = Description of Artificial Sequence: Synthetic coding sequence
  source 1..1176: mol_type = other DNA
atggcatcgcacaaattattagttacaccgcctaaagcgctccttaagccgctgtctatccctaaccaacttctgcttggccctggtccgagcaatcttccgccgaggatcatggcagcaggcggactgcagatgattggctcaatgagcaaagatatgtatcaaattatggacgagatcaaggagggaatccaatacgtttttcagacacgtaatccactgacattagtaatttcaggctccggccattgcgcgctggaagctgcccttgtcaacgtgttggagccgggagactcattccttgtcggtgccaatggaatttggggccaacgggctgtggatattggagagcgcataggtgcaagagttcatcctatgacaaaagaccctggaggacattacacgttgcaagaggttgaggagggactggcccaacacaaaccggtgttgctttttctaacccatggcgaaagctcaacaggggttcttcaacctctggacgggtttggggagctctgtcatcgttataaatgcttactcttggtggatagtgtggcatcactcggcggcacgccgttatatatggaccgccaaggaattgatatactttacagcgggagccagaaagcattgaacgccccaccgggtacatcattgatttccttttctgataaagcaaaaaagaaaatgtatagtaggaaaactaaaccatttagtttttatttagatattaagtggttagcgaacttctggggctgtgatgatcagccgagaatgtatcatcatacaatcccggtgatctccctttacagtttaagagaaagcttagcgttaattgccgaacaaggacttgagaattcatggcgtcaacacagggaagccgcagcctatcttcatggcaggttacaagcgcttggccttcagttatttgtgaaagatccagccttgagattaccaacagtcacaacggttgccgtgccagctggatatgattggagagatatcgtatcatacgtgattgatcattttgatattgaaataatggggggcctgggaccgtctacaggcaaagtccttagaattgggctgcttggttgtaacgcgacaagagagaacgttgatagagttacagaggcattgagagctgcgctgcaacattgtccgaaaaaaaaactt

SEQ ID NO: 249272 - DNA, 1176 bp, synthetic construct
  misc_feature 1..1176: note = Description of Artificial Sequence: Synthetic coding sequence
  source 1..1176: mol_type = other DNA
atggcctcccataagctgctcgtgacccctcctaaagcgcttctcaaacctttgagcatacccaatcagctcctccttggccctggcccatccaacctgcctccgagaatcatggctgctggcggactccagatgatcggatcaatgtccaaagacatgtaccagattatggatgaaatcaaggaaggaatccagtacgtctttcaaactcggaaccctctgactctggtgatctcaggaagcggacactgcgccctggaagccgccctcgtgaacgtgttggaaccaggagattcatttctggtgggcgccaacggcatctggggccaacgtgccgtcgacatcggagagagaatcggcgctagagtgcacccgatgaccaaggacccgggaggacactacactctccaagaggtcgaggaaggactcgcgcagcataagcctgtgctcctcttcctgacgcatggtgagagctcgaccggagtgctgcagcctcttgacggattcggagaactgtgtcaccgctacaagtgtctgctgttggtcgacagcgtcgcatcgctcggaggcaccccgctgtacatggatcggcagggaatcgacatcctttacagcggatcgcagaaggcgctcaatgctccaccaggaaccagcctgatcagcttcagcgacaaggcgaaaaagaaaatgtacagccgcaaaaccaagccgttctcattctatctcgacatcaaatggctcgcgaacttctggggctgcgatgaccaaccgaggatgtaccaccacactataccggtcatttcgctctactcgcttcgcgaatcgttggccttgatcgcagaacagggactggaaaattcctggcgccaacatagagaggctgccgcgtacttgcatggacggctgcaggcacttgggctccaactgttcgtgaaggacccggccctgcggctgccgaccgtgactactgtcgcagtgccagccggatacgactggagagacatcgtgagctacgtcatcgatcatttcgacattgagatcatgggaggacttggaccctctactggaaaggtcctgcgcatcgggctgctgggatgtaacgcgactcgggagaacgtggatcgcgttactgaggcactgcgcgctgccctccaacattgcccgaagaagaagctg

SEQ ID NO: 249273 - DNA, 1176 bp, synthetic construct
  misc_feature 1..1176: note = Description of Artificial Sequence: Synthetic coding sequence
  source 1..1176: mol_type = other DNA
atggcttcacacaagcttcttgttacaccccctaaagctctgcttaagcctctgagcatccccaatcagctccttttggggcccggacccagcaacctgcctcctcgaatcatggccgctgggggactccaaatgattgggagcatgagcaaggatatgtaccagattatggatgaaatcaaggagggtattcaatacgttttccagacacggaacccccttactctggtgatcagcggaagcgggcattgcgccctcgaggcggcactggtgaacgtgctggagccaggagattccttcttggttggcgccaacgggatttggggacaacgcgctgtggacataggcgaaaggattggcgctcgcgtgcatccaatgaccaaagatcctggtgggcactataccctccaggaggtggaggagggacttgcccagcataaacccgtgctgctgtttttgacacatggagaaagcagcaccggagttcttcagcctttggacggctttggcgaactgtgccaccggtataaatgtctgctcttggtcgacagcgtggcatccctcggagggactcctttatatatggatcgacagggaattgatatactgtactctgggagtcaaaaagccctgaacgctccccccgggacatctctgatcagtttctctgataaggccaaaaaaaaaatgtattcaaggaaaaccaagccattctcattctaccttgacatcaaatggttggctaacttctggggctgcgatgatcagccacggatgtaccatcacacaattccagtgatttctctgtatagcctgagagagagcctggctcttatcgccgaacagggtttggaaaactcctggagacagcatcgcgaagccgccgcatatttgcacggaagactgcaggctctcgggctccagctgttcgtgaaggaccctgctctgcgactcccaacagtcacgactgttgccgtacctgccggatacgattggagggacatcgttagttatgtcatcgatcatttcgatatcgaaatcatgggcggtcttgggccatctactggaaaagtcctgcggattggcctcctggggtgtaatgctaccagagaaaatgtagacagggttaccgaagcactgagggcagcacttcagcactgtccaaaaaagaagctg

SEQ ID NO: 249274 - DNA, 1176 bp, synthetic construct
  misc_feature 1..1176: note = Description of Artificial Sequence: Synthetic coding sequence
  source 1..1176: mol_type = other DNA
atggcttcacataaacttttagttacaccacctaaagctttattaaaaccattatccattccaaatcaattattattaggaccaggacctagtaatttaccaccacgtattatggcagctggaggacttcaaatgattggatctatgtctaaggatatgtatcaaattatggatgaaattaaagaaggaattcaatatgtttttcaaacaagaaatccattaactcttgtaatttctggatctggtcattgtgctttagaagctgcattagttaacgttttagaaccaggagattcattcttggttggagcaaacggaatttggggacaaagagcagtagacatcggagaaagaattggtgctagagtacatccaatgacaaaggatccaggaggacattatactttgcaagaagtagaagaaggtcttgcacaacataaaccagttttattgtttttaacacatggagaatcttctacaggagtattacaacctttagatggattcggagaactctgtcacagatacaagtgtcttttattagttgatagtgtggcttcattaggaggtacaccactttatatggatagacaaggtattgatattctttattctggaagtcaaaaagctttaaatgcaccaccaggaacatcacttatatcattttcagataaagcaaaaaaaaagatgtactcaagaaaaactaaacctttctctttctatctcgatattaaatggttagctaatttttggggatgtgatgatcaaccaagaatgtatcatcatactattcctgtaatttcattatattcacttcgagaaagtcttgctcttattgcagaacaaggtcttgaaaattcttggaggcaacatagagaagctgctgcatacttacatggaagattacaagctttaggtttacaattatttgttaaagatccagctttaagattacctacagttacaacagtagctgtaccagctggatatgattggcgagacattgtctcatatgttattgatcattttgatattgaaattatgggaggtttaggtcctagtacaggaaaggttttaagaataggattattaggatgtaatgctacaagagaaaatgtagacagagtaacagaagctttaagagcagctttacaacactgtccaaaaaaaaagcta

SEQ ID NO: 249275 - DNA, 1176 bp, synthetic construct
  misc_feature 1..1176: note = Description of Artificial Sequence: Synthetic coding sequence
  source 1..1176: mol_type = other DNA
atggcctcccacaaactgctggtaaccccccccaaagcccttctgaaaccactgtccatacccaatcagctcctcctgggcccaggaccatctaaccttccgcccaggataatggccgccggcggactacaaatgatcgggtcaatgtccaaagacatgtatcaaattatggatgaaatcaaggagggcatccaatatgtttttcagacaagaaaccccctgacactcgttatctctggctctgggcactgcgctctagaggccgcactggtgaatgttctggagcctggagattctttcctcgtgggagctaacggcatttggggccagcgagcagtcgacataggggaacgaatcggtgctcgagttcaccccatgaccaaagatccaggagggcattataccctccaggaagtggaggagggattggctcagcacaaaccagtgctcctatttttaacccatggtgagtcctccactggcgtgctgcagccattagacggcttcggggaactgtgccatcgctataaatgcctacttctcgttgattctgttgcttccctgggggggactcccctgtatatggacaggcagggcattgacattctgtattccggctcccagaaggccttgaatgcccctccgggaactagcctcatatccttctccgacaaagcaaagaagaagatgtactcccggaagaccaagcctttctctttctacttggacattaagtggctggcaaatttctgggggtgtgacgaccaaccgcggatgtatcatcatacgattcccgtcattagtctctattccttgcgggagtcgctcgccctcatagcggaacagggactcgagaacagttggagacagcaccgcgaagctgccgcatacctgcacgggcgcctccaggcactcgggctccagctgttcgttaaggatcctgccttgcgcctgcctaccgtcacaaccgttgctgtccccgcgggatatgattggcgggatatcgtcagttatgtgattgaccacttcgatattgagataatgggcggcctcggaccatccacaggtaaggttctacgaatcggactgctggggtgtaatgccacgagagagaatgtggatcgagtgactgaggcactgcgggctgcgctgcagcattgtccgaagaagaaattg

SEQ ID NO: 249276 - DNA, 1176 bp, synthetic construct
  misc_feature 1..1176: note = Description of Artificial Sequence: Synthetic coding sequence
  source 1..1176: mol_type = other DNA
atggcgtcacacaagctgcttgtgaccccaccgaaagcactcctgaagcctctgtccattcctaaccaacttctgctgggacctggtccttccaatttgccaccgcgaattatggcagcaggaggtttgcagatgattgggagcatgagcaaagatatgtatcagataatggatgagattaaggaggggattcagtacgtgtttcaaacccgtaaccctcttaccctggtgatctcggggagcggacactgcgctctggaagcggcccttgtcaacgtgcttgaaccgggagattcgtttcttgttggtgccaacggaatctggggacaacgggcagtggatataggcgagcggattggagctcgtgtgcaccccatgaccaaagatcctggcggtcattacactctccaggaggtggaagagggacttgcacagcacaaaccagtgcttttgtttctcactcatggagagtcctccaccggtgtcctccaaccactcgatggctttggggaactgtgtcatcgatataagtgtctcctgcttgtggattcggtcgcgagcctgggaggaactccactgtacatggaccgccaaggcatcgatattctttactctggcagtcagaaggcacttaatgctcctccggggacctctcttatttcgttcagcgacaaggccaagaagaagatgtactccaggaaaaccaagccattttccttctacctggacataaagtggttggctaacttttggggatgtgacgaccagcccaggatgtatcaccatacgatacccgtgatctctctttattcgctgcgcgagtctcttgcactcatcgccgaacaaggtctggaaaattcctggaggcagcaccgggaggcagcagcataccttcatggtagactccaggctctgggcctccagctgttcgtgaaggacccagcactccggcttcctactgtgactactgttgccgtccccgcaggttacgattggagagacattgtgtcctacgtcatcgatcattttgacattgagattatgggtggacttggaccttcgactggtaaagtgctcaggatcggccttctcggatgtaacgcaactcgcgaaaatgtggatagggttaccgaagcacttcgcgccgctttgcagcattgccctaagaaaaaactg

SEQ ID NO: 249277 - DNA, 1176 bp, synthetic construct
  misc_feature 1..1176: note = Description of Artificial Sequence: Synthetic coding sequence
  source 1..1176: mol_type = other DNA
atggcttcccataagttattggtgacaccccctaaggcgctcctcaagccccttagcatcccaaaccaattgttgttggggcctgggccttctaaccttcctcctagaattatggcagctggtggattgcaaatgattggcagtatgtctaaagatatgtaccagataatggacgagatcaaggaaggaatacagtatgttttccaaaccaggaaccctttgactctcgtcattagcggttccggtcattgcgctttggaggctgcccttgttaatgtcctggaacccggagactctttccttgttggggccaatggtatatgggggcaaagggcagttgatattggtgaaagaataggggcaagggtccacccaatgactaaagatcctggcgggcattatactcttcaggaagttgaggaaggtcttgctcaacataagcctgtgttactttttctaacacatggtgagagcagcactggcgttcttcaaccccttgatggctttggcgagctctgccatagatacaaatgcttgcttcttgtagattcagtagcaagcctaggcgggaccccactttatatggatagacaggggattgatatattatacagtggaagtcaaaaggccttaaacgctccgcctggtacgtcacttatttccttttccgacaaggccaaaaagaagatgtatagcagaaagacaaaaccattttcattttatttggatattaaatggctcgctaacttctggggttgcgatgatcaaccaagaatgtatcatcatactattccggttatcagtttgtactccctcagggaatcacttgcattaatagcagagcagggattagagaactcatggcgtcaacaccgagaagctgctgcatatttacatgggcggttgcaagctctcggtcttcaactgttcgtgaaggatccggctttgcgactccctacagttactactgtggctgtcccggcaggctacgactggagagacattgtctcatacgtaattgaccatttcgacattgaaattatggggggtttaggaccgtccactggcaaggtcctgcgaattggattgcttggatgcaatgctacccgtgagaacgttgatagggttacggaggccctcagagccgctctacagcattgcccgaaaaagaagttg

SEQ ID NO: 249278 - DNA, 1176 bp, synthetic construct
  misc_feature 1..1176: note = Description of Artificial Sequence: Synthetic coding sequence
  source 1..1176: mol_type = other DNA
atggcttcccacaagttgctggtgaccccgccgaaagctctcctcaagccactgtcgatccctaatcaactgttgttgggaccggggccatctaatctgccgcctcgcatcatggccgcgggcggactgcagatgatcggttccatgagcaaagacatgtaccagattatggacgagatcaaagaggggatccagtacgtctttcagacgcgcaatcccctcactctggtgatttcgggaagcgggcattgcgccctggaggccgccctggttaacgtgctggaacctggtgattcgttccttgtcggtgcaaacggaatttggggacagcgggcagtcgatatcggtgaacggatcggcgccagagtgcacccaatgactaaagacccgggaggacactacaccctgcaggaggtagaggaaggactggcacaacacaaaccagtcctcctcttcctcactcatggggagtcgtcaactggagtcctgcagccactggatggctttggtgagctgtgccatcgctacaagtgtctgctgctggtggactcggtcgcatccctgggtggcacccccctctacatggacagacaagggatcgacatcctgtactccggttcccagaaggccctgaatgccccgccgggaacctccctcatctcattctcggacaaggccaaaaagaaaatgtacagcagaaagaccaaaccattctccttctacctcgacatcaagtggctggccaacttctggggctgcgacgaccagcctcggatgtatcatcacacgattccggtgatctcgctgtattcgctgcgggagtctttggccctcattgcggaacagggcctcgaaaacagttggcggcagcaccgggaggctgcggcatacctgcacggcagactccaggcgctgggactgcaactgttcgtcaaggatccggcactgagactccccactgtgacgactgtcgcggtgcctgctggatacgattggagagatatcgtgtcgtacgtgatcgaccacttcgacatcgagattatggggggccttggaccttcaactgggaaggtgctgcgcattggactgctcggctgcaatgccacccgggagaatgtggaccgcgtgactgaggcgctgagagccgcgctgcaacactgcccgaagaagaaactc

SEQ ID NO: 249279 - DNA, 1176 bp, synthetic construct
  misc_feature 1..1176: note = Description of Artificial Sequence: Synthetic coding sequence
  source 1..1176: mol_type = other DNA
atggcttcccacaagctgctcgtgactccccctaaagcactgcttaagcctctgtcaatcccaaaccaactgctgctgggacctgggccctcgaatctcccacctcggatcatggcagcggggggcttgcaaatgattggttcaatgtctaaagacatgtaccagatcatggacgagattaaagaagggatccaatacgtttttcaaacccgtaatcccctgacgcttgtgatatcgggtagcggacattgcgccctggaagcagcacttgtgaatgtgcttgaacctggcgactcgtttcttgtcggggcaaacgggatttggggccagagagcagtcgacattggagaacgcattggagcgcgcgtgcatccaatgaccaaggacccaggaggtcactatacgctgcaggaagttgaggaaggcttggcgcaacacaaaccggtcttgcttttcctgacgcacggcgaaagctcaaccggggtccttcaaccactggatggatttggcgagctgtgccataggtacaagtgtctgctgctggtcgattcggtcgcgtcgcttggtggtactccactgtacatggatcgacaaggaatcgatatactttactctggatcacagaaggctctgaacgcacctccaggtacttccctgatcagcttctcagacaaggcgaagaagaagatgtactcccgtaagaccaagccgttttctttctacctcgacatcaaatggctggccaacttttggggttgcgatgatcagcctcggatgtaccatcatactattcctgtgatatcactgtattccctccgagaatccctggcgctcatcgcagagcaaggacttgaaaactcctggcggcagcatcgagaagctgcagcctatcttcatggacgccttcaagcactgggtttgcagctgtttgtgaaagatcctgctctgaggctccctactgtcaccaccgtggcagttcccgctggctacgactggcgggatatcgtttcgtatgtcatcgatcattttgatatcgaaatcatggggggcctgggaccaagcacgggaaaggtcctgaggattggccttctcggatgtaacgccactagagagaacgtggacagggtgaccgaagccctcagagcagcacttcagcattgtcctaaaaagaagctg

SEQ ID NO: 249280 - DNA, 1176 bp, synthetic construct
  misc_feature 1..1176: note = Description of Artificial Sequence: Synthetic coding sequence
  source 1..1176: mol_type = other DNA
atggcctcacataagttactagtgacaccaccaaaggccctgctcaagcccctgagtattccaaatcagttgctgctgggcccgggcccatctaacttgccgccacgcatcatggcagctggaggcctgcaaatgattggtagtatgtcgaaggatatgtaccagattatggatgaaattaaggagggaattcaatacgtcttccagacccgcaatcccttgaccctggtgattagcggttccggacactgcgccttggaagccgcgctcgtaaatgtcctggagccgggcgatagcttcttggtgggcgcgaacggcatctggggacaacgagcggttgacataggcgagcggataggagcgcgagtacaccctatgaccaaagatcccggaggccactacacgctccaggaagtggaggagggccttgcccaacacaagcctgtgctgttgttccttacccatggcgagtctagcacgggcgtcctccagcccttggacggctttggcgaactgtgccaccgttacaagtgtctgctgctggtcgatagtgtggctagcctcggcggaactcccctctacatggacaggcagggcatcgacatcctgtactcgggatcgcagaaggccctgaacgccccgccaggaacgtcgctcatttccttctcggacaaggcaaagaaaaagatgtactcgcgtaagactaagcccttctccttctatctagatatcaagtggctcgcaaacttttggggctgcgacgaccaacctcgcatgtaccaccatactattccagtcatctccttgtacagcttgcgggagtctctggcgctgattgcagagcagggcctggagaattcctggaggcagcatcgtgaggcagctgcttaccttcacggacgtctacaagcattgggcctgcagttatttgtgaaagatcccgcgctccgtctaccgacggtgacaacggttgcagtgccagccggttacgattggagggacatcgtgtcctacgtcatcgatcatttcgatattgagattatgggcggcttaggcccctcgaccggtaaggtcctgcgcattggcctgctgggatgtaacgcgacccgcgagaacgtggatagagtgacagaagcgttacgcgccgccctacagcattgcccaaaaaagaaactg

SEQ ID NO: 249281 - DNA, 1176 bp, synthetic construct
  misc_feature 1..1176: note = Description of Artificial Sequence: Synthetic coding sequence
  source 1..1176: mol_type = other DNA
atggcatcccacaagctcctcgtcacaccgccaaaggccctactgaagccgctgtccatcccaaatcaactgctcctcggcccaggaccttccaacctgccgccccgcattatggccgctggaggcctgcagatgattgggtcaatgagcaaggatatgtaccagatcatggatgagatcaaagaaggcatccagtacgtgtttcagaccaggaaccctttaacattggtcatctcaggatctggccactgcgctctggaggccgctctggtgaatgttctggaaccaggagatagcttcctggtcggcgccaatggaatctggggacaaagggcagttgacatcggcgaacgcattggagctcgcgtgcacccaatgaccaaggaccccggaggccactacactctgcaggaagttgaagagggtcttgcccagcacaagcctgtgttactttttctcactcacggagaaagttcgacaggtgtccttcagccactggacggattcggcgaactgtgtcatcgctacaaatgtttgcttcttgttgactccgtggcctctctggggggtacccccctgtatatggaccggcagggaattgacatcctgtatagtgggtcacagaaggctctcaacgccccccccggtacgagtttgatctccttcagcgacaaggcaaagaagaagatgtacagtcggaagaccaaacctttctccttttacctcgacatcaaatggctggccaacttctgggggtgtgacgaccagccacgcatgtaccatcacaccatccccgtcatctcactctacagtttaagagagtcccttgcactgatcgccgaacagggcctggagaactcctggcgccagcaccgggaggccgccgcttacctgcatggcaggcttcaagcgctcggcctccaattatttgtgaaggatcccgccttacgcctgcccacagtgacaacagtggctgtgcccgccggatacgactggcgcgacatcgtgagttatgtaatcgatcactttgatattgagattatgggcggactgggtccgagcaccgggaaagttctccggattgggctgcttgggtgtaacgccactagggagaatgtcgaccgagtgacggaggcactgcgggccgcgttacaacattgtcccaaaaagaagtta

SEQ ID NO: 249282 - DNA, 1176 bp, synthetic construct
  misc_feature 1..1176: note = Description of Artificial Sequence: Synthetic coding sequence
  source 1..1176: mol_type = other DNA
atggcttcgcataaactccttgtgacgccccctaaggctcttctgaaacccctctcgatacctaaccaactccttcttggacctgggccttcgaatctcccaccacgcattatggctgcaggtggacttcagatgatcggaagcatgtccaaagacatgtaccagattatggacgaaatcaaggaaggaattcagtacgtgttccagacccgcaatccgctcactctggtgatctcaggatccggccattgtgcgctggaagcagcacttgtgaacgtgttggagcctggagattcgttcctggtgggggccaacggcatatggggtcagcgcgcagtggatatcggagagagaattggggcacgggtgcatcctatgaccaaagaccctggtggtcactacaccctgcaggaagtggaggagggacttgcacagcataagcctgtgttgctgtttcttacccatggagaatcgtcgacgggggtgctgcaacctcttgacggttttggagaactgtgtcatagatacaagtgccttctccttgtggattccgtcgcctcgttgggaggcacgcccctttacatggatcgtcaagggatcgatattctttattcagggtcgcagaaggcactcaatgcaccccctggaacctcgcttatttcctttagcgataaggcaaagaagaagatgtactctcgtaaaaccaagccattttcattctacctggacatcaagtggctggcaaatttctggggatgtgatgaccagccaagaatgtaccaccatactattccagtcatttcattgtactcgttgcgggagtcgctggcactgattgccgaacaaggactggaaaactcgtggcgacagcacagagaagcggcagcatacctccacggaaggcttcaagctctgggacttcaactttttgtgaaggacccagcgctgcggcttccgactgtgactaccgtggcagtgcccgcaggctacgattggcgggatattgtgagctacgtgattgaccactttgacatcgagattatgggcggtctgggaccttcgactggcaaggtcctgcgcattggactgttggggtgtaatgcaaccagggaaaacgtcgacagggtcactgaggcacttagggctgctctgcagcactgtcctaagaagaagctg

SEQ ID NO: 249283 - DNA, 1176 bp, synthetic construct
  misc_feature 1..1176: note = Description of Artificial Sequence: Synthetic coding sequence
  source 1..1176: mol_type = other DNA
atggcctcacacaagttgcttgtgaccccacccaaggcacttttgaaaccactgagcataccaaatcagttgttactgggccctggcccctcaaacctgccaccaagaattatggctgccggtggcctacaaatgatcggatccatgtcaaaggatatgtatcagatcatggacgagatcaaggagggcattcaatacgtgttccagaccaggaaccctctcacattagtcatctcaggatcgggccactgtgccctggaagcggccctggttaatgtgctggagcccggggattcctttctcgtgggggcaaatggcatctgggggcagagggctgtggacataggggaacggatcggcgctcgagtgcaccctatgacaaaggaccctggcggccattacaccctccaagaagtggaagagggcctggcgcagcataaaccagtgctgctctttctgacacatggagagagtagcaccggggtgctccagcccctggacggctttggcgagctctgccatcgttacaagtgcctgttgctggtagattccgtggcttcgctcggtggcaccccgttatacatggatcgacaagggatagacattctgtacagcggatcccagaaggccttgaacgcgccaccagggacctctctcatttctttctccgacaaggcgaaaaaaaaaatgtacagcaggaagacaaaaccattctctttttatctcgacatcaagtggctggccaacttttggggatgcgatgatcaaccaaggatgtatcaccataccatcccagtgatctccctgtactcccttcgagaatctcttgccctgattgccgaacagggactggaaaactcatggcggcagcatagagaggccgccgcttacctgcatggccgcctgcaggcgctcgggctgcaactgttcgtgaaagaccctgcgctccggctacctactgtgaccacagtggcagtgcccgccggatacgattggcgagatatcgtctcatacgtgatcgaccacttcgatattgagatcatggggggcctcggcccatcaacgggcaaggtgctgcgaatcgggttactgggctgcaacgccacacgggaaaacgtggaccgcgtcacggaggcactgagggccgctctccagcactgccccaagaaaaaactg

SEQ ID NO: 249284 - DNA, 1176 bp, synthetic construct; identical to SEQ ID NO: 249208
  misc_feature 1..1176: note = Description of Artificial Sequence: Synthetic coding sequence
  source 1..1176: mol_type = other DNA

SEQ ID NO: 249285 - DNA, 1176 bp, synthetic construct
  misc_feature 1..1176: note = Description of Artificial Sequence: Synthetic coding sequence
  source 1..1176: mol_type = other DNA
atggcgtcgcataaacttctggtgactccacctaaggcattgctgaaaccgctctccatcccaaatcagctgctgctgggacctggaccaagcaatctcccgccgcggatcatggcagcagggggcctgcaaatgatcggatcgatgagcaaggatatgtaccagatcatggacgaaattaaagaaggaatccagtacgttttccagacccgcaatccgcttaccctggtgatttccgggagcggacattgcgcccttgaggccgccttggtgaacgtcctcgagcccggagattcgttcctcgttggagcgaacggaatctggggccaaagagcagtcgacatcggcgaacgcatcggagcccgcgtgcacccaatgactaaggacccgggtggtcactacaccctgcaggaagtcgaggaaggactggcgcaacataagccggtgctcctgtttctgacccacggcgagagttcaaccggcgtcctgcagccgctggatggtttcggggagctgtgccaccggtacaaatgcctccttctggtggactccgtcgcctcattggggggaacccctctctacatggaccggcaaggcatcgacattctgtacagcgggagccagaaggctctgaacgcgcccccgggaacttccctcatctcattctcggataaagctaaaaagaagatgtactcccgtaagactaagcccttctctttttatctggacatcaagtggttggcgaacttctggggctgcgatgatcaaccaagaatgtaccaccacacgatcccagtgatctcgttgtacagcctcagggagtcgctcgccctgattgccgaacagggactggaaaattcgtggcgacaacaccgggaagcagcggcctacctgcatgggagactgcaggctctcggcctccagctcttcgtcaaagaccctgccctccggctgcctactgtgacgaccgtggctgtgccggctggttacgattggagagacatcgtctcatatgtgatagaccactttgatatcgagatcatgggcggactgggaccctccactggtaaggtgctgcgcatcggactgttgggatgtaacgcgacccgcgaaaacgtggaccgcgtgactgaggcccttagggccgcactgcagcattgtccgaagaagaagctc

SEQ ID NO: 249286 - DNA, 1176 bp, synthetic construct
  misc_feature 1..1176: note = Description of Artificial Sequence: Synthetic coding sequence
  source 1..1176: mol_type = other DNA
atggccagccataagttgctggtgactccaccgaaagctcttctcaagccactgtctatacctaatcagctgctgttgggccctggcccaagtaacctgccaccaaggatcatggccgccggtggactgcagatgatagggtccatgtcaaaggacatgtatcagattatggacgaaatcaaagaaggtattcaatacgtgtttcagacccgaaatccgctgacccttgtcatctccggaagcggacactgtgcccttgaggccgctctggtcaacgttctggaaccaggggatagcttccttgtgggggctaacggtatctggggccagcgggccgtggacataggcgaacggatcggcgcccgagttcatcccatgactaaggacccagggggccattacactttgcaggaagtagaagagggcctggcacagcacaagcccgtactgctttttctgacccatggggagtcttccaccggagtactgcagcccctggacggctttggagaactgtgccataggtacaagtgcttattactggtggacagcgtagccagtttagggggaaccccgctctacatggatcgccaggggatcgatatactgtacagcgggagccaaaaggctctgaacgccccccctggcaccagcttgatctcattcagcgataaagccaaaaagaaaatgtatagtaggaaaactaagccattttccttctacctagatataaaatggctggctaacttctggggctgcgatgatcagcctcgtatgtatcatcatactatcccggttatcagcctgtattccctgcgggagtccttggctctgattgccgaacaaggtctggagaattcatggagacaacatagagaagctgccgcatatttgcatgggagacttcaggccctgggcctacaactgttcgtcaaagatccagccctgcggctccctactgttactaccgtcgctgttccagccggctatgactggcgcgacattgtgtcgtacgttatcgatcatttcgatatcgagatcatggggggcttgggtccgagtaccgggaaggtgctgcgtattggactcctcggatgcaacgcaaccagagagaacgtggacagggtgactgaagcgctgcgagcggctctccaacactgcccaaaaaaaaagtta

SEQ ID NO: 249287 - DNA, 1176 bp, synthetic construct
  misc_feature 1..1176: note = Description of Artificial Sequence: Synthetic coding sequence
  source 1..1176: mol_type = other DNA
atggcgtcacataagctcctggtgaccccaccaaaagcacttctcaagccactgtccatacccaaccaacttctgcttggtccgggtccttccaacctgccgccacgtattatggccgccggaggactgcagatgattgggagcatgtcgaaggacatgtatcagattatggatgagatcaaagagggaatccaatacgtttttcagacgcgaaacccgctgactctggtgatttcgggctctggccactgcgcacttgaagcagcactggtgaacgtgcttgagccgggtgattcgtttcttgtgggcgcaaacggtatctggggacagagagccgtcgacattggtgaaaggataggagcacgtgtgcatcctatgacgaaggatcctggcggccattatacccttcaggaggtggaagaggggctggcacaacataaacccgttcttctgttccttactcatggagaatcgtcgaccggcgtcttgcaaccactcgacggattcggggaactgtgtcatagatacaagtgtcttttgttggtggatagtgtcgcatcactgggaggcacgcccctgtacatggatagacaaggaattgacattctttactctggatcccagaaagccctcaacgcacctcccgggacctctctgatctccttcagcgataaagcaaaaaagaagatgtattcccgtaagactaagccattttcgttttacctcgatatcaagtggcttgctaatttctggggttgtgacgatcaacctcggatgtaccatcatactatccctgtcatttcactttacagccttcgcgaatcactggcccttatcgcagaacaaggccttgaaaattcgtggagacaacatagggaagctgccgcctaccttcacggacgcctccaggcactgggactgcaactttttgtgaaagatcctgctctgaggctcccaactgtgaccaccgttgcggtgccagccgggtacgactggcgcgatatagtgtcgtacgtgatcgatcatttcgatattgagattatgggtggattgggaccctccaccggtaaagtcttgagaatagggctgcttggatgtaacgcaacgagagagaatgtggatcgagttacggaagctcttcgcgcagcacttcaacattgtcctaagaagaaactc

SEQ ID NO: 249288 - DNA, 1176 bp, synthetic construct
  misc_feature 1..1176: note = Description of Artificial Sequence: Synthetic coding sequence
  source 1..1176: mol_type = other DNA
atggcttctcataagcttttggtaactcctccaaaggctctgctcaagccactttccatcccaaatcaacttcttctggggccaggaccgagtaatcttccgccacgcatcatggccgccgggggcctgcagatgatcggctctatgtcaaaagatatgtatcagatcatggatgagatcaaagagggaatccagtatgtgttccagacacggaaccctctaacactcgtcatttctgggtcgggtcactgtgcacttgaggccgccctggtgaacgtgttggaaccgggggatagctttttagtcggcgccaatggaatttggggacagcgggcagttgatatcggggagcgtattggagctagagtccacccaatgactaaggatcctggcggccattatactctgcaggaggtcgaggaaggcctggctcaacataagccggtgctgctctttctaactcacggggaatcttctaccggggtgctccagcccctcgatggattcggagagctgtgtcaccggtacaagtgtctcctgctggtagacagcgtggcctctctcggaggcactcccctgtatatggataggcaggggattgatatcctctattctggctcgcagaaggctctgaatgccccaccgggcacctcccttattagtttctctgataaggccaaaaagaaaatgtactcccgtaaaacgaagccattcagtttttatctagacattaagtggctcgcgaacttttggggctgtgacgatcagcctcgtatgtaccatcatactatacctgtgatcagtctctattcactacgcgaaagcctggcgttaattgcggagcagggcctagagaatagttggcgacaacatagggaagcagcagcttacctccacggacgtctccaggccctggggttgcagctttttgttaaggatccggccctccgcttgcctacagtgacaacagtggctgttcccgccggctatgactggcgagacatagtgagttatgtaattgatcacttcgacattgagatcatgggtggcctcggacccagtacaggaaaggtcctccgcataggcttgctcggctgtaatgcgactcgggaaaacgtggaccgggtgacagaagccctccgagcggcactccagcactgcccgaaaaagaagttg

SEQ ID NO: 249289 - DNA, 1176 bp, synthetic construct
  misc_feature 1..1176: note = Description of Artificial Sequence: Synthetic coding sequence
  source 1..1176: mol_type = other DNA
atggcgtcgcacaagctgcttgtgaccccacctaaggcccttctgaagcctttgtcgatccctaatcaactgctcctcggacccggtccatcaaacctcccgccgaggattatggctgccggagggctgcaaatgatcggctcaatgtccaaggacatgtaccagattatggatgagatcaaggaaggaatccagtacgtgttccagaccaggaatcccctcaccttggtgatctcaggttcagggcattgtgccctcgaagcggccctggtgaacgtcctggagcctggagattccttcctggtgggcgccaacggcatctggggacagcgggcagtggatatcggcgaaagaatcggcgcgcgcgtccaccctatgaccaaggacccggggggtcattacacccttcaggaggtggaagaaggcctcgctcagcacaagcccgtcctcctcttcctgacgcatggagaatcgtccacgggggtgctgcaaccactcgatggattcggcgagctgtgccatcgctataagtgcctcttgctggtggattccgttgcttcgctcggaggcaccccactgtacatggatcgccagggtatcgacattctgtactcgggatctcagaaggcgcttaatgccccgccgggaacttcactgatttccttctcagacaaggcgaagaagaaaatgtattcaagaaagactaagccattctcgttctacctcgatatcaaatggctcgcgaacttttggggctgcgacgaccagcctcgcatgtaccatcacaccatccctgtcatctcgctgtactcacttagagaaagcctggccctcatcgccgaacaggggctggaaaacagctggcggcagcaccgcgaagctgccgcctaccttcatggacgcctgcaggccctcgggctgcagctcttcgtgaaagacccggcgctccggctgccgaccgtgaccaccgtggccgtgccggcgggatacgactggcgggatattgtgtcgtacgttattgaccacttcgacatcgaaatcatgggcggactgggtcccagcactgggaaagtgctccgcatcggactgctcgggtgcaatgccactcgggaaaacgtggatagagtgaccgaagccctgcgcgccgcgctccaacactgtcctaagaagaaactt

SEQ ID NO: 249290 - DNA, 1176 bp, synthetic construct
  misc_feature 1..1176: note = Description of Artificial Sequence: Synthetic coding sequence
  source 1..1176: mol_type = other DNA
atggctagccacaaattattagtgaccccacccaaagccctcctgaaaccattatccatcccgaatcagctgcttctcggccctgggccttctaatcttcctcccagaatcatggccgccgggggcttgcagatgattggctcgatgagcaaggacatgtatcagatcatggacgagataaaggagggcatccaatatgtgttccagacaaggaaccctctgactttagtcatctccggatctggacattgcgcccttgaggccgctctggtgaacgtcctcgagcccggagattcgtttctggtcggcgccaatggcatttggggtcagagggctgtcgatataggagagaggattggggctcgcgtgcacccgatgaccaaggatcctggaggacattacacacttcaggaggtagaggagggcctggcccagcacaaaccggtcctgttgtttctcacccatggcgagtcaagtacaggcgtgttacagccactggatggtttcggcgagttatgtcacaggtataagtgcctgctcttagtggattccgtagctagtctgggtggcacgcctctctacatggaccgtcaggggattgacattctgtactcagggagtcaaaaggcgctgaatgcacctcccggaacctctctgatctcttttagtgacaaggctaagaagaagatgtacagccggaagacaaaaccgttcagcttttacctggatatcaagtggctcgctaatttctgggggtgtgacgatcagcctcggatgtatcatcacacgatccctgtgattagcctctactccctacgtgaaagcctcgccctgatcgctgagcaaggcctcgagaactcttggcgtcaacaccgagaggccgctgcatatttacacggaaggttgcaggccctgggactgcagctcttcgttaaggaccccgcactccggctccctacagtaaccaccgtggctgtgcctgctggatacgattggcgcgacatcgtttcctacgttatcgaccatttcgatatcgagatcatgggcggcttgggtccatctacaggtaaggttctgcgtattggtttgctggggtgcaatgcaactcgggaaaacgtggatcgggtaactgaagccctgagagctgccttgcaacactgcccaaaaaagaagcta

SEQ ID NO: 249291 - DNA, 1176 bp, synthetic construct
  misc_feature 1..1176: note = Description of Artificial Sequence: Synthetic coding sequence
  source 1..1176: mol_type = other DNA
atggcaagccacaagctcctcgtgaccccgcccaaggcgctcctcaagccgctcagcatcccgaaccagttgctgctggggccgggaccatccaacctgccgcctcgcatcatggcagcgggagggctccaaatgatcgggtccatgtcaaaggacatgtaccaaatcatggacgaaatcaaggagggaatccagtacgtctttcagaccaggaaccccctgacgctcgttatttccggatcaggtcattgtgccttggaggccgctctggtgaacgtgctcgaaccgggcgattccttccttgtgggagcgaacggcatctggggccagcgcgccgtggacatcggcgagcggattggggctcgcgtccatcctatgacgaaagacccaggaggacattacaccctgcaggaggtggaagaaggactcgcgcaacataagccggtgctgctgttcttgacgcacggagaatcatcgactggcgtgcttcagccattggatggcttcggcgaactgtgccatcgatacaagtgcctgctcctcgtggactcggtggcctctctgggcggcaccccgctgtacatggataggcagggcatcgatatcctgtacagcggatcacagaaagctctgaatgcgcctccgggaacttcactgatctccttttcagacaaggctaagaagaagatgtactcgagaaaaactaaacctttctcgttttacctcgatatcaagtggctcgctaacttctggggatgcgatgatcagccgcgcatgtaccaccacactatcccggtgatctccctctactcgctgcgggagtcgctcgccctcattgctgagcaggggctggaaaactcctggcgccagcacagagaggccgccgcctacctgcatggacgcctccaggcactgggtctgcagctctttgtgaaggatccggccctgcggctgcctactgtgaccaccgtggctgtgccggcgggatacgattggagggacatcgtctcgtacgtgatagaccacttcgatatcgagatcatgggagggctgggcccgtccacgggcaaggtgctgagaatcggcctgctgggatgcaacgcgacccgcgagaacgtggaccgcgtgactgaggcgcttagagcggccctgcagcattgcccaaagaagaaactc

SEQ ID NO: 249292 - DNA, 1176 bp, synthetic construct
  misc_feature 1..1176: note = Description of Artificial Sequence: Synthetic coding sequence
  source 1..1176: mol_type = other DNA
atggcatcgcataaactgctggtgacccctcccaaagcgctcctgaaaccgctttccattccaaaccaactgctcctgggacccggaccaagcaacctgcctcccagaatcatggcagcggggggccttcaaatgataggctcgatgtcaaaggatatgtatcaaatcatggacgaaatcaaggaaggaatccagtacgtgtttcagactagaaatccactgacgctggtgatctcgggctcaggccattgtgcactggaagcagcactcgtcaacgtgctggaacccggagacagctttctggtcggagccaatggaatctggggccagagagcagtcgacattggtgaacgcatcggagcgagagtgcaccctatgactaaggatcctggaggtcactacactcttcaggaagttgaggaaggactggcgcaacataagcctgtcctcctcttcctcactcatggcgagtcgagcaccggggtgctccaacctcttgacggttttggtgagctgtgccaccgctacaagtgcctgcttcttgtcgatagcgtggcctcactgggaggcacccctctttacatggatcgacaggggatcgatatcctttactcggggtcgcaaaaggcacttaacgcgccccctggtacctccctcatttcgttttccgataaggcaaaaaagaaaatgtactcacgaaagaccaagcccttttcattttaccttgacatcaagtggcttgcaaacttttgggggtgtgacgatcagccgcgtatgtaccaccataccatcccggtcatttcactctactcgcttagagaatcactggcactgattgctgaacaggggctcgaaaactcgtggaggcagcacagggaagctgccgcctacctgcacggtagactgcaggctctcggccttcaactgtttgtgaaggaccctgcgctgcggcttcctactgtcaccactgtggcagtgcctgccgggtacgactggcgggatatcgtgtcctacgtgatagatcatttcgatattgagattatgggagggttgggtccatcaactggaaaagtcctccggattggcctcttgggctgcaacgcaactcgcgaaaacgtggatagagtgactgaagcactgcgagcagccttgcaacattgtccaaagaaaaagctg

SEQ ID NO: 249293 - DNA, 1176 bp, synthetic construct
  misc_feature 1..1176: note = Description of Artificial Sequence: Synthetic coding sequence
  source 1..1176: mol_type = other DNA
atggctagccataaactcctggtcaccccacccaaggcccttctgaagccccttagcattccgaaccagctgctcctgggacccggcccatctaatctgcctcccagaatcatggcggcagggggcctgcagatgataggcagcatgtctaaagatatgtaccaaatcatggatgagatcaaagagggaatccagtacgttttccagactaggaaccccttaaccttagttatctctggttcaggccactgcgccctcgaagcagccctcgtcaacgttctggagcctggagatagctttctggtaggtgccaacggaatttggggtcagagggctgtggacataggggaaaggataggagctcgcgtgcatcccatgacgaaggaccccggaggtcactataccctgcaagaagtggaagaggggttagctcagcacaaacccgttttgttgttccttacgcatggcgagtcaagcacaggagtcctacagcccctcgatggattcggcgaactctgccatagatacaagtgcttgctcctcgtcgattccgtggctagtcttggaggcacaccgctgtacatggatagacaaggaatcgatatcctgtatagtggctctcaaaaagccctgaatgctcccccgggaacttccctgatctctttcagcgataaagctaagaagaagatgtactcgcgaaagacaaagcctttttcattctatctggatattaagtggcttgctaacttttgggggtgcgatgatcagcccaggatgtatcaccataccatccctgtaatctcgctttatagtttgcgcgagagtctcgctctgatagctgaacaaggcctggaaaactcctggaggcaacacagggaagccgctgcgtacctccacggacgcctccaagctctcggcctccagctcttcgtcaaggatccagcgcttcgtttgcctaccgttaccaccgttgcggttccggctgggtatgactggagggatatcgtttcatacgtgattgatcactttgacatcgagataatgggcggacttggaccctctaccgggaaggtcctgaggatcggcctgcttggatgcaacgctacccgcgaaaacgtggaccgggtcaccgaagctctgagagctgccctgcagcattgccctaaaaaaaaactc

SEQ ID NO: 249294 - DNA, 1176 bp, synthetic construct
  misc_feature 1..1176: note = Description of Artificial Sequence: Synthetic coding sequence
  source 1..1176: mol_type = other DNA
atggcatcacataaacttctggttacacctcccaaggctctgcttaaacctcttagtatccccaaccagctcctgcttggccccggcccgagtaatttgccacctcgcatcatggccgctggggggcttcagatgattggatccatgtccaaagatatgtatcagataatggatgagatcaaggagggaattcagtacgtttttcagacacgaaatcctctgaccctagtcatctccggctcaggacactgtgccctggaggcagcattagtgaatgtgttagaacctggcgactcctttctggtgggagccaacggtatttggggacagcgagccgtagatatcggtgaaaggatcggcgctagagttcaccctatgacgaaagatcccggcggccactacacacttcaggaggtggaagaaggtctggcccagcacaagcctgtactgctgttcttgacccacggagaaagcagtacgggagtgctgcagcccctggacggattcggcgaactctgccacaggtacaagtgtctgttgcttgtggatagcgttgcctctctaggcggcacccccctatatatggacagacaaggtatcgacattttatattccggaagccagaaggctctcaacgcgccacctggcacatccctcatttcgttttctgataaagccaaaaaaaaaatgtacagtaggaaaaccaagcccttcagtttctacttggacattaaatggttagctaatttttggggttgtgatgatcagcctaggatgtatcaccacaccattccggtcatttccctgtattctttgcgcgaatcactagccctgattgccgagcaggggttggagaacagttggcggcaacatcgtgaggcggccgcatacctgcacggccggctacaagcactgggtctgcagttatttgtaaaagatccggctctaaggcttcctactgttacaaccgtggccgtacctgccggttacgattggcgggatatcgtttcatatgtaattgatcatttcgacatcgagataatggggggtctgggcccatctacgggtaaggtcttgagaatcggactgttgggctgcaacgcgacccgcgagaacgtagatcgcgtgacagaagccctgcgggccgcgcttcagcattgccctaagaaaaagctg

SEQ ID NO: 249295 - DNA, 2007 bp, synthetic construct
  misc_feature 1..2007: note = Description of Artificial Sequence: Synthetic coding sequence
  source 1..2007: mol_type = other DNA
atgaaatgggtgtcatttatctcacttctgtttcttttctcgtcggcatactccgggtcgttggacaagcggcacggcgaagggacctttacgtccgatgtctccagctacctcgaaggacaggccgctaaagagtttatcgcctggcttgtcaagggacggcacggggagggcaccttcacctccgacgtgagctcctaccttgagggacaagccgccaaggaattcatcgcttggctcgtgaagggacgagatgctcacaagtcagaagtcgcccaccggtttaaagatctcggcgaagagaactttaaggcactggtcctcattgccttcgcacaatatcttcagcagtgcccctttgaggaccatgtgaaactggtgaacgaagtgacggaattcgccaagacctgtgtggcagacgaaagcgccgaaaattgtgacaagtcgctccataccctgtttggtgataagctgtgtaccgtggcaacgctgcgagaaacttatggtgaaatggccgattgttgcgctaagcaggaacccgaacgtaacgagtgttttttgcagcataaggacgacaacccgaatcttcctcgcctggtgcggccggaagtcgatgtgatgtgcactgcgtttcatgataatgaggaaacttttctcaagaaatacctctacgagattgcgcgtagacatccttatttctacgcgcctgaactgcttttctttgcaaaaagatacaaggcagcatttaccgagtgctgccaagccgcagataaagccgcttgtctgttgccgaaacttgatgagctgcgcgacgaaggtaaagcatccagcgcaaagcaaaggcttaagtgtgcaagccttcagaaatttggcgaacgggcattcaaagcctgggcggtcgcacgcctgtcccaacgcttccccaaggcagaatttgcagaagtgagcaagctcgtcaccgatctgaccaaggtccataccgagtgttgtcacggagacttgcttgagtgcgcagatgacagagcagatctggcgaagtacatatgcgaaaatcaagacagcatttcatccaagttgaaagagtgttgcgaaaaaccattgctggagaaatcccactgtatcgccgaagtggaaaatgacgaaatgccggcagatctcccttcgcttgcagctgatttcgtggagtccaaagatgtgtgcaagaactacgccgaagctaaggatgtgttccttgggatgtttctttatgaatacgcaagaaggcatccagattacagcgtcgtgcttcttctgaggctcgccaagacttatgaaaccactctggagaagtgctgtgcagcagcagatccacatgagtgttacgccaaggtctttgacgagtttaaacctcttgtcgaggagccacagaatctcattaagcagaactgtgaactttttgagcaactgggagaatacaagtttcaaaacgccctgctcgttcggtacaccaagaaggtgcctcaagtgtcgactcctactctggtggaagtgtcccgcaacttgggaaaggtcggctcaaagtgctgcaaacacccagaagcaaagagaatgccatgcgctgaggattacctgtcggtcgtgttgaaccaactttgtgtgttgcatgaaaagacccccgtttcggacagagtgacgaaatgttgtaccgagagcctcgtgaacaggaggccatgtttctcggcgcttgaagtcgatgaaacctacgttcctaaggagttcaacgctgagactttcacctttcatgctgatatttgcactctgtcggaaaaggagagacagattaagaaacaaacggcactcgttgaactcgttaaacataagccaaaagccactaaagaacagctgaaggcagtgatggatgacttcgctgcatttgtcgagaagtgttgtaaggctgatgataaggaaacgtgttttgcagaagaagggaagaagctggttgcagcgtcacaagcggcgctgggcttg

SEQ ID NO: 249296 - DNA, 2007 bp, synthetic construct
  misc_feature 1..2007: note = Description of Artificial Sequence: Synthetic coding sequence
  source 1..2007: mol_type = other DNA
atgaagtgggtgtcttttatcagcttgctcttcctcttctcgtcagcatatagcggttcgctggataagcgccatggagaagggaccttcactagcgatgtgtcatcgtacctggaaggacaagccgccaaagagttcatcgcgtggctcgtgaaaggacgccacggcgaaggcaccttcacctccgacgtgtcctcgtacttggaggggcaggccgcgaaagaattcattgcttggctggtgaagggacgcgatgcgcacaagtctgaggtggcgcataggtttaaggacctgggtgaagaaaacttcaaggcgttggttctcatcgcatttgcccagtacctgcagcaatgccctttcgaggaccacgtcaaactggtgaacgaggtgactgaattcgccaagacttgcgtcgcggacgaatccgcagaaaactgcgacaagtcgctgcacactctcttcggcgacaagctctgcactgttgcgacgctgagagaaacttacggcgagatggccgactgttgcgcgaagcaggaaccggaacggaacgagtgtttcctgcagcacaaggatgataacccgaacctgccgcggctggtgcggccggaagtcgacgtgatgtgcaccgctttccacgacaacgaggagactttcttgaagaagtacttgtacgagattgcgagacggcacccctacttttacgcccctgaactgctgttcttcgccaaaaggtataaggctgcttttactgaatgctgtcaggcagccgacaaagcggcctgcctgcttcctaagctcgacgaactccgggacgaaggcaaggcgtcgagcgccaaacagcgcctcaagtgtgcgtccttgcagaagttcggggaacgggctttcaaggcctgggccgtggcgcgcctctcgcaacgctttccaaaggccgaatttgccgaggtgtccaagctggtgaccgatctgacgaaggtgcacaccgaatgttgtcacggagatctcctggaatgtgctgatgatcgggccgatcttgcaaagtacatttgcgaaaaccaggactcgatctcttccaagctcaaagagtgctgtgagaagcctctcttggaaaagtcgcactgcatcgcagaggtggagaacgatgaaatgccggcggacctcccgagcctggccgctgatttcgtggagtcgaaggacgtctgtaagaattatgcagaagcgaaggacgtgttcctcggcatgtttctgtacgagtacgcaagaaggcatcccgactactcggtggtcctgctgctgcgcctcgccaaaacttacgagactaccctggaaaagtgctgcgcagcggccgatccgcatgaatgctatgcgaaggtgtttgatgaattcaagcctctggtggaagaacctcagaacctcatcaaacagaactgcgaacttttcgaacaattgggagagtacaagtttcaaaatgcgctcctggtccggtacaccaagaaggtcccccaagtgtccaccccaaccctggtggaggtttcccggaacctgggaaaggtgggatcgaaatgttgcaagcacccggaggccaagagaatgccatgcgctgaggactacctgagcgtggtgttgaaccagctgtgtgtgctgcatgaaaagaccccggtgtctgacagggtgacgaagtgctgcactgagtcactggtgaaccgccgaccatgtttttccgcgctggaggttgacgaaacctacgtgcctaaggaattcaatgccgaaacgttcacctttcacgcggatatctgcacgttgtcagaaaaggagaggcagatcaagaaacagaccgccttggtggagctcgtgaagcataagccaaaagctaccaaggaacaactgaaagcggtcatggatgactttgccgcatttgtggagaagtgctgcaaagctgatgacaaggaaacctgtttcgcggaggaggggaagaagttggtggccgcctcacaggcggccctcggactt

SEQ ID NO: 249297 - DNA, 2007 bp, synthetic construct
  misc_feature 1..2007: note = Description of Artificial Sequence: Synthetic coding sequence
  source 1..2007: mol_type = other DNA
atgaagtgggtatcatttatctctctgttattcctattcagcagcgcttacagcggcagtttggataagaggcacggcgagggtactttcacatctgacgtcagctcatacctggaagggcaggccgcgaaagagttcattgcttggctggtgaaagggaggcacggagagggtacctttacctccgatgtgtcgagttaccttgaaggtcaggctgccaaagagttcatcgcctggctggtaaagggtcgggacgcccacaaatctgaggtagcccaccgttttaaggacctgggcgaggagaatttcaaggctctggtcctgatagcattcgcccagtacctgcagcaatgccccttcgaagatcacgtgaaattggtgaacgaggtcaccgaatttgccaaaacatgcgttgcggacgaatctgcagaaaactgtgataaaagtctgcatacgctgttcggtgacaagctatgcaccgttgccactctccgggagacctacggcgagatggcagactgttgcgcaaagcaagagccggaaaggaacgagtgctttttgcagcataaggacgataaccccaatctgccgagactggtgcgcccagaagttgacgtgatgtgtacagcgtttcacgacaacgaggagactttccttaagaagtacctgtacgagatagcccggcgccacccttacttttatgccccggaacttctgttcttcgcaaagaggtacaaagctgcctttacagagtgctgtcaggctgcagataaggcggcctgtttgctcccgaagctcgacgagttacgggacgagggcaaagcctcgagtgccaaacagaggctgaaatgtgccagcctacagaagttcggcgagcgagccttcaaggcctgggccgtcgcacggttaagtcagaggtttcccaaggcggaatttgccgaagtttcgaagctggtcacagacttaaccaaagtgcatacggaatgctgccacggagacctgctggagtgtgctgacgatcgcgccgatctggctaaatatatctgcgagaaccaggattccattagctcgaaactgaaagagtgttgtgagaaacctttactcgagaagagtcattgcatcgcggaagtagagaacgatgagatgccggccgatctcccaagcctggctgccgattttgtcgagtctaaagacgtctgcaagaattacgcagaagccaaggacgtcttcttggggatgtttctttatgagtatgccaggcgtcatccggactactctgtggtgctgctcttgcggctggccaagacatatgagacaacactggaaaagtgctgcgccgctgccgacccacacgagtgctacgcaaaggtctttgatgagttcaagccgcttgtagaagaaccacagaatcttatcaagcagaactgcgagttattcgagcaactcggtgaatacaagttccagaacgccctcctcgtgaggtacacaaaaaaggtgccacaggtgagcacacctacactggtagaggtgtcaaggaatctcggaaaagtgggatctaagtgttgtaagcacccagaggcgaaacggatgccttgcgcagaagactacctttccgtcgtgcttaaccagctctgcgtgctgcacgaaaaaacacccgtatctgatcgtgtcacaaagtgctgcaccgagtccctagttaatcgacgtccgtgcttctctgctttagaagtcgacgagacttacgtgcccaaggagttcaatgccgaaacgttcacatttcatgctgacatctgcacccttagcgaaaaggaacggcagataaagaagcagaccgccctggtggagctcgtcaaacacaagcctaaagccaccaaagagcagttaaaggcagtgatggacgatttcgctgcgttcgttgaaaagtgttgtaaagcagacgacaaagagacatgtttcgccgaggagggcaaaaagctcgtggcagcttcccaggcagcccttggcttg

SEQ ID NO: 249298 - DNA, 2007 bp, synthetic construct
  misc_feature 1..2007: note = Description of Artificial Sequence: Synthetic coding sequence
  source 1..2007: mol_type = other DNA
atgaaatgggtttcttttatttccctgttgtttctgttctcatccgcatatagtggctctctggacaagagacatggcgaaggcacgttcactagcgacgtgtccagctacctggagggacaggcggccaaagagttcatcgcttggcttgtgaaggggcgccatggagaggggaccttcactagcgatgtgtcctcctaccttgaggggcaggcagccaaagaatttatcgcctggcttgtgaaaggtcgagacgctcacaaatcagaagtggctcacaggttcaaggacctgggcgaggagaacttcaaggcgctcgtgttgatcgcttttgcacagtacctgcaacagtgtccgtttgaggatcacgtgaagctagtgaatgaagtaactgagttcgcgaagacctgcgttgctgacgagagcgcagaaaactgtgataagtccctgcacacactgttcggcgacaaactgtgcaccgtcgcaacgctgcgcgaaacttacggggagatggcagattgctgcgctaagcaggaacccgagaggaatgagtgctttttgcagcacaaagacgataaccctaacctcccccggctggttcggcctgaagtagacgtgatgtgtactgcatttcacgataatgaagagactttcctgaagaagtatctgtatgaaattgcacggcgtcacccatacttctatgcacccgaacttctgttcttcgctaagaggtacaaggcggcatttacagagtgttgccaagctgcagacaaagccgcctgcctattacctaaattggacgaactgcgcgacgaaggcaaagcttcaagtgcgaaacagaggttgaaatgtgcctctctgcaaaaatttggagagcgagcattcaaggcatgggctgtcgcccgcctgagtcagaggtttcccaaagcagagtttgctgaggttagcaagttggtgaccgatctcaccaaggtacatacagagtgttgtcatggggacctgctggagtgtgccgatgacagagccgatttggccaagtatatttgcgaaaaccaggactcgatttccagcaagctgaaagagtgctgtgaaaagccattgctcgagaaatcccattgcattgccgaagtagagaatgacgagatgcccgcggatctgccatctctagctgccgacttcgtcgagtctaaagacgtctgtaaaaattatgcagaggctaaggatgtatttttgggcatgtttctgtacgagtacgcccggagacacccggattatagtgtggtgcttcttctgaggttagccaagacttatgagaccaccctggaaaagtgttgtgctgcagcggacccgcacgaatgctacgccaaggtgtttgacgagtttaagcccctggtcgaagagccacagaacctgataaagcagaactgtgagctcttcgagcaacttggagaatataaatttcaaaacgctctgttggtgaggtatactaagaaggtcccccaagtctcaacacccacactggtggaagtgtcccggaacctgggaaaggttggaagtaagtgttgtaagcatcccgaggccaagcgcatgccgtgtgccgaagattacctgagtgtggtcctgaatcaactttgtgtgctgcacgaaaagacacccgtgtccgatagagtcactaaatgctgcaccgagagtctggtgaacaggagaccttgctttagcgcacttgaagtggacgaaacctacgtaccgaaggaatttaatgctgagactttcacctttcatgccgatatatgtactcttagtgaaaaagagcggcagattaagaagcaaaccgccctggttgaattggtcaagcataagcctaaggccactaaagaacagctcaaggctgttatggacgacttcgctgccttcgtggagaagtgctgcaaggccgatgacaaggaaacctgcttcgccgaggagggcaagaagctcgtcgcagcttcacaggccgccctggggttg

SEQ ID NO: 249299 - DNA, 2007 bp, synthetic construct
  misc_feature 1..2007: note = Description of Artificial Sequence: Synthetic coding sequence
  source 1..2007: mol_type = other DNA
atgaagtgggtcagcttcatctccctgctctttctcttctcatccgcctactcaggatctctcgataaacggcacggagagggaaccttcacctcggacgtgtcatcatacctggagggacaagcagctaaagagttcatcgcctggttggtcaaagggcggcacggggaaggtactttcacctccgacgtatcctcgtacctcgaggggcaggctgcaaaggaattcatcgcttggctggtgaagggacgggacgcccataaaagcgaagtcgcgcatcgcttcaaagatctgggagaagagaatttcaaggcccttgtgcttatcgcctttgctcaatacctccagcaatgtcctttcgaggaccatgttaagctcgtgaacgaagtgaccgagtttgcgaagacttgcgtcgcggacgaatcggccgagaactgtgacaaatcacttcatacgttgttcggcgataaactgtgcactgtggccaccctccgagaaacctacggggagatggccgactgctgcgcgaaacaggaacctgaacgcaacgagtgttttctgcagcacaaggatgataacccgaatctgcctcgcctcgtgcggccggaggtggatgttatgtgtactgcgtttcacgacaatgaagaaacgttcctgaagaagtatttgtacgagatagctcgcagacatccgtacttctacgccccagaactgttgttcttcgccaaacggtacaaagcagcgtttactgaatgctgtcaggcggcagacaaggcggcctgcttgcttccaaagctcgatgaattgcgcgacgaaggaaaagcctcgtcagccaagcagagactcaaatgcgcctcgctgcagaagttcggagagcgcgcattcaaggcatgggcggtggcccgcctgtcgcagagattcccgaaggccgagttcgccgaggtgtccaaattggtcactgacctgaccaaggtgcatacggaatgctgtcacggcgaccttttggaatgtgcggatgacagagctgaccttgccaagtacatatgtgaaaaccaagattccattagctccaagctgaaagagtgctgcgagaagccactgctggaaaaatctcattgtattgcggaggtcgagaatgacgaaatgccggcagatctcccgtcgctcgcggcagactttgtggaaagcaaggacgtgtgcaagaactacgccgaggcgaaggatgttttccttggcatgttcctctacgagtacgcgcgccggcacccagattactccgtcgtgctgctgctgcggctggcaaagacctatgaaactaccctggagaagtgttgcgcggcggcggatccgcacgagtgctatgccaaggtcttcgacgagttcaagcctcttgtggaagagccgcaaaacctgatcaaacagaattgcgagctgttcgagcaactgggcgaatacaagttccagaacgccctgcttgtgcgctacaccaagaaggtgccacaagtgtcgactcccactttggtagaggtatctcgcaacctcggtaaggtgggatcgaaatgctgtaagcacccggaggcaaagaggatgccctgcgctgaagattaccttagcgtggtcctcaatcagctctgtgtcctgcacgaaaagacgccggtgtccgacagagttactaagtgctgcaccgaatcgctggtgaacaggcggccgtgcttcagcgccctggaagtggacgaaacgtacgtgccaaaggagttcaacgcagaaaccttcaccttccacgccgatatctgcaccctcagcgagaaggagagacagatcaagaaacagactgcgctcgtcgaacttgtcaaacacaaaccaaaagccactaaggaacaactgaaggctgtcatggacgattttgctgcgttcgtggaaaagtgctgcaaggcagacgacaaagaaacctgctttgcggaagagggtaagaaacttgtggctgcctcccaggccgccctgggtttg

SEQ ID NO: 249300 - DNA, 2007 bp, synthetic construct
  misc_feature 1..2007: note = Description of Artificial Sequence: Synthetic coding sequence
  source 1..2007: mol_type = other DNA
atgaagtgggtgagcttcatttcactgctttttctgttctcgtctgcctactccggttccctcgacaaaaggcatggcgaggggacgtttaccagcgatgtgtcatcctacctcgaaggacaagcagcaaaggagtttatagcatggctcgtcaagggtcgtcacggtgagggaacttttacctcagatgtcagctcctacctggaaggtcaggcagcaaaagagtttattgcctggttggtgaaagggagagacgcccacaaatcagaagtggcccatagattcaaggatttgggtgaggagaatttcaaggctcttgtgctcatcgcttttgcccaataccttcaacaatgtccctttgaggaccacgttaagctggtgaacgaagtgaccgaatttgctaagacttgtgtggccgacgaatcggcggaaaattgcgataagtccttgcatactctgtttggagacaagctctgtactgtcgcaacgctgagagaaacctacggagagatggcagactgttgtgccaaacaggaaccggaaagaaatgaatgctttctgcagcataaggacgacaatccaaacctgcctcgtctggtgaggcctgaggtggacgtgatgtgcaccgcgtttcacgacaacgaagagacttttctcaagaaatacctgtacgagattgcccgacggcacccatacttttacgcccccgagcttctgttctttgcaaagcggtataaggctgcttttaccgaatgttgtcaagcagcagacaaggcggcatgtttgcttcctaaacttgatgaactcagagacgagggaaaggcatcgtccgcaaagcagagattgaagtgtgcttcgttgcagaaattcggagagcgcgcatttaaggcatgggcagtcgcacgactttcccagagattccctaaggcagagtttgcagaggtgtcgaaactcgtgactgaccttactaaagtgcatactgaatgctgtcacggtgatcttctggagtgtgcagatgatagagcagatctggcaaagtacatatgcgaaaaccaggattccatcagcagcaaactcaaggagtgttgcgagaagcctcttctggagaaaagccactgtattgcggaagtcgaaaatgatgaaatgcccgccgacctcccatcgttggctgcagatttcgtggaatctaaggatgtgtgcaagaattacgcagaagcgaaagacgtgtttcttggaatgtttctctacgaatatgcgcgccggcatcctgattactcggtggtgcttttgctgcgacttgcaaagacttacgagacgactctggaaaagtgttgtgcagccgcagatcctcacgaatgctacgccaaggtctttgatgagttcaagccccttgtcgaagaacctcaaaacttgattaagcaaaactgtgaactgttcgaacaactcggggagtacaaattccagaacgcacttctggttcgatacactaagaaggtgcctcaggtgtccacgcctacgcttgtggaggtcagcagaaacctgggtaaggttggatcgaagtgctgcaagcatcctgaggcaaagagaatgccgtgtgctgaggattacctgagcgtggtgctgaaccaactttgtgtgttgcacgaaaagactcctgtgtccgatcgagtgactaagtgttgcactgagtctcttgtcaaccgcagaccttgcttttcagcacttgaagtggacgaaacctacgtgccaaaagaattcaacgcggagactttcacctttcatgcagatatttgtaccctttcagaaaaggaaagacagattaagaaacaaactgcactggtggaactggtgaaacacaaacctaaggcaactaaggaacagcttaaggcagtgatggacgactttgccgctttcgtcgaaaagtgctgtaaagccgatgataaggagacttgttttgcagaagaaggcaagaaactcgtggcagcgtcgcaggccgccttgggcctc

SEQ ID NO: 249301 - DNA, 2007 bp, synthetic construct
  misc_feature 1..2007: note = Description of Artificial Sequence: Synthetic coding sequence
  source 1..2007: mol_type = other DNA
atgaagtgggtgtcattcatttcactgctgtttctcttctcctcggcgtactctggatcccttgacaagcgccatggagaaggaacgttcacttctgacgtgtcgagctatctcgaaggccaggcggcgaaggagtttatcgcttggctcgtgaaggggcggcacggggagggaaccttcacttcggatgtgtcctcgtacttggagggtcaggcggccaaggagttcattgcctggctggtgaagggtcgcgatgctcataagtccgaggtggcacatcggtttaaggatctgggagaagagaactttaaggctctcgtgctgatcgcgtttgcccagtacctgcaacaatgtccgttcgaggaccacgtgaagctggtgaacgaagtcaccgaattcgccaagacttgcgtggcagacgaatccgcggaaaattgtgacaagagcctgcacactctctttggcgataagttgtgtaccgtggcgactctcagagagacgtacggcgaaatggctgattgttgtgccaagcaggagcctgagcgcaacgagtgctttctgcagcataaggacgacaatccaaacctgcctagacttgttcgcccggaggtggatgtcatgtgtaccgcattccacgataacgaagaaactttcctcaagaaatacctgtacgaaatcgctcgccggcatccatacttctacgccccggaacttctgttcttcgccaagagatataaggccgccttcaccgaatgctgccaggcggcggacaaagccgcctgtctcttgccgaagttggacgagctgcgcgatgaaggaaaggcgtcaagcgcgaaacaacggctgaagtgcgcctcgctgcagaagttcggagaacgggctttcaaggcctgggccgtggctagactctcccagcgtttccctaaggccgaattcgcagaggtgagcaaactggtcaccgacctgactaaggtccatactgaatgctgccacggagacttgttggagtgcgcggacgacagggcagatttggcgaagtatatctgcgaaaaccaggactcaatctcaagcaaacttaaagaatgttgcgaaaagccactcctcgaaaagagccactgtatcgccgaggttgagaacgacgaaatgccagccgaccttccgtcgctggccgcagactttgtcgagtctaaggacgtgtgtaagaattacgcagaggccaaagatgtgtttctgggaatgttcctgtacgaatacgccaggcgacacccggattactccgtggtcctccttctgcgcctggcaaagacctacgaaaccaccttggagaaatgttgcgccgcggcggacccacatgagtgctacgccaaggtgttcgatgaattcaagccactggtggaggaaccacaaaatctgatcaaacaaaattgcgaactgttcgagcagctgggcgagtacaaattccaaaacgccctcctggttaggtacaccaaaaaagttcctcaagtctccactccgactctggtggaggtgagccggaacctcggcaaggtggggtcaaagtgctgtaaacacccggaggcgaagagaatgccgtgcgcagaggactacctctcggtggtgctgaatcagctgtgcgttcttcacgaaaaaactccagtctcggaccgcgttaccaaatgttgtacggagtctctggtgaaccggcgtccatgtttctccgcgctggaagtggacgaaacctacgtgccaaaggaattcaatgcagaaacttttacctttcacgcagatatatgcacgttgtctgaaaaggaacggcaaatcaaaaagcagaccgccttggtcgaactcgtaaagcacaagccaaaggccactaaggagcagcttaaggcggtgatggatgacttcgcagcattcgtggaaaagtgctgcaaagcagatgacaaggagacttgcttcgctgaggaagggaagaagctcgtcgcagcgagccaggccgccctgggactc

SEQ ID NO: 249302 - DNA, 2007 bp, synthetic construct
  misc_feature 1..2007: note = Description of Artificial Sequence: Synthetic coding sequence
  source 1..2007: mol_type = other DNA
atgaaatgggttagcttcatctccttgctgtttctttttagcagcgcctactcaggatctctggacaagaggcatggcgagggcaccttcaccagcgacgtgagcagctacctggagggccaggctgcaaaagagtttatcgcttggctggtgaaaggaaggcacggagagggtaccttcacctcagatgtctccagttatctggaaggccaagcggccaaagaatttattgcctggttggttaagggcagagatgcccacaagagcgaggtagcccaccgattcaaagacctcggcgaagagaactttaaggctttggtgctcatcgcctttgcccagtacctgcaacagtgccccttcgaggaccacgtcaagctcgtcaacgaggtgaccgaattcgccaaaacctgcgtggcagacgagagcgctgagaattgtgacaagtctctgcatactctgtttggcgacaagttatgcactgttgctacacttagagaaacctatggagaaatggcagactgctgtgctaaacaggaacccgagcgaaacgagtgctttctgcagcacaaagacgacaacccaaacctgccccgcttggtccgccccgaagtcgatgtcatgtgtacagcctttcacgacaatgaggagacttttttgaaaaaatacctgtatgagattgctagacgtcatccttacttttatgctcctgagctcctgttttttgctaagaggtataaagccgcatttactgagtgttgccaagccgcggacaaagccgcctgtctattgcccaagctggatgaactgcgcgatgagggaaaggcttcatctgctaaacagcgcctcaaatgtgcttctcttcagaaattcggggaacgcgctttcaaggcgtgggccgtggccagactgtcacagagattcccaaaagccgagttcgcagaggtgagcaagttggttactgatctcacgaaggttcacaccgaatgttgtcacggtgatcttcttgagtgcgccgacgatcgtgccgatctggctaaatacatctgcgaaaaccaagacagcatcagctcaaagcttaaggagtgctgcgagaaacctctgctagaaaagtctcactgtatcgctgaagtggaaaacgacgagatgcccgcagacctgccgagtttagctgcagactttgtggaaagcaaggacgtgtgcaagaactatgcagaggctaaagacgtcttcctgggcatgtttctctatgagtacgcgcgtaggcacccggactacagcgtagttcttttgctacgcctcgcaaaaacctacgagaccacattagagaaatgttgcgctgcagcagatccccatgagtgttatgcaaaggtgtttgatgaatttaaacctcttgttgaagaacctcaaaacctgattaaacagaattgcgaactgttcgaacagctgggtgaatacaaattccagaatgccctgttggtgcgatataccaaaaaagtgcctcaggtctctactccaactctggtcgaggtgagtagaaaccttggcaaagtgggcagcaagtgctgcaaacacccagaagcaaagagaatgccgtgtgctgaagactaccttagtgtcgtcctgaatcagctgtgtgttctccacgagaaaacacctgtcagtgatagggtgacgaaatgctgcaccgaaagccttgtcaaccgccgcccatgcttctcggctctcgaggttgacgaaacctacgtgcccaaggaatttaacgctgagacctttaccttccacgcagacatttgcaccctcagcgagaaagagcgccagatcaagaaacagactgctttggtggagctggtgaagcacaagcctaaggcaacaaaggaacagcttaaggcagtcatggacgatttcgctgcctttgtagagaagtgctgtaaagccgatgataaggagacctgctttgccgaagaaggcaaaaagcttgtggctgcgagccaggccgccctggggctc

SEQ ID NO: 249303 - DNA, 2007 bp, synthetic construct
  misc_feature 1..2007: note = Description of Artificial Sequence: Synthetic coding sequence
  source 1..2007: mol_type = other DNA
atgaaatgggtgtcattcatatccctcttgtttctcttttctagcgcctactcaggcagcctcgacaaaagacatggagagggcacatttacaagcgatgtgagttcttatctggagggtcaggctgcaaaagaatttatcgcttggctcgttaagggcagacacggagaaggcacttttactagcgacgtgagctcgtacctagaggggcaagcagctaaggaatttatcgcttggctcgtgaaaggacgcgacgcgcacaagagtgaggtggcacaccggttcaaagatctgggcgaagagaatttcaaggccctcgttctgatagcatttgcccagtacctccagcagtgcccgttcgaggaccacgtcaagctggtcaatgaagtgactgagtttgccaagacgtgcgtggcagatgaatccgctgaaaattgtgacaagagtttacacaccctgttcggtgataagctgtgcacagtggcaactctcagagagacttacggagagatggctgattgttgtgctaagcaggaaccagagcgtaatgagtgcttccttcagcacaaggatgacaatcccaacttgccgaggctcgttcgacccgaggtcgacgttatgtgcaccgcatttcacgataacgaggagacattccttaaaaagtatctgtatgaaatcgcccggagacatccctacttttacgctcctgaactcctgttttttgccaaacgttataaagctgcttttacagagtgctgtcaagccgccgataaggctgcatgcctattgcctaaactggatgagctccgagatgaggggaaggcaagtagtgcgaagcagaggttgaagtgtgccagcttgcagaaatttggtgaaagggctttcaaagcctgggccgttgcacgtctcagccagagatttcccaaagctgaattcgccgaagtgagtaagttggtcacagacttgactaaggtgcacacggagtgttgtcatggagatctgttagagtgcgccgatgacagagctgatctggccaagtacatctgcgaaaatcaggatagtattagcagcaagctgaaggagtgctgcgaaaaacccttactggagaaatcccattgtatcgccgaagtggaaaacgacgagatgcctgctgatttgccgagcctggccgctgatttcgtggagtccaaagacgtctgtaaaaactacgcagaggcaaaggacgtattcctcggaatgttcctgtatgagtacgcccgaaggcatccagactactcggtagtcctgttgctgcggctggcgaaaacttatgagaccaccctggagaagtgctgtgccgcagcagaccctcacgaatgctacgccaaggtttttgacgagttcaagcccctggtcgaagaacctcagaatctcatcaagcaaaactgtgagttgttcgagcagctgggtgaatacaaatttcagaacgctctcctagtaaggtatacaaagaaggttccccaggtatccacgccgaccctcgtggaggttagtcgcaatcttggcaaagtaggatctaagtgttgcaagcaccccgaggcaaagcgcatgccttgtgccgaagactatctgagcgtggtgctgaatcaactgtgcgtgctgcacgaaaagacgcccgtgtccgatagggtgaccaaatgctgtactgaaagcctggtgaatcggcgcccctgctttagtgcgctggaagtcgacgagacctatgtgccgaaagagttcaatgcagagacttttactttccatgcggacatttgcactctcagcgagaaggaacgacaaatcaaaaagcagactgccctggtagagctggtgaaacataaaccaaaggcaacaaaggagcagttaaaagccgttatggacgatttcgctgcatttgtggagaagtgctgcaaggcagacgataaagaaacctgctttgccgaagaaggtaaaaaactagtggcagcctcacaagctgccttgggcctg

SEQ ID NO: 249304 - DNA, 2007 bp, synthetic construct
  misc_feature 1..2007: note = Description of Artificial Sequence: Synthetic coding sequence
  source 1..2007: mol_type = other DNA
atgaagtgggtgagctttattagcctcctgttcttgttctccagtgcttacagtgggtctctagacaaacgtcatggagagggcacattcacaagcgatgtcagcagctacctagaagggcaggctgccaaggagtttatcgcgtggctcgtcaagggtagacatggagagggaacttttacctctgacgtcagttcatatctggagggtcaggcggccaaggagttcatagcatggttagtgaaggggagagacgcgcacaagtctgaagtggcccaccgcttcaaggatctcggagaggaaaattttaaggctctcgtactgatcgcctttgcccagtatcttcagcagtgccccttcgaagatcacgttaagctggtgaacgaggtgactgaatttgccaagacatgcgtggcggatgagtcagcagaaaattgcgacaagtccctgcacacactgttcggggacaaactctgcaccgtcgcaaccctccgtgagacctacggcgaaatggctgattgctgtgctaaacaggaaccagagaggaacgaatgttttctccaacacaaagacgataaccctaacctcccccgccttgtcagacctgaggttgatgtgatgtgcactgcctttcacgataacgaggagacatttttgaaaaaatacctgtacgaaatcgctcgaagacacccttatttctacgcgcctgaactgctgttcttcgcaaaacgatataaagcagccttcacggagtgctgtcaagccgctgacaaggctgcttgtttactacctaagctggatgaactgagagatgagggaaaggcgagctctgccaaacaacggctcaaatgtgcttctctgcaaaaattcggggagcgggccttcaaagcatgggcagtcgctcggctgtcccagagattccctaaggctgagttcgctgaagtgagcaaacttgtcaccgatttgactaaagtgcacaccgagtgctgccacggggatctgctcgaatgcgccgatgacagggccgacctggcgaagtacatctgcgaaaatcaggatagcatttcatccaagttaaaggaatgctgcgagaagccgttactggaaaaaagtcactgtatcgctgaagttgaaaatgacgaaatgcccgccgacctcccctcgctcgcggcggacttcgtagagagtaaagatgtctgtaaaaattacgcagaggccaaagatgtgtttctgggtatgtttctctacgaatatgcccgacgacaccccgattacagtgtggtgctgctactcaggctggctaaaacatacgaaactacactggaaaagtgctgcgccgctgccgacccccatgagtgttatgcaaaagtctttgacgaatttaagcccctggttgaagagccccagaacctgatcaagcagaattgcgaactgtttgagcagttgggggagtacaagttccagaacgctctgctggttcgttacacgaaaaaggttcctcaagtatcaaccccgacactggtggaagtgtcccggaatctggggaaggtagggtctaagtgctgcaaacaccctgaagccaagcggatgccttgtgcagaagattatctgtctgttgtgttaaaccagctttgcgtgctgcacgaaaaaactcctgtctccgatagagtgaccaagtgctgtactgagtccttggtaaatagacgaccctgcttctctgctctggaggtcgacgagacatatgttccgaaggagttcaacgcagagactttcaccttccatgcagacatatgcacgctttctgaaaaggagcgacagataaagaaacaaaccgccctagtggaattagtgaagcacaagcccaaggccaccaaggagcaactgaaggccgtaatggacgatttcgcggctttcgtggagaaatgttgtaaggccgacgataaagagacatgctttgctgaagaaggtaaaaaattggtcgcagctagccaagcggccctgggactt

SEQ ID NO: 249305 - DNA, 2007 bp, synthetic construct
  misc_feature 1..2007: note = Description of Artificial Sequence: Synthetic coding sequence
  source 1..2007: mol_type = other DNA
atgaagtgggtctccttcatcagtctgctcttcctattttcatctgcatatagtggatctctggataaaaggcatggagagggcacttttacctcggatgtgagctcctatctggaggggcaggcggcaaaggagttcatcgcctggctggtaaagggccgacatggagagggtacttttacaagtgatgttagttcgtacctggagggccaggccgccaaggagttcatcgcctggctcgtcaaaggaagggatgctcataagagcgaggtggcccataggtttaaagacctgggggaagaaaacttcaaggccttggtgctgatcgcttttgcccaatacctgcagcagtgtccctttgaggaccacgtgaagctggtaaacgaggtgacagaattcgcaaaaacgtgcgtcgccgatgagtcagcagaaaattgcgacaagtcactacacaccctgttcggagataagttatgtacagtagccaccttaagagaaacatacggagaaatggcagattgttgcgctaaacaggaaccagaaagaaatgaatgtttcctgcaacacaaggatgacaacccaaatttacccagacttgtacgacccgaagtcgacgtcatgtgtaccgccttccacgacaacgaggagacatttttaaaaaagtacctctacgaaattgctcggaggcatccttacttctacgcgccagagctactattttttgcaaagcgctacaaggcggctttcacggagtgttgccaggctgctgataaggctgcttgtctcctgcccaaactggacgagctgcgggacgagggcaaagcatcaagtgccaaacagagattgaagtgtgcttccttgcagaagtttggggagcgcgcctttaaagcttgggcagtcgcccgtctctcccagcggtttcccaaggccgagttcgcggaggtgtcaaaactcgtcaccgacctaacgaaggttcatacggagtgttgtcacggggacctgctggagtgtgcggacgatcgcgccgacctggccaaatacatatgtgaaaatcaggactccatttccagcaaactcaaggagtgttgtgagaagcccctcctggagaaatcgcactgtattgcggaggtggaaaacgatgaaatgcccgctgatcttccttccttagccgctgatttcgtcgagtccaaggatgtctgtaaaaattacgccgaagctaaggacgtattcctggggatgttcctttacgagtacgccaggagacatcctgactacagcgttgttctactcctgaggctggctaagacctatgaaacaacccttgaaaagtgttgtgctgcggcagatccccacgaatgttatgctaaggtgttcgacgaattcaagcctctggttgaggaacctcagaacttgatcaagcagaattgcgagctcttcgagcagctcggcgaatacaagttccagaacgctttgctggtgcggtacacaaaaaaggtgccccaggtcagtaccccaaccctggtggaagtgtcacgcaacctcggtaaggtggggagcaagtgctgtaaacatcccgaagcaaaacggatgccctgcgctgaagactacttatccgtggtcctgaatcagctgtgtgtcttacatgagaaaaccccagtcagcgatagggtgacgaagtgttgcacagagtcactcgtcaacaggcgtccttgctttagcgcccttgaagtggatgagacatatgtgcctaaagaatttaacgccgagacatttacctttcacgccgacatctgtacgctgagcgagaaggaaaggcagattaaaaagcagaccgcgctggtagagctcgtcaagcacaagcccaaggcaacgaaggaacaactcaaagctgtgatggatgatttcgcggccttcgttgagaaatgctgtaaggccgacgacaaggagacatgtttcgccgaggagggaaaaaagctggtggccgcaagccaggccgcacttggactt

SEQ ID NO: 249306 - DNA, 2007 bp, synthetic construct
  misc_feature 1..2007: note = Description of Artificial Sequence: Synthetic coding sequence
  source 1..2007: mol_type = other DNA
atgaagtgggtgagcttcatcagtctgcttttcctttttagcagcgcctactctggatctctggacaagaggcacggcgagggcacattcacctcggacgtgagcagctacctggaaggacaggccgccaaggagttcatcgcatggctggttaaaggccgccatggtgaaggtacttttacctccgacgtttcatcgtatctagaaggccaggccgcgaaggaatttatcgcatggctggtgaaaggccgagatgctcacaagagtgaagtggcacaccggttcaaggacttgggagaggagaactttaaggctctcgtcctgatcgcgtttgcacagtacctacagcagtgtccattcgaggaccacgtaaaactggtaaatgaggtcacagagttcgcaaaaacctgcgtcgctgatgaaagcgcagagaactgcgacaagtctctgcatacattatttggtgataaattgtgcactgtcgcaacgctgcgcgagacgtacggcgaaatggctgattgttgtgcaaaacaggagccagaaaggaatgagtgcttcttacagcacaaggatgataatccaaacctgccccgactggtccgccccgaggtggacgtgatgtgcacagcctttcacgacaacgaggaaacgttcctaaaaaaatacctgtacgaaattgcccgacgccatccttacttttatgcccccgagcttctgttcttcgcgaaacgttacaaggccgcttttacggaatgttgtcaggccgcggacaaggctgcgtgcctccttccgaagcttgatgagctccgcgatgaaggtaaggcatcttctgctaagcagcggctgaagtgtgcctccctgcagaagtttggcgagagggccttcaaagcttgggccgtagcacgattgtcgcagagattccctaaggcggagttcgcagaagtgtcaaaactagtcaccgatttgaccaaggttcacacggagtgctgtcacggtgatcttctcgagtgtgccgatgaccgcgccgacctcgccaaatacatctgtgagaatcaggactcaataagctccaagcttaaggaatgctgcgaaaaacctctgctcgaaaagtcgcactgtattgccgaggtagagaatgatgagatgccggcagacctgccttcactcgcagcagatttcgtggagagcaaagatgtgtgcaaaaattacgcagaggctaaagatgtctttcttggaatgttcctatatgaatatgctaggcgccacccagactactcagtggtgctccttcttaggctcgccaaaacgtacgagactaccctggagaaatgctgcgctgccgccgacccccacgagtgctatgcaaaagtgtttgatgaattcaagcccctagtggaggaacctcagaacttgataaaacagaactgcgaactcttcgagcaactgggcgagtataagtttcagaacgcccttttggtacggtacactaaaaaagtcccgcaggtgtccacccctaccttggtcgaggtatctcgcaatctcgggaaggtcggatctaagtgctgtaaacaccccgaggccaagcgcatgccgtgcgcagaagactatctgtctgtggttctgaaccagctgtgtgttctgcatgaaaaaactcccgtaagcgatagagtgacaaagtgctgtaccgaatctctagtaaaccgcagaccctgcttttcggccttggaagtggacgagacgtatgttccgaaagaattcaatgctgaaacattcactttccacgcagatatctgtacactttctgagaaggaacgccagattaagaaacaaacggccttagttgagcttgtcaaacacaagcccaaagcaaccaaagagcagcttaaggccgtgatggatgacttcgccgcctttgttgagaagtgctgtaaagcggacgacaaggaaacctgtttcgcggaagagggcaaaaagctcgtggcagcttcccaggcagcactgggcttg

SEQ ID NO: 249307 - DNA, 2007 bp, synthetic construct
  misc_feature 1..2007: note = Description of Artificial Sequence: Synthetic coding sequence
  source 1..2007: mol_type = other DNA
atgaagtgggtgtcgtttattagtctgctttttttatttagttcggcctacagtggttcattggataaaaggcacggcgagggcacatttaccagtgacgtgtcgtcctaccttgaaggccaagccgcaaaagagtttatcgcgtggttggtgaaaggccgacacggagaggggacatttacttccgacgtcagttcatacctggagggccaggcagccaaagaattcatcgcatggcttgtaaagggacgcgacgcccacaaatcagaagtggcccaccgatttaaggacctgggagaggaaaatttcaaggccctggtgctcatcgccttcgctcagtacctgcagcaatgtcctttcgaggaccatgtcaaacttgtgaatgaggtaacggaattcgccaagacttgcgtggccgacgagtcagctgagaactgcgacaagagtctacataccttgtttggggacaaactctgtaccgtcgcaacgctgcgggagacatacggagaaatggctgactgttgtgctaagcaggaacccgagcgaaacgagtgttttctgcagcataaggacgacaaccccaatctcccacgtctggtgaggccagaagttgatgtaatgtgcacggcatttcacgataatgaggaaacgttcctgaaaaagtacttgtatgaaatcgccaggcgccacccttacttctatgctccggagctgctgttttttgctaagaggtacaaggctgccttcaccgagtgttgccaggcagccgacaaggccgcctgcctgctacccaaactcgatgaactcagggatgagggcaaagcctcgtctgcaaaacaacgcctcaaatgcgcctctctgcagaagttcggcgagagagccttcaaggcctgggccgtggctaggttatcccagcgatttcctaaggccgagtttgctgaagtttccaagcttgtgactgacctgacaaaggtgcacaccgagtgctgtcatggcgaccttctggaatgtgcggatgacagggcagacctggcaaaatacatctgtgagaaccaggattctatctcatccaaactgaaagagtgctgcgagaaacccctattggagaagagccattgcatcgctgaggtagaaaatgatgagatgcccgccgatcttcccagcctggctgcggacttcgtcgagtcaaaagacgtctgtaaaaactacgctgaagctaaggacgtgttcctgggaatgtttctctatgaatacgccagacgtcacccagattactccgtcgtgctgctgcttagactggccaagacttacgagacaaccctggagaagtgttgcgccgctgctgatccgcacgagtgctacgcaaaggtcttcgacgagttcaagcccctggtcgaggaaccgcaaaaccttatcaagcagaactgtgagctctttgagcagttgggggagtataaattccagaacgctctgcttgtccgctacacgaagaaagtccctcaggtgtcaacgcccaccttagtagaggtcagtcggaacctgggaaaagtagggtccaagtgctgcaagcaccctgaagctaaacgcatgccatgtgcagaggactatttaagcgtcgtactgaatcagttatgtgtattgcatgagaaaacacctgtctccgacagagttactaaatgttgtacggaatcacttgtgaaccgcagaccatgtttcagcgccctcgaagtggatgagacatatgttccgaaggagtttaacgcagaaaccttcacgttccatgccgacatatgcacactcagcgaaaaggagcggcagatcaagaagcagacagccctagttgagcttgtgaagcacaagcctaaagccaccaaggagcaattgaaagccgtaatggacgactttgccgctttcgtcgaaaagtgctgtaaggcagacgacaaagaaacttgcttcgctgaagaagggaaaaagctggtggcggctagtcaggcagccctaggactc

SEQ ID NO: 249308 - DNA, 2007 bp, synthetic construct
  misc_feature 1..2007: note = Description of Artificial Sequence: Synthetic coding sequence
  source 1..2007: mol_type = other DNA
atgaaatgggtctcttttatctcactactgtttctgtttagctcggcatacagcggctcccttgacaagcgacacggggagggtacgtttacaagtgacgtgtccagttatctagaaggccaggctgcgaaagaatttatcgcatggttagtaaagggccgccatggggaaggcacatttactagcgatgtaagctcataccttgaaggacaggccgcgaaggaatttatcgcgtggctcgtgaaggggcgggacgctcataaatccgaggtcgcccacagattcaaggatctcggggaagaaaacttcaaagccttggttctgatcgccttcgcccaatatctgcagcagtgccctttcgaggaccatgttaaactggtcaacgaagtgacagagtttgctaaaacctgcgtggctgacgagagcgctgagaactgcgacaagtcgttacatactctgttcggggacaagctttgcaccgtggctaccctaagggagacatacggcgagatggcagattgctgcgccaaacaagaaccagagcggaacgaatgtttcctgcagcacaaagatgacaatccaaatttgcctcgactggtccggccagaggttgatgttatgtgtacagcctttcacgacaacgaagaaacattcctgaagaaatacctatacgagatcgcaaggaggcacccatacttttacgcgcccgaactcctgttctttgctaagaggtacaaggccgcattcacagaatgctgccaggcggctgataaggcagcttgtttgttacctaagctcgacgagctgagggatgaggggaaggctagttccgccaagcagcggttaaaatgtgcctcgctccagaaatttggtgagcgggctttcaaggcttgggccgtggctaggctctctcaacgcttccctaaggccgagtttgcagaggtgagtaagctggtgactgacctcacaaaagttcacacggaatgctgccacggtgatctcctggagtgcgctgatgaccgcgcagatttagctaagtacatctgcgagaatcaggacagcattagctcaaagctgaaggagtgttgcgagaagcctctgttggagaagtctcattgcatcgccgaggtggagaatgacgaaatgcctgctgacctcccgagcctggcagccgacttcgtggagtctaaggacgtttgcaagaactatgcagaggcgaaagacgtgtttctggggatgttcctgtacgaatacgccaggcggcacccggactattcggtcgttctattgttgcggcttgcaaaaacttacgagacaactttagagaagtgctgcgccgctgccgatcctcacgaatgctatgcgaaggtgttcgacgaattcaagcctctagtcgaagagccccagaacttaatcaagcagaattgcgagctgtttgagcaactcggcgagtataagttccagaatgccctactcgttaggtacacaaagaaggtcccccaagtgtcgacccccactctggttgaggtgagccgcaacctagggaaggttggaagcaaatgctgtaagcaccccgaagccaagcgcatgccttgcgcggaagattacctctcagttgtgctgaatcagctctgcgtgctccacgagaaaactcctgtttcagatagagtcaccaaatgttgcacagaatcccttgtcaatcgaaggccgtgtttcagtgctttggaggtggatgagacctatgtgccgaaagagtttaacgcagaaactttcacatttcacgccgacatttgcaccttatctgagaaggagcgtcaaatcaagaagcagactgcattggtggaactggtgaaacacaaacccaaggctacaaaagagcagctgaaggctgtcatggacgattttgctgcattcgtcgaaaaatgttgtaaggctgatgataaagagacctgcttcgctgaggaaggaaagaagctggtggctgccagtcaggccgcgctgggcttg

SEQ ID NO: 249309 - DNA, 2007 bp, synthetic construct
  misc_feature 1..2007: note = Description of Artificial Sequence: Synthetic coding sequence
  source 1..2007: mol_type = other DNA
atgaagtgggtttcctttatatcactactctttctcttcagtagtgcatactctggctccctcgacaaacgacacggcgagggtacttttacttcagacgtgtcttcctacctggagggacaggccgcgaaggaatttattgcatggctggtgaaaggccgacacggagaaggcaccttcacgtccgatgtcagcagctacctagagggccaggcggcgaaggagtttatcgcctggctggtcaaagggcgggatgcccacaaatcggaggtagcgcatcgatttaaggacctgggtgaggagaatttcaaggctctcgtactcattgcgttcgcacaataccttcagcagtgccccttcgaggatcacgtcaaattagtcaacgaggtgaccgagtttgccaaaacatgcgttgcggatgaatcagcagaaaactgtgataagtcactgcatacattgttcggagataaactgtgtacagtcgccacgctcagggaaacttacggagagatggcggactgttgcgccaagcaagagcccgagcggaatgaatgtttcctgcagcacaaggacgacaatccgaatttaccacgcttggtgagaccagaggttgacgtgatgtgtacggcttttcacgataatgaggagacgttcttaaagaaatacctgtatgaaatagcaaggaggcatccatacttctacgccccggagttgcttttcttcgcgaagcgatataaggccgcttttacggagtgttgccaggccgccgacaaggccgcctgtctcttgccaaaactggacgagttgcgcgacgagggaaaagcaagtagtgccaaacagcgcttgaagtgtgcatccctgcaaaagtttggagaaagggccttcaaagcctgggccgtcgctaggttaagccagcgcttccctaaagccgagtttgccgaggtgtctaaactggtgaccgatctaactaaggtgcacactgagtgctgccatggcgatctcttggaatgtgctgatgatagagcagatctcgctaaatatatctgtgagaatcaagattccatttcctctaaactcaaagaatgttgcgaaaaaccactattagagaagagccactgtatagctgaggtggagaatgacgagatgccagccgatctcccatctctggctgcagacttcgtagaatcaaaagatgtgtgtaagaattacgctgaggccaaagatgtattcctgggcatgtttctgtatgaatacgcccggaggcaccccgattacagtgtggtactgctactaaggttagccaagacatatgaaacgaccctggagaaatgctgtgctgcagcagacccacacgagtgctatgctaaggtatttgacgaattcaaacctctggtggaagaaccgcagaacctgatcaaacaaaactgcgaactatttgaacagcttggtgagtacaagtttcagaatgctctgctagtgcggtacacgaaaaaagtgcctcaggtgagtacacccaccctggtggaagtgtcccgcaacctcggtaaggtggggtctaagtgttgtaaacatcccgaggcaaaacgtatgccgtgcgcggaagattacctgtcagtagttctcaatcagctgtgcgtgctgcatgagaagacaccagtgagcgacagggtgacgaaatgctgcaccgaatccctcgtgaatagaagaccctgtttctccgccctcgaagtagacgagacatacgtgccaaaagagttcaatgccgagacttttacttttcatgccgatatttgtacattgagcgaaaaggagaggcaaataaagaaacaaactgccctggtggagctggtcaaacataaacctaaggccaccaaagagcagctgaaagccgtaatggatgactttgctgcttttgtggaaaaatgctgcaaggctgacgacaaggaaacctgttttgcagaggagggcaagaagcttgtcgctgcttcccaagctgccttgggtctg

SEQ ID NO: 249310 - DNA, 2007 bp, synthetic construct
  misc_feature 1..2007: note = Description of Artificial Sequence: Synthetic coding sequence
  source 1..2007: mol_type = other DNA
atgaagtgggtgtcattcatttccctcttgtttctcttttcaagcgcctattcgggatcacttgataagagacacggagagggaacgtttacgtcggatgtgtcctcatacctggaaggacaagctgccaaggaattcatcgcctggcttgttaagggacgacatggtgaagggacctttacttcggacgtgtcaagctacctggaaggccaggcagcgaaggagttcattgcctggcttgtgaagggcagggatgcacataagtcagaagtcgcccatcgctttaaagaccttggcgaagaaaacttcaaggccctggtcctgatcgcatttgcacagtacctccagcaatgtccatttgaagatcatgtgaaacttgtgaatgaggttaccgaatttgcgaaaacttgtgtcgcagacgagagcgcagagaactgtgataagtcacttcatactctgttcggagataaactttgtaccgtggcaaccctgcgcgaaacttacggtgaaatggctgattgttgcgcaaaacaagagccagagaggaacgaatgttttctgcagcataaggacgataatcctaacctgccacgtctcgtccgtccagaagtggatgtgatgtgtaccgcctttcacgacaatgaagaaacctttcttaagaagtacctgtatgaaatcgcccggcggcacccatacttctacgcaccggaactgctcttttttgccaaaagatacaaggccgcgttcactgagtgttgtcaagcggccgataaggcagcatgcctgctgcctaaactggacgaactgagagatgagggaaaagcctcatccgcaaaacaaagactgaagtgcgcatccctgcagaagttcggagaacgtgcatttaaggcatgggcagtggctcgcctttcccaacgcttccccaaggcagagtttgcagaagttagcaagctcgtgaccgatctcaccaaagtgcacactgagtgctgtcatggcgacctgctcgaatgtgcagacgaccgagcagatcttgcaaaatacatatgcgaaaaccaggactcgatttcctcgaagctcaaagagtgctgtgagaagccccttctggagaaatcgcattgtatcgcggaggtcgaaaatgacgaaatgcctgccgacctgccaagcctcgcggcagactttgtcgagtcgaaggatgtgtgtaagaattacgctgaagcaaaggacgtgttccttggcatgtttctttacgagtacgctaggaggcacccagattactcagtggtacttctgctccgcttggcaaaaacctacgagactaccctggagaagtgttgtgcggcagctgacccacacgaatgctacgccaaagtgtttgatgaattcaaaccactcgtcgaggagcctcaaaacctcattaagcaaaactgcgagctgtttgaacagctgggagaatacaagttccaaaacgccctgctggtgcgctacactaagaaagtgcctcaagtctccactcccactctcgtggaggtgtctcggaacctggggaaagtggggagcaagtgctgtaagcatccagaagcaaaaaggatgccctgtgccgaggattacctgtctgtcgtcctgaaccagctctgcgtgcttcatgaaaaaacgccagtctccgacagggtgaccaagtgttgtaccgaatcgctcgtgaatcgtaggccatgtttctcggccctggaagtggatgagacttacgtgcctaaggaattcaacgccgagacttttactttccacgccgatatatgtaccctctcagagaaggaaaggcagattaagaaacaaactgccctggtcgagctggtcaagcataagccaaaggcaaccaaagagcaacttaaggcagtgatggacgatttcgcggcatttgtggagaaatgttgcaaagccgatgacaaggaaacctgcttcgcagaagaggggaagaagctggtcgcagcctcgcaagcggcgctggggctt

SEQ ID NO: 249311 - DNA, 2007 bp, synthetic construct
  misc_feature 1..2007: note = Description of Artificial Sequence: Synthetic coding sequence
  source 1..2007: mol_type = other DNA
atgaagtgggtttcgttcatttcgcttttgtttctgtttagcagcgcatactcaggttcattggataagcggcacggcgaaggtacgttcacctcagatgtctcctcctaccttgagggacaggcagccaaagaattcatcgcatggcttgtcaaaggtcggcacggagaaggtactttcacgtcggatgtcagctcgtaccttgagggccaagcagcaaaggaattcatcgcctggctcgtgaagggcagagatgcacacaagtctgaagtcgcccatcgattcaaagacctgggagaggagaatttcaaggcactggtccttatagcatttgctcaataccttcagcagtgtccatttgaggaccatgtcaaattggtcaacgaggtgactgagttcgcgaaaacttgcgtggctgatgaaagcgcggaaaactgcgataaaagcctgcatactctgtttggggataagctgtgcaccgtggcaactctccgtgagacttacggggaaatggcagactgttgtgccaagcaggagcctgaaaggaatgagtgctttctccagcataaggatgacaaccctaacctgccgcggcttgtgaggccggaggtggatgtcatgtgcaccgcgttccatgataacgaagagacgttcctgaagaagtacctctacgagatcgcccgtcggcatccttacttttatgctccagaattgctgttttttgctaaaaggtataaagccgcgtttacggaatgttgtcaagccgcagataaagccgcttgcctccttccgaaactggatgaacttcgggatgagggaaaggcaagttcggccaagcaaagactgaaatgcgcatccctgcaaaagtttggagagagagcctttaaggcgtgggcagtggccagactgtcccaacgttttcctaaagcagaattcgcagaggtcagcaagctggtgaccgacctgactaaggtgcataccgagtgttgtcacggagatctgcttgagtgtgccgatgacagagccgatctggcaaagtacatttgtgaaaaccaagattctattagctcaaaacttaaggagtgttgtgaaaaacccctgctcgagaagtcacattgtatcgccgaagtggaaaacgatgagatgccagcagatctcccctcgcttgcagcagacttcgtggagtctaaagatgtttgcaaaaactacgcggaagcaaaggacgtctttctgggtatgttcttgtacgaatacgcgagacgccacccggactactccgtcgttctcctcttgagactggcaaagacctacgagactacccttgaaaaatgttgtgcagcggcggacccccacgaatgttacgcgaaggtgtttgacgaattcaagcctctggtggaggagcctcagaatctcattaagcaaaattgcgagctgtttgaacaactgggcgagtataagtttcaaaacgcgctgttggtgaggtacactaagaaggtgccgcaagtctccacccccacgctcgtggaagtgtccagaaacctcggcaaggtgggatcgaagtgctgcaagcatcccgaagcaaagcggatgccgtgtgcagaggactacctctctgtggtgcttaatcagctgtgcgtgctgcacgaaaagactcctgtgagcgacagggtcaccaagtgttgtaccgaaagcctcgtcaatagacgtccgtgcttttctgccctggaagtggatgaaacctacgtgcccaaggagtttaacgcagaaacttttacttttcatgcagatatttgtacgctgagcgaaaaggaacgccagattaagaagcaaactgctcttgtggagctggtaaagcataaacctaaggcaaccaaggaacagcttaaggcagtgatggatgatttcgcagcattcgtcgaaaagtgctgtaaagcggacgacaaggaaacctgttttgccgaggaagggaaaaaacttgtggcggcatcgcaggcagcccttggtctg

SEQ ID NO: 249312 - DNA, 2007 bp, synthetic construct
  misc_feature 1..2007: note = Description of Artificial Sequence: Synthetic coding sequence
  source 1..2007: mol_type = other DNA
atgaagtgggtaagtttcatctcactgctcttcttgttcagttccgcttattcaggatctctggataagcgccacggtgagggcaccttcactagcgacgtcagcagctatctggagggtcaagctgctaaagagtttattgcctggctggtgaaaggcaggcatggagaaggaactttcacatctgatgtgtcatcatatcttgaaggtcaggcagccaaggaatttattgcatggctggtgaagggacgcgacgcgcataaatccgaagtcgctcaccgcttcaaggatcttggagaggagaacttcaaggccctggtccttatcgccttcgcgcagtacctccaacaatgcccctttgaggaccacgtcaaactcgtcaacgaggtaactgaatttgccaagacttgtgttgccgatgaatctgccgagaactgcgataaatctctgcacaccctgtttggagataaactctgtacagtagcaactcttcgcgagacatacggcgagatggctgactgttgtgccaagcaggaacccgaaaggaatgagtgcttccttcagcataaggatgataacccaaacctgcctagattggtccgccctgaggtggacgtaatgtgtaccgctttccacgataatgaagaaacattcctgaaaaagtatctgtacgagatcgctagaaggcacccatacttctatgctccagaactgctgttttttgcaaagagatataaagctgccttcacagagtgctgccaagccgctgacaaggctgcctgcttgctgcctaaactcgacgagctgagagatgaaggaaaagcttctagcgctaagcaacgccttaagtgcgcttcacttcagaaattcggcgagagagccttcaaggcgtgggctgtggcaaggctttcacagcgcttccccaaggcggagttcgctgaggtaagtaagctggtgacggatcttactaaggtacatacagagtgttgccacggagatctgctggaatgtgctgacgatagggctgacctggccaagtacatctgtgagaaccaggactccatctcctccaagttgaaggaatgctgtgaaaagcctctgctcgagaagagccattgtatcgctgaagtggagaacgatgaaatgccggctgacctcccttcactcgctgccgactttgttgagagtaaagacgtgtgtaagaattacgcggaagccaaagatgtgtttctgggaatgttcctttatgaatacgccagaaggcacccggattatagtgtggtgcttttgcttagactggctaagacctacgagactaccttggagaagtgctgcgctgctgccgacccacatgagtgctacgcgaaagttttcgacgaattcaaaccccttgtcgaagagcctcaaaatctcatcaagcagaactgcgaattgtttgagcaacttggagaatataagttccaaaacgcactgctcgttaggtatacaaagaaggttcctcaggtgtcaacacccactttggtcgaggtaagcaggaatctgggtaaagttggttctaagtgctgtaaacacccagaggcgaaacgcatgccctgcgctgaagattacctctcagtagtgctcaatcagctctgtgtgctccacgagaagacccccgtgtccgacagggtcacaaagtgttgcaccgagagtctggtgaatcgccgcccttgcttcagcgctttggaggtggatgaaacctacgtccccaaagagttcaatgccgaaacctttacatttcacgcagatatatgtaccttgagtgaaaaagagaggcaaatcaagaagcagactgctttggtggagctggtgaaacataaacctaaggccaccaaggaacaactgaaggcagttatggacgactttgcagccttcgtcgagaaatgctgtaaagctgatgataaggagacttgttttgccgaagagggaaagaagctggttgccgcttcccaggctgccttgggtctg

SEQ ID NO: 249313 - DNA, 2007 bp, synthetic construct
  misc_feature 1..2007: note = Description of Artificial Sequence: Synthetic coding sequence
  source 1..2007: mol_type = other DNA
atgaagtgggtgtcattcatctcactgctcttcctcttttcgagcgcctactcaggatctctcgacaaacggcacggagagggcactttcacgtcggatgtgtccagctacttggagggccaagccgccaaggaattcatcgcttggctggtgaagggtagacacggcgagggtactttcacctccgacgtgtcgtcatacctcgagggacaagcggctaaggagttcatcgcctggttggtcaagggacgggatgcccacaaatccgaagtggcacatcgcttcaaggaccttggagaggaaaacttcaaggctctggtcctcatcgcgttcgcccagtacttgcagcaatgcccattcgaggaccatgtgaagctggtcaacgaggtgaccgagtttgccaaaacttgcgtggccgacgagtcagccgaaaattgcgataaatctttgcatacgctctttggagataagctctgcactgtggcaactttgagagaaacctacggtgaaatggccgattgttgtgccaaacaggagccagagcggaacgagtgtttcctccagcacaaggatgataacccgaacctgccgcgcttggtcagaccggaggtcgatgtcatgtgcaccgctttccacgataacgaggaaactttcctcaagaaatacctgtacgagatcgcccgccggcacccttacttctacgctccagagctgctgttctttgcaaagcgctacaaggcagctttcactgaatgctgccaagcagctgacaaggcagcctgcttgctgccgaagctggatgagcttcgcgacgagggcaaagcatcctcagccaagcagcggctgaaatgcgcctcactgcagaagttcggtgaacgggcatttaaggcttgggccgttgcgaggctcagccagcgctttccgaaagcggaattcgccgaagtctcgaagctcgtcaccgacctgactaaagtgcacaccgaatgctgtcacggcgatctgctcgaatgcgccgacgacagagctgacctggcgaaatacatctgcgagaaccaagattcgatttcgagcaaactgaaagaatgttgcgagaagccactgctcgagaagtcgcactgtatcgctgaggtggagaatgacgaaatgcctgccgatttgccatccctggcagccgactttgtggaatctaaggacgtgtgcaaaaactacgcggaggccaaggacgtgtttctcggaatgttcctgtacgaatatgcacgccgacacccggattactcggtggtcctgcttcttcgcctggctaagacgtatgaaacgactctggaaaagtgctgcgcggctgcggacccgcatgaatgctacgcgaaggtgttcgatgaattcaaaccgctcgtggaagagccgcaaaatctgataaagcagaactgtgagctgttcgagcagctgggcgaatacaagtttcagaatgcgctgcttgtcagatacactaagaaagtgccgcaggtgtctaccccgactctggttgaagtgagccgtaatctgggaaaggtgggatccaagtgctgtaaacatccggaggcgaagcgcatgccttgtgcggaagattacctctcggtggtgctgaaccagttgtgcgtgctgcatgaaaagacccctgtgtcggaccgcgtcaccaagtgctgcaccgaatcgctcgtgaatcggcgcccctgcttctcagcactggaagtcgatgaaacctacgtcccgaaggaattcaacgccgagactttcaccttccacgcagacatttgtaccttgtcggagaaggaacggcagatcaagaagcaaactgcactggtcgagcttgtgaagcacaagccaaaagccactaaagaacagctcaaggcggtgatggacgactttgcagccttcgtggagaaatgctgcaaagccgacgacaaagaaacttgtttcgcagaggaagggaaaaagttggtggcggcgtcccaagccgccttgggactg

SEQ ID NO: 249314 - DNA, 2007 bp, synthetic construct
  misc_feature 1..2007: note = Description of Artificial Sequence: Synthetic coding sequence
  source 1..2007: mol_type = other DNA
atgaaatgggtttcgtttataagcttattatttttattcagtagcgcctattccggttctttagataagcgccacggcgaaggtacttttacctcagacgtttcctcatatctcgaaggacaggctgcaaaggagtttattgcatggctggtgaaggggcgacacggagaaggaacatttacatctgatgtttcttcttatctggagggacaagctgcaaaagagttcattgcctggcttgtcaaaggacgtgacgcacataaatcagaagttgcgcatagattcaaggatttgggcgaagagaactttaaggctttagttctgattgcttttgcgcaatatttgcaacagtgcccgtttgaagatcatgtcaaattggttaatgaggttacagaatttgcgaaaacctgcgttgccgatgaaagtgccgaaaactgcgacaaatctctgcatacgttattcggagacaaactgtgcactgttgctaccttaagagaaacatatggggaaatggcggattgttgtgcaaagcaggaacctgaaaggaacgagtgtttccttcaacataaggacgataatccaaatttaccgcgcctagtacgacctgaagtagatgttatgtgtacagcattccacgataatgaagaaacatttctgaaaaaatatctgtacgaaatcgcacggcgccacccatatttttatgctcctgaactcctttttttcgccaaacggtacaaagcagcatttaccgaatgctgtcaagcagcagataaagctgcgtgcctactgccgaaactggatgagttaagagatgaaggtaaggcatcctccgcaaaacaacgtttaaaatgtgcgtctttgcagaaatttggcgaacgtgcatttaaagcttgggctgttgcccgtttgtcccaacgatttccgaaagccgagtttgctgaagtctcgaaattggttactgacttaactaaagttcatacagaatgctgccatggggatctgctggagtgtgcagatgatagagcggacctggctaaatatatttgtgagaatcaggactctatctcaagcaaattgaaagaatgttgcgaaaaacccctgctggaaaaatcccattgcatagcagaagtagaaaacgatgaaatgccagcggacttaccgagtctagcggcggattttgtggaaagtaaggatgtctgcaagaattatgcggaggccaaagatgtctttttaggaatgtttttgtatgagtatgcgagaagacatccggattactctgtggtattacttctccgcctcgcgaaaacatatgaaactacactcgagaaatgctgcgcagcggcagacccgcatgaatgttacgcgaaggtctttgatgaattcaaaccccttgttgaagaaccgcaaaatcttatcaaacaaaactgcgagttgtttgaacaattgggggagtataagtttcaaaatgcactccttgttcggtatactaaaaaagtgcctcaagtatcgacgccgacacttgtcgaggttagtcgtaatctcgggaaagttgggagtaaatgctgtaaacatcctgaagcaaaacgaatgccgtgtgcggaagactatctgagtgtcgtgcttaatcagctctgcgtacttcacgagaagacgcctgtctctgatcgcgttactaagtgttgcaccgaatcccttgtcaatcggagaccgtgcttcagcgcacttgaagtagatgaaacatacgtgccgaaggagttcaatgcggagacatttacattccatgccgatatctgcacattgtcagaaaaagaaagacaaatcaagaaacaaacagccttagtagaactggtaaaacataaacccaaagctacaaaggaacagctgaaggccgttatggatgatttcgctgcattcgtcgaaaaatgctgcaaagcagacgataaagaaacgtgttttgccgaagagggaaaaaaattggtagcagcgagccaagccgcacttggactt

SEQ ID NO: 249315 - DNA, 2007 bp, synthetic construct
  misc_feature 1..2007: note = Description of Artificial Sequence: Synthetic coding sequence
  source 1..2007: mol_type = other DNA
atgaagtgggtgtcctttatctccttgctgtttctgttctcatccgcctactcaggatcgcttgataagagacatggtgagggaacttttactagtgacgtttcatcctacctcgaaggccaggcagcaaaggagttcatagcgtggcttgtcaaggggaggcatggtgaaggtacttttactagcgacgtgtcgagctacttggagggccaagcagcaaaagaattcatcgcctggctggtgaaaggtcgagatgcacacaaaagcgaagtcgcacaccgtttcaaagatcttggagaggaaaacttcaaggcgcttgtgcttattgcttttgcacagtaccttcaacaatgccctttcgaggatcatgtgaagttggtgaatgaggtgaccgagtttgcaaaaacttgtgtcgctgacgagtcggcagaaaactgcgacaagtcacttcacacgctgtttggcgacaaactgtgtactgtggcgaccctcagggaaacttacggcgaaatggcagattgttgtgcaaagcaggagcctgaacgaaatgaatgctttttgcaacataaggacgacaacccgaacctgccaagacttgtacgtccagaagtcgacgtcatgtgtaccgcgttccatgataacgaagaaacttttcttaagaagtacttgtacgaaatagcgcggcgccatccctatttctacgcacctgaacttctgtttttcgcgaagaggtacaaagcagcgttcactgaatgttgccaagctgcagataaggccgcttgtctgctgcccaagctggacgaactgcgggacgaaggtaaggcaagctccgcaaaacaaagacttaagtgtgcctcgctccagaagtttggggagagagcatttaaggcctgggccgtcgcacgtctctcacagcgatttcctaaagccgaattcgccgaagtgtcaaaacttgttactgatcttactaaagtacacaccgaatgctgccatggcgatctcctggagtgtgcagatgatcgcgccgatctggcaaagtacatttgtgaaaatcaagactccatctcctcgaagttgaaagaatgctgcgagaaaccgctgctcgaaaagtcacattgtatagccgaagtcgaaaacgatgaaatgcctgcggatctcccttcacttgccgcagactttgtggaaagcaaggatgtctgtaagaactacgcagaagcaaaggacgtctttctgggaatgttcttgtatgaatatgccagacgacatcccgattacagtgtggtgcttctgctgcgcctggcaaagacttatgaaactacccttgaaaagtgttgtgctgccgcagacccccacgagtgttacgccaaggtctttgatgagtttaagcctctggtcgaggaaccacagaacctgattaagcagaactgcgaacttttcgaacaactgggagagtacaagtttcagaatgcactgttggtgagatacaccaaaaaggtgccgcaagtgagcactcctacccttgtggaggtcagccgcaatctgggtaaggtgggaagcaaatgttgtaaacatccagaagcaaagaggatgccttgcgccgaagattatctttcggtggtgttgaaccaactttgtgtgctccacgagaaaactcctgtgagcgatcgggttaccaaatgctgtaccgaatcgcttgtcaatcggcgaccatgcttttcggcgctggaagtggatgagacttacgtcccaaaagagtttaacgcagaaacctttactttccacgcagatatttgcacgctttccgagaaggaacgccagataaagaagcagactgcactggtggagctggtgaagcataagccaaaagccaccaaggaacaactgaaggcagtcatggacgactttgcagcctttgtcgagaaatgttgcaaggccgatgacaaagaaacctgtttcgccgaagagggaaaaaagctcgtggcagcttcacaggcagcgctgggcctg

SEQ ID NO: 249316 - DNA, 2007 bp, synthetic construct
  misc_feature 1..2007: note = Description of Artificial Sequence: Synthetic coding sequence
  source 1..2007: mol_type = other DNA
atgaagtgggtgtcttttatatcccttctgtttctattttccagtgcctattccggctccctcgataaacggcacggggaaggaactttcactagcgatgtgtcttcttatctggaaggccaggcggctaaggaatttatagcttggctggtcaagggaaggcacggcgagggaactttcaccagcgacgtgagttcttatcttgaaggccaggcagctaaggaatttatcgcctggcttgttaagggccgggacgctcacaaatccgaggtggctcatcgctttaaggacttgggagaggagaactttaaagccctagtgctaattgctttcgctcagtatctccaacagtgtccctttgaggatcacgttaagctggtcaatgaagtgacagaatttgcaaagacgtgtgtcgcggatgaaagtgccgagaactgtgataagagtctgcataccctattcggagacaaactgtgcactgtcgccaccctacgtgaaacctatggcgaaatggcggactgctgtgctaagcaggaaccagaaagaaacgagtgttttctgcagcacaaggatgacaatcctaatctgccaaggttggtgcggcccgaagttgatgtgatgtgcactgcctttcacgataacgaggagaccttcttaaaaaagtatttatacgagatcgcccgccgtcacccatatttttacgcccctgaactgctgttcttcgcgaagcggtataaggccgcattcacagagtgctgccaggccgccgacaaagctgcctgccttcttccgaaacttgacgagcttcgggatgagggcaaggcatcatctgcaaaacagaggctcaaatgcgcaagtctgcagaaatttggcgaaagggcattcaaggcatgggccgtggcccgactctcccagagattccctaaagcggaatttgccgaggtgtctaaactcgtcacggacctgacaaaagtgcataccgaatgttgtcatggcgatctgctcgaatgtgcagacgaccgcgctgacctggccaaatacatctgcgaaaaccaagactctatctcaagcaagctgaaagaatgttgcgagaaacccctgcttgagaaatcacattgtatagccgaggtggagaatgatgaaatgccagcagacctcccgtcactggctgcagacttcgtggaatccaaagatgtgtgcaaaaactatgctgaggctaaggatgtgttccttggtatgttcctctatgagtacgcgcgcagacatcccgactactctgttgttctattgctgcggctcgccaagacatacgaaacaactttagaaaagtgctgtgccgcggcggaccctcacgagtgctatgccaaggtcttcgatgagttcaaacccctggttgaagaaccgcagaatctgatcaagcagaattgtgaactgttcgagcagctcggggagtacaaattccaaaacgccctgctggtgcggtacacaaagaaagttccacaggtctctacccccactctcgtcgaagtatcaaggaacttgggtaaggtggggtcaaagtgttgtaaacatccagaagctaagcgaatgccttgtgcggaggattacctaagtgtcgtactgaatcagttatgtgtccttcatgagaagactcccgtatcagatcgggtaacaaaatgctgtaccgagtctttggtcaaccggcgaccatgcttcagcgccctagaagtggacgagacatacgtcccaaaagaatttaacgccgagaccttcaccttccatgctgacatatgtaccctctctgagaaggagcggcagatcaagaagcagacagccctggtggaactggtgaagcacaagccaaaagccacaaaggaacagttaaaggccgtgatggatgactttgcagccttcgtggagaaatgctgcaaggccgatgacaaagaaacatgttttgccgaggagggaaagaaattggtggctgcgagccaggcagccctaggactc

SEQ ID NO: 249317 - DNA, 2007 bp, synthetic construct
  misc_feature 1..2007: note = Description of Artificial Sequence: Synthetic coding sequence
  source 1..2007: mol_type = other DNA
atgaaatgggtgtctttcatctcactgctatttctgtttagtagcgcctacagtgggtcactagacaagagacacggagagggcactttcaccagcgacgtatcaagttatctcgaagggcaggcagcgaaggagttcatagcctggcttgtgaagggcagacatggagagggcacgtttacatctgatgtatccagctatcttgagggccaggctgcaaaagagtttattgcttggctggtgaagggccgggacgcccacaagagtgaggttgcacatagattcaaagacctgggggaagagaacttcaaagccttagtcctcattgccttcgcacagtatctgcagcagtgcccctttgaggaccacgtgaagttagtgaacgaggtcaccgagtttgccaaaacttgtgtagccgatgagagtgcagagaactgcgataaaagcctgcacaccctgttcggagacaagttgtgcacggtggcaactttgcgggagacttatggcgaaatggccgactgctgcgccaagcaggaacccgaaaggaacgagtgctttctccagcataaagacgataatcccaacctgccacgtctggtcaggcccgaggtagatgtgatgtgcaccgcgttccacgacaacgaggagacgtttctcaaaaaatatttgtacgagatcgcaagacgacacccgtatttttacgctccagagcttctcttcttcgccaaaaggtataaagcagccttcacggagtgctgtcaggctgcagacaaggctgcatgtcttctgcccaagttggatgagctgagagatgaggggaaggcatcgtcagccaagcagagactgaaatgtgcaagtctacaaaaatttggagaaagagcattcaaggcatgggcagttgctcgactgtcacagcgatttccaaaggctgaatttgccgaggtcagtaagctggtgaccgatctgactaaagttcataccgagtgttgtcatggggatctgctggaatgcgccgatgatcgagccgacctagcaaaatatatctgtgagaatcaagactccatctcttctaaattgaaggaatgctgcgaaaaacccttactggaaaagtctcactgcatagccgaggtagagaatgacgaaatgccagccgacctcccttcccttgctgccgacttcgtggagtctaaggatgtgtgcaagaattacgccgaagccaaagacgttttcctaggaatgtttttatacgaatacgctcggcgacaccccgactatagcgtcgtcctgctgctgcggctggcaaaaacttacgaaaccacactcgaaaagtgttgtgccgcagccgatccccacgaatgctatgctaaggtcttcgatgagtttaagcccctcgttgaagaacctcagaatctgatcaaacagaactgcgaactgttcgagcagttaggcgagtacaagtttcagaatgcactcctggtgcgatacaccaagaaggtaccccaggtgagcactccaactctcgtcgaagtcagccggaacctaggcaaagtcggcagcaagtgctgtaaacaccctgaagcaaaaagaatgccgtgcgccgaagactacttgagtgtagtcctaaaccagttatgtgtcctgcacgagaagacgccagttagtgaccgcgtgaccaaatgttgcactgagtcactggtcaaccgaaggccctgcttttccgcacttgaggtggatgaaacttacgtacccaaggaattcaatgctgaaacgtttacttttcacgccgatatctgtacactctcagaaaaagaacgacagattaagaagcagactgcgttggtcgaactggtcaaacacaagcccaaagctaccaaggagcagttgaaggccgttatggatgactttgcagcattcgtggagaagtgttgcaaagcagacgataaggaaacttgtttcgcagaggagggaaagaagctggtcgctgcctctcaagctgcactgggtctc

SEQ ID NO: 249318 - DNA, 2007 bp, synthetic construct
  misc_feature 1..2007: note = Description of Artificial Sequence: Synthetic coding sequence
  source 1..2007: mol_type = other DNA
atgaaatgggtttcttttatttcattattattcttattttcatcagcttattcaggatctttagacaagagacatggagaaggtacatttacatcagatgttagtagttatcttgaaggacaagctgcaaaagaattcattgcttggttagtcaaaggaagacatggagaaggtacatttacaagtgatgtttcatcttatttggaaggacaagctgctaaagaatttattgcttggcttgtaaaaggtagagatgcacataagtcagaagttgcacacagatttaaggatttaggagaggaaaatttcaaagcattagtacttatagcttttgcacaatatcttcaacaatgtccatttgaagatcatgttaaattagtaaatgaagttacagaatttgcaaaaacatgtgttgcagatgaaagtgcagaaaattgtgataaaagtttacatacacttttcggagataagttatgtacagttgctaccttaagagaaacttatggagaaatggcagattgttgtgctaaacaagaacctgaaagaaatgaatgttttttacaacataaagatgataatccaaatttaccacgtttagtaagaccagaagttgatgttatgtgtactgcttttcatgataatgaagaaacttttcttaaaaagtatttatatgaaattgctagaagacatccatatttctatgcaccagaattattattttttgctaaacgatataaagctgctttcactgaatgctgtcaagcagctgataaagcagcttgtcttttgccaaaacttgatgaacttagagatgaaggtaaagcatcttctgctaaacaaagacttaaatgtgcatcattacaaaaatttggagaaagagcatttaaagcatgggctgttgcaagactttcacaaagatttccaaaggcagaattcgcagaagtttcaaagttagttactgatttaaccaaggttcatactgaatgttgccatggagatttattagagtgtgccgatgacagagctgatcttgcaaagtatatttgtgaaaatcaagattcaatctcttctaaattgaaggaatgttgtgaaaaaccacttttagaaaaatcacattgtatagctgaagtagaaaatgatgaaatgcctgcagatttaccatcactcgctgcagacttcgtagaatctaaagatgtttgtaagaattatgcagaagcaaaagatgtatttcttggaatgttcctttatgaatatgcaagaagacatcctgactacagtgttgttttattattacgacttgcaaagacatatgagacaactcttgaaaaatgttgtgcagctgcagatccacatgaatgttatgccaaggtttttgatgaatttaagccacttgttgaagaaccacaaaatttaattaaacaaaattgtgaattattcgaacaattaggagaatataaatttcaaaatgctcttttagtaagatatactaaaaaagtaccacaagtttcaacaccaacattggttgaagtttctagaaatcttggaaaagtaggatcaaaatgttgtaaacatccagaggctaagcgaatgccatgtgcagaagattatttatctgttgttttaaatcagttgtgtgttcttcatgagaaaacacctgtttctgatagagttacaaagtgttgtacagaatcattagttaatagacgaccatgcttctcagcactagaagttgacgaaacttatgttccaaaagaatttaatgcagagacatttacatttcatgctgacatttgtacactttccgaaaaagaacgacaaattaaaaagcaaacagctttagtagaacttgttaaacataaacctaaagctactaaggaacaattgaaagctgttatggatgattttgctgctttcgttgagaaatgttgtaaagctgacgataaagaaacatgttttgcagaagaaggaaaaaagttagtagcagcatcacaagcagcattaggttta

SEQ ID NO: 249319 - DNA, 2007 bp, synthetic construct
  misc_feature 1..2007: note = Description of Artificial Sequence: Synthetic coding sequence
  source 1..2007: mol_type = other DNA
atgaagtgggtgtccttcatctccctcctgttcctcttctcgtcagcgtactccggatcgctggacaaacgccatggagaaggaaccttcacctccgacgtgtcctcgtacctggaagggcaggccgccaaagaattcatcgcatggctcgtgaaggggcgccatggagagggtacttttactagcgacgtcagctcttacctcgaggggcaggcggcgaaggagttcatcgcctggctggtgaaggggcgggatgcacacaagagcgaagtggcccaccgctttaaggatctgggtgaggaaaacttcaaagccctcgtccttatcgcctttgcacagtacctgcaacagtgtccgttcgaggaccacgtgaagctggtgaacgaagtgacggagtttgcaaagacttgcgtggccgacgagtctgcagaaaattgcgacaagtcactgcacactctgttcggagacaagctctgcaccgtggcgaccctccgggaaacctacggagagatggctgactgttgtgccaagcaggagccagaacgcaatgagtgcttcctgcagcacaaggatgataatcctaacctgccgcggctggtgcggccggaagtcgacgtgatgtgcactgcatttcacgacaatgaggaaactttcctcaagaaatacttgtacgaaatcgcccgccggcatccttatttctacgcgccggagctgctgttcttcgccaagcggtacaaggccgctttcaccgaatgctgtcaagccgccgacaaggcagcgtgcctgttgcccaagctcgacgaactgcgggacgaggggaaggcttcgtctgcgaagcaaaggttgaagtgcgcctccctccaaaagttcggagagcgcgcgttcaaggcgtgggccgtggccaggctcagccagcggtttcctaaggctgagtttgccgaggtttcgaaacttgtcaccgacttgacgaaggtccacaccgagtgttgccacggggatctgctggaatgcgcagacgaccgcgccgatcttgctaagtacatttgcgagaaccaggattcaatctcgagcaagttgaaagagtgctgcgaaaagccactgctggaaaagagccactgcatcgcggaggtggagaatgacgaaatgccggcagacctcccaagcctcgctgcagacttcgtggaatccaaagacgtctgcaagaactacgcagaagccaaggacgtgtttctgggaatgtttttgtacgagtacgcccgccgacacccggactacagcgtggtcctcctgctccggttggccaagacttacgagactactctggaaaaatgttgtgcggccgcggacccgcacgaatgctacgcgaaggtctttgacgagttcaaaccccttgtggaggagccgcagaacttgatcaaacaaaattgtgaattgtttgagcaactgggagaatacaagtttcagaacgccctgttggtgagatacaccaaaaaggtgccacaggtgtcgactccgactctggtcgaggtgtcgcggaacctggggaaggtgggctccaagtgttgtaagcaccctgaagccaaacggatgccgtgcgccgaggactacctgtccgtggtgctcaaccagctctgcgttttgcacgagaaaacccctgtgagcgatcgggtgaccaaatgctgcactgagagcctggttaacagaaggccgtgtttctcggcacttgaagtggacgaaacttatgtgcccaaggaattcaacgcagaaactttcacgtttcacgcggacatctgtaccctctcagagaaggagagacaaatcaaaaaacagactgctctggtggagctggtgaagcataagccaaaggccaccaaggagcaactcaaggctgtgatggacgacttcgccgccttcgtggagaagtgctgcaaggccgatgataaagaaacttgcttcgctgaggaaggcaaaaaactggtcgcggcttcgcaggcggcgctggggctg

SEQ ID NO: 249320 - DNA, 2007 bp, synthetic construct
  misc_feature 1..2007: note = Description of Artificial Sequence: Synthetic coding sequence
  source 1..2007: mol_type = other DNA
atgaaatgggtaagctttatctcattgttgttcttgttctcgtcggcatattcgggtagcttggataaaagacatggtgaaggaacatttacgtctgatgtatcctcctatctcgaaggacaagcggcaaaggagttcatagcgtggctcgttaaaggaagacacggagaagggacctttacgtcagacgtttcttcatatctcgaaggacaagcagctaaggagttcattgcatggttggttaaaggacgtgatgcccataagtccgaagttgcccatcgatttaaggatctgggagaagaaaacttcaaggcattggttcttatcgctttcgctcaatatctccaacaatgtccgtttgaagatcatgtgaagcttgttaatgaagttaccgaatttgcaaagacttgtgttgccgatgagtctgctgagaactgtgataaatctctgcatactctttttggagataaactttgcacagtcgctaccctgcgcgaaacttatggagagatggcggactgttgtgcaaaacaagaaccagagaggaatgagtgcttcctccaacataaagatgataatccaaatcttccgagactggttaggccggaggtcgacgtaatgtgtacggcattccacgataatgaagaaacttttttaaaaaagtatctatatgagatcgcacggcgacatccatacttctacgctccagaactgctgttctttgccaagcgctacaaagcggcttttaccgagtgttgccaagctgctgataaagcagcttgtttgctcccaaagctggatgaattgagagatgaagggaaagcaagttctgccaagcaaagacttaagtgcgcaagtttgcaaaaattcggcgaaagagccttcaaggcatgggctgtagcccgtctttcacaacgattccctaaagctgagtttgcagaggtttcgaagctggttacagacctaacgaaagttcatacggaatgttgccacggtgatcttctggagtgtgctgatgatagagcggacctagcgaaatatatttgtgaaaaccaagactctatctcaagtaagctcaaggaatgctgtgagaagccattgttggagaaatctcattgcatcgccgaagtagagaacgacgagatgcctgccgatctaccatcattggcggcagatttcgttgagagcaaagatgtatgtaaaaattatgccgaagctaaagatgtgtttctcggaatgttcctgtacgaatatgctcgccgtcatccagattacagtgtcgttcttctattacgacttgctaaaacatatgagaccacactagaaaaatgttgcgccgctgcagatcctcacgaatgctatgctaaagtctttgatgaattcaaacctttggttgaagaaccccagaatttgatcaagcaaaactgcgaactttttgagcagttgggtgaatataaatttcagaacgctctgttggttcgctatacaaaaaaagtaccgcaggtttctactcccacactcgtcgaagtttcacggaatctcggaaaggttggaagtaaatgttgcaagcacccagaagcaaaaagaatgccatgcgccgaagactatttgtctgtggtattaaatcaattgtgtgtgcttcacgaaaaaacaccagtttctgaccgggtaacaaaatgctgcacagagtctcttgtgaatagacgcccttgcttctcagcgttggaggttgatgaaacctacgtgcctaaagagttcaatgcagaaacattcacttttcacgccgacatctgcacactttctgaaaaagagagacagattaaaaaacaaaccgctcttgtagagttggtaaaacataaaccaaaagccacaaaggagcaactgaaagctgtcatggatgatttcgctgccttcgtagagaagtgctgcaaggcagacgataaagaaacttgtttcgccgaagagggtaagaaactagttgccgcatcacaggcagcgcttggactt

SEQ ID NO: 249321 - DNA, 2007 bp, synthetic construct; identical to SEQ ID NO: 249307
  misc_feature 1..2007: note = Description of Artificial Sequence: Synthetic coding sequence
  source 1..2007: mol_type = other DNA

SEQ ID NO: 249322 - DNA, 2007 bp, synthetic construct
  misc_feature 1..2007: note = Description of Artificial Sequence: Synthetic coding sequence
  source 1..2007: mol_type = other DNA
atgaaatgggtgtcgtttatctcgctgttgttccttttctcatcggcgtactccggatcgctcgataagagacacggtgaaggaactttcacttcagacgtgtcctcctaccttgaaggacaggcagcaaaagaattcattgcatggcttgtgaagggaaggcatggggaaggcacctttacctcagatgtttcttcctacctggaaggccaggccgcgaaggaattcatcgcatggctcgtgaaagggcgcgatgcacacaaatccgaggttgctcatcgtttcaaagatctgggcgaggaaaactttaaagcactggtgcttattgcgtttgctcagtaccttcaacaatgcccattcgaggatcatgtgaagttggtcaacgaagtcaccgaattcgccaagacgtgcgtggcagatgaaagcgcggagaactgtgacaagagccttcatactctgtttggtgataagctctgtaccgtggcaaccctgcgcgaaacttacggagagatggcagattgctgtgcaaagcaagagccggaaaggaacgaatgttttctccaacataaggacgacaaccctaatcttcctcgtctggtgcgtcctgaagtcgatgtgatgtgtactgcctttcacgataacgaagagacttttctgaagaaatacctctacgaaatagcgcgcaggcacccatacttttacgcacctgaacttctcttttttgcaaagcgatacaaagcagctttcaccgaatgttgccaggccgcagacaaggcagcctgtctcttgcctaagctcgacgaacttagagatgagggtaaggcatcatcggcaaagcagcggttgaagtgcgcgagcctgcaaaagttcggagaaagagcatttaaggcgtgggcagtcgccagattgagccagaggtttccaaaggccgaatttgcagaagtctcgaagttggtgacggacctgaccaaggttcatactgagtgttgtcacggcgatctgctggaatgcgcagatgaccgggcagatctggcaaagtatatctgcgagaaccaagattcaatatcatcgaaattgaaagaatgctgtgagaaaccactgctggagaagagccactgcatagccgaggtggaaaacgacgaaatgcctgcagatttgccatcgctggcagccgatttcgtggagagcaaggatgtgtgcaagaattacgctgaggccaaagacgtgtttctggggatgtttctttacgagtacgcacgacgtcacccagattattccgtcgtgttgcttcttaggctcgccaagacctatgaaactacccttgaaaagtgctgtgcagcagcagacccacatgaatgctacgcaaaagtgtttgatgaattcaaaccactcgtggaagagccacagaatctgataaagcaaaactgtgaactgtttgagcaactcggcgaatacaaattccagaatgccctccttgtgcgctacaccaagaaggtgccccaagtctcgactccaacccttgtggaagtgtcgagaaacttgggtaaggtgggttcaaagtgctgcaaacatcctgaagcgaagcgtatgccctgtgccgaggactacctttccgtggtgctcaaccaactgtgtgtgctccatgaaaagacccctgtgtcagacagagtgaccaagtgctgcactgagtcccttgtcaaccgacggccctgtttttcggccctcgaggtggatgagacttacgtgcctaaagagtttaacgccgaaacgttcacttttcatgccgacatctgtacccttagcgagaaagaacggcaaatcaagaagcaaaccgccctggtcgagctcgtgaaacacaagcctaaggcaactaaggagcagctgaaagcagtgatggatgattttgcagcgtttgtggagaaatgttgtaaggcagatgataaggaaacgtgctttgcggaagagggcaaaaaacttgtcgcggcgtcccaagctgctctgggtctt

SEQ ID NO: 249323 - DNA, 2007 bp, synthetic construct
  misc_feature 1..2007: note = Description of Artificial Sequence: Synthetic coding sequence
  source 1..2007: mol_type = other DNA
atgaaatgggtgagcttcatcagtctgctctttctgttctcgagcgcctactcaggatcgctggacaagcggcacggcgaaggtactttcacttccgacgtgtcgtcgtatctcgagggacaagcggccaaggagttcatcgcttggctcgtgaaaggacggcatggagaaggcacttttacgtcggatgtgtcctcatacttggagggccaggctgccaaggaattcatcgcgtggctggtcaaggggagagatgcccataagagcgaggtcgcccaccggttcaaggatctgggggaggaaaacttcaaagccctggtgctgatcgcattcgcacagtacctccagcaatgccccttcgaagatcatgtgaagctggtgaacgaagtcaccgagtttgcgaaaacttgtgtggccgatgaatccgcggaaaattgcgataagtcactgcacactctgtttggagacaaactttgtaccgtggcaacccttagagaaacctacggagaaatggccgactgctgcgcaaagcaggaacctgagcggaacgagtgctttctccaacataaggatgataatccgaacctcccgcggcttgtgcggcctgaggtggacgtgatgtgcacggcgtttcacgacaatgaggagactttcctgaagaagtacctgtacgaaatcgctcgtcgccacccatacttttacgccccggagttgctcttcttcgcgaaacgctacaaagcagcgttcactgaatgttgccaggccgcggataaggctgcgtgtctgctcccgaaactggatgaattgagagacgaagggaaagcatcatcagccaagcaaagactgaaatgcgcgtcgctccaaaagttcggggaacgcgccttcaaagcgtgggctgtcgcgagattgtcgcagcggtttcctaaggccgagtttgccgaagtgtcgaagctggtcaccgacctgaccaaagtgcatactgaatgctgccacggcgacctcctggagtgtgccgacgatcgcgcagacctggcaaagtacatctgcgagaatcaggattctatttccagcaaacttaaagagtgctgcgagaagccgctgctggaaaagtcgcactgcatcgcagaagtggagaacgacgagatgccggcggacctgccgtcattggcagcagactttgtggaaagcaaggatgtgtgtaagaattacgcagaagctaaagatgtgttcttgggaatgttcctgtatgaatacgcgcggcggcacccggattactccgtcgtgctcctgctgagacttgcaaagacttacgaaactactcttgagaagtgctgcgcagctgcggacccgcacgaatgttacgccaaagtctttgacgagttcaaaccactggtcgaggagccgcaaaacctgattaagcaaaactgcgagttgttcgaacagctgggcgaatacaagttccagaacgcgttgctggtgcgctacactaagaaggtgccgcaagtctccactccgactctggtggaggtcagccgcaacctcggaaaagtgggatcgaagtgctgcaaacacccagaagcgaagcggatgccatgcgcggaggactacctgtccgtcgtattgaaccagctctgcgtcctccacgaaaaaactccagtgtcggaccgcgtgactaaatgttgcactgaaagcctcgtcaaccggcgcccatgcttctcggccttggaggtggatgaaacttacgtgccgaaggaattcaatgccgaaactttcaccttccacgcagacatctgcaccctgtccgaaaaggaacggcagatcaagaagcagactgctcttgtcgagttggttaaacacaagccgaaggcgactaaggaacaactgaaggctgtgatggacgactttgccgctttcgtggagaagtgttgtaaggccgatgacaaggaaacttgtttcgctgaagaaggaaagaagctcgtcgcggcctcgcaggcggcgctgggactg

SEQ ID NO: 249324 - DNA, 2007 bp, synthetic construct
  misc_feature 1..2007: note = Description of Artificial Sequence: Synthetic coding sequence
  source 1..2007: mol_type = other DNA
atgaagtgggtatcattcatttccctgctgttcctgttctcgtctgcgtactcgggctcgcttgacaaacggcatggcgagggaacgtttaccagcgatgtgtcctcctacctggaaggtcaggcagcaaaggagttcattgcgtggctggtgaaaggtcgtcatggggaaggaacctttacttcggatgtctcctcatacctggaaggacaggcagctaaggaattcatagcctggcttgtcaaaggaagagacgcccataagtcggaagtggcccatagattcaaagacctgggagaagaaaacttcaaggcgcttgtgcttattgcctttgcacagtaccttcagcaatgccccttcgaagatcacgtgaagctcgtcaatgaggtgaccgagtttgcaaaaacgtgcgtggctgatgaatccgcagaaaactgtgataagagcctccataccctttttggagacaagttgtgtactgtggccactctgagagagacttacggggagatggctgattgttgtgcaaagcaagagcctgaacgcaatgaatgttttctccaacacaaggatgataacccgaatctccctcgcttggttcgcccagaagttgatgtcatgtgtacggcgtttcatgacaacgaagaaaccttcctcaagaaatacctgtacgagattgccagaaggcatccgtacttttatgcaccagaactgctgttttttgcaaagagatacaaggccgcttttaccgaatgctgtcaggccgcagataaggcagcctgcctgctgcctaaacttgacgagctgagggatgaaggaaaggcatcgtcagccaagcagcgcctgaagtgtgcctcccttcaaaagtttggcgagcgtgcatttaaggcctgggccgtcgccagactgtctcaacgatttccaaaagcagaatttgctgaagtgtctaaacttgtgactgatcttactaaggtgcataccgaatgttgtcatggagatcttctggaatgtgcagatgatcgggccgatctggcaaaatacatatgtgaaaatcaagattcaatttcgtcgaagctgaaagagtgttgcgagaaacctttgctggaaaagtcccactgcattgctgaggtcgagaatgacgagatgcctgctgatttgccatcgctcgctgcagatttcgtggaaagcaaggatgtctgtaagaactacgcagaggcaaaggacgtgtttcttgggatgttcctttacgaatacgcacggagacatcctgattactcagtcgtgcttcttcttagactggcaaagacttatgaaactacccttgagaagtgttgcgcagcagcggatcctcacgaatgttacgcaaaggtgttcgacgaattcaagccccttgtggaggagccgcagaacctgatcaagcaaaactgcgagctgtttgagcaactgggtgagtacaaattccagaatgcactcttggtgcgctataccaagaaagtccctcaagtgagcactcctactctggtggaagtgtcgcggaatcttggaaaggtgggctcaaagtgttgcaagcatcctgaggcgaagcgcatgccctgtgctgaggactacctgagcgtcgtgcttaatcaactttgcgtcctgcacgaaaagacgccagtgtcggaccgggttaccaaatgttgtacggaaagcctcgtgaaccgacgcccttgcttttcggccctggaagtggatgaaacttatgtgcccaaggaattcaatgcagaaacctttaccttccacgcagatatttgtactctcagcgagaaagaaaggcaaatcaagaaacagaccgcgctggtggagctggtcaagcataagcccaaggccacgaaggagcagttgaaagcggtgatggacgactttgccgcattcgtggaaaagtgttgtaaggcagacgataaagagacttgttttgccgaagaggggaagaaacttgttgcagcaagccaagcggcgctgggtttg

SEQ ID NO: 249325 - DNA, 2007 bp, synthetic construct
  misc_feature 1..2007: note = Description of Artificial Sequence: Synthetic coding sequence
  source 1..2007: mol_type = other DNA
atgaagtgggtctcatttatctccctgcttttcctgttttcctccgcctactctggcagcctcgacaaaagacatggggagggaacattcacttcagacgttagctcgtacttggagggtcaagccgccaaagagttcattgcttggctggtgaaagggagacacggcgagggcacctttacgtctgacgtttcctcgtatttggaaggtcaagccgccaaagaattcatcgcttggctggtaaaaggaagagatgcccataagagcgaggtggcgcaccgcttcaaggatttgggagaagagaatttcaaagccctggtcctgatcgcatttgcgcagtatctccagcagtgccctttcgaggaccacgtgaagctagttaacgaggttacagaatttgcaaaaacctgtgtagcagatgaaagcgctgagaattgtgacaagagccttcacactctctttggagataagctatgcacagtagccaccttgcgggagacctacggggaaatggctgactgttgcgccaaacaagaacctgaaagaaatgagtgcttccttcagcacaaggatgataatcctaatctgccgaggttagtgcgtccagaggtagacgttatgtgcacggcttttcacgataacgaggagaccttcctgaagaaatatttgtacgaaatagcccgaagacatccgtacttctatgcccccgagcttttgtttttcgcgaagcgctacaaggccgctttcaccgagtgctgccaggccgccgacaaagccgcttgccttctacccaaacttgatgaactcagggatgagggcaaagcatcttctgcgaaacagagactcaagtgcgctagccttcagaagtttggagaaagagcttttaaggcatgggccgtggccagacttagtcagagattcccaaaggcggagttcgccgaagttagcaaactggtcaccgatctgacgaaagtgcataccgaatgctgtcacggggacctgttggagtgtgcagatgaccgtgccgatctcgcaaagtacatttgtgaaaatcaggatagcattagttcaaagttgaaagaatgctgcgaaaaacccctcctcgagaagtctcactgcatcgcggaggtggagaatgatgaaatgcctgcagatctccctagtttagcggcggattttgtggagtccaaggatgtgtgcaaaaattacgcggaagcaaaagacgtgttccttgggatgtttttgtatgaatacgcgaggaggcatcccgattactcagtggtgctgctactgcgacttgcaaaaacatatgagaccaccctggagaagtgctgtgccgctgccgacccccacgaatgctacgccaaggtgtttgatgaatttaagccactggtagaagagcctcaaaacttgattaaacaaaattgcgaactgttcgagcagctaggagagtataaatttcagaatgccctgttagtgaggtacaccaaaaaagttccccaggtgtccacccctaccctagttgaagtctctcggaacttggggaaagtcggctcaaaatgctgcaaacaccccgaagccaagcgtatgccatgtgccgaagactacctttccgtggttctgaaccagctctgtgtgctgcacgagaagactccagtttccgatagagtgactaaatgctgtaccgagtcactggtaaataggaggccatgtttcagcgctcttgaagtagacgaaacatatgtaccgaaggagtttaatgcagaaacctttactttccatgccgatatttgtacactgtccgaaaaagaaaggcagataaagaaacaaaccgccctggtggagttggtgaagcacaagcctaaagcaactaaagagcagctaaaggcagtgatggacgattttgccgcattcgtagagaaatgctgcaaagccgacgacaaggagacctgtttcgcggaagagggcaaaaagctcgtggccgcctcacaagccgccttgggtctg

SEQ ID NO: 249326 - DNA, 2007 bp, synthetic construct
  misc_feature 1..2007: note = Description of Artificial Sequence: Synthetic coding sequence
  source 1..2007: mol_type = other DNA
atgaaatgggtttcctttatcagcctcctgttcctattctcgtccgcctattcaggcagcctggacaaacggcacggagaagggacttttactagcgatgtgtccagttacctagagggccaggctgcaaaagaattcatcgcctggttggttaaaggacgccatggcgaaggtacattcacatctgacgtgtcttcttatttggagggccaagccgccaaggaattcatcgcctggttagtcaaaggtagagatgcccataagtccgaagtggcacaccgcttcaaggatctcggtgaggagaattttaaggcgttggtacttatcgcatttgcccagtacttacagcagtgcccgtttgaggaccatgtcaaactcgtgaatgaggttaccgagttcgcaaagacatgcgtggctgatgaatccgcagagaactgtgacaagtccctgcataccttgtttggagacaagctctgcacagtggccaccctgcgagagacatatggggagatggccgattgttgtgctaaacaggagcctgaacgcaacgaatgtttcctgcagcataaagatgataatccaaatctgccccggctggtacggccggaggtagacgtgatgtgcactgcgttccatgacaatgaagagaccttcctgaagaagtacctttatgagatcgcgcgaagacacccctacttttatgcccccgagctgctgtttttcgccaagcggtacaaggcagccttcacggagtgctgtcaggcggccgataaggccgcatgtctcctcccgaagctcgacgagctccgcgacgaggggaaggcgtcctctgcgaagcagaggttaaagtgcgcctctctccagaagtttggcgagcgcgcttttaaagcgtgggcagttgctaggctgagccagaggtttcccaaagcagagttcgcagaggtcagcaagctggttacagacttgacaaaagtgcacacagaatgttgtcatggtgacttgctggaatgtgccgatgatcgtgccgacctcgctaagtacatctgcgagaatcaagactcaatctcgagtaagttgaaggagtgttgtgagaaacccctgctcgagaagagtcactgcattgccgaggtggagaacgacgagatgcccgcagatctccccagtctcgccgcagattttgtggagagtaaagacgtctgcaaaaattatgctgaggctaaggacgtctttctgggaatgtttctctatgaatatgcacgtcggcacccagactactccgtcgtcttgttattgaggttggctaagacgtatgagactacactcgagaagtgctgcgctgctgccgacccacacgagtgctacgccaaagtgttcgacgaatttaaacctcttgtggaagaaccgcagaatctgatcaagcaaaactgtgagttattcgaacagctaggggagtacaaattccaaaacgccctgctcgtaaggtacacaaagaaagttccccaggtatcaactcctactctagtcgaagtgtctaggaatttaggcaaggtggggtccaagtgttgcaaacatccagaggctaaaagaatgccttgcgccgaggactatttgtcagtcgtgctgaaccagttatgcgtgctgcatgagaagacacccgtgtcagatagggtgactaaatgctgcacggaatctctggtgaacagaagaccttgcttttccgctctggaggtagatgaaacctacgtgccaaaagagtttaatgctgagacgtttacatttcacgcagacatttgtacactctcagagaaagagcgccagataaagaagcagaccgccttggtagaactggtgaagcataagcctaaggcaacaaaagagcagctcaaagccgttatggacgacttcgcggctttcgtcgagaaatgctgcaaagctgacgataaagaaacatgctttgccgaagagggcaagaaattggtggccgcttcgcaggctgctctcgggctg

SEQ ID NO: 249327 - DNA, 2007 bp, synthetic construct
  misc_feature 1..2007: note = Description of Artificial Sequence: Synthetic coding sequence
  source 1..2007: mol_type = other DNA
atgaagtgggtctcattcattagcctgctgttcttgttcagttcagcttactcaggatccctcgataaacgccatggcgaagggactttcactagcgacgtctcctcttatttggaagggcaagccgccaaggagttcatcgcttggttggtgaagggacgccacggagaaggcacattcacatccgatgtaagcagttacctcgaggggcaggcagctaaggagtttatagcctggttggtgaagggccgggatgcccacaagtctgaggttgctcatcgttttaaagatctcggcgaggagaactttaaagccctggttttgatcgcctttgcgcaatatctccaacagtgcccattcgaggatcacgtgaaactagtgaatgaagtcaccgagttcgctaagacatgtgttgcggacgagtctgcggaaaattgcgataaaagcttgcatactttatttggcgacaagctttgcactgtggcaactctccgagagacttacggcgagatggcagattgctgtgccaagcaggagccggagcgaaatgagtgttttctacagcataaggatgacaaccctaacctgccgcgtctcgtgaggccagaggttgatgtcatgtgtaccgcgttccatgataatgaggagaccttcctgaaaaagtatctctacgagattgcaagaaggcatccgtatttctatgcacctgaacttctgttctttgcaaagagatacaaggccgcttttaccgaatgttgtcaagccgcagataaagcagcttgcctgctgcctaagcttgacgaacttcgagatgagggaaaggcttccagcgcaaagcagcggttgaagtgtgccagtctgcagaagtttggggaacgtgcttttaaagcttgggcggtggctcggctgtctcaaagatttcctaaagccgagttcgcggaggtgagcaaattagtgactgatctcaccaaagtgcatacagagtgctgccatggcgatctgttagagtgcgctgacgacagagctgatctggccaaatatatatgcgagaaccaggactccatctcctctaaacttaaggaatgttgcgaaaaaccccttctggaaaagtcccattgtattgccgaagttgaaaatgatgagatgccagcggatcttccttctctggctgctgacttcgtggagagtaaggatgtttgtaagaattacgccgaagccaaggatgtgttcctgggcatgttcctatacgaatacgctcggcggcatcctgattactctgtcgttcttttgctcagattagctaaaacttacgagacgacgttagagaagtgctgtgccgcagcagatccccacgagtgttacgccaaggtttttgacgagtttaaaccattggtcgaagagccacagaatctcataaagcagaactgcgaattgtttgaacagttaggagaatataaatttcagaacgccctgctggtgcgttacacaaagaaagttcctcaggtgtccacccccaccctcgtcgaagtttcgagaaaccttggaaaagtgggatccaagtgttgtaaacatcccgaggcaaaacgaatgccatgcgctgaagactacctaagtgtggtgctgaatcagctctgtgtgcttcatgagaagactcccgtgagtgatcgggtgactaagtgctgtactgaatcgcttgttaatcgcagaccctgtttctccgccctggaggtggatgagacatacgttcccaaggaatttaatgcagagacatttacatttcatgccgacatctgcactctctcagagaaggaaagacagatcaaaaagcagaccgcactcgtggaattagtcaaacacaaaccgaaggccactaaagagcaactgaaggcagtgatggacgacttcgctgcattcgtggaaaaatgttgcaaagctgacgacaaagagacatgctttgcagaggaggggaagaagctggttgccgcgtctcaggctgccctcggtctg

SEQ ID NO: 249328 - DNA, 2007 bp, synthetic construct
  misc_feature 1..2007: note = Description of Artificial Sequence: Synthetic coding sequence
  source 1..2007: mol_type = other DNA
atgaagtgggtcagcttcatttcccttctgtttctgttctcctctgcctattccggctctcttgacaagaggcatggagagggcacctttaccagcgacgtaagttcctacctggagggccaggccgctaaagaatttatcgcatggttagtgaagggacgacatggcgagggcaccttcacatctgatgtgagtagttacttagaggggcaagccgctaaagagtttatcgcctggctggtcaaaggccgggacgcccataagtctgaggttgcccaccgatttaaggacttgggcgaggagaatttcaaggccctcgtgctgatagctttcgcccagtacctccagcagtgcccattcgaagaccatgttaaactggtgaacgaggtgactgaatttgctaagacttgtgtggcagatgagtccgctgagaactgtgacaaatctctacatactctgttcggagataaactctgcaccgtggctactttaagggaaacctacggcgaaatggctgactgctgcgccaagcaggaacccgaacgcaatgagtgttttttacaacataaggacgacaacccaaacctgccaaggttagtcagacctgaggtagatgtgatgtgtaccgcttttcatgataacgaggaaacctttttaaaaaagtatttatacgaaattgctcggcgccatccttatttctacgctcccgaactgctgttttttgctaaacgctataaggctgctttcacagaatgctgccaggcagctgataaggctgcctgcctgctgcctaaactcgatgaactgagggacgagggaaaggcctcctcagctaagcagagactgaaatgtgccagccttcagaaatttggcgagagagcctttaaagcttgggccgtcgccaggctgtcacaacgctttccaaaagccgagttcgccgaagtgtccaaactcgtgacagacttgacaaaggtgcacactgagtgctgtcacggtgacttattggagtgcgccgacgatagagctgacctggctaagtacatatgcgaaaatcaggatagcattagctccaaattaaaagagtgctgtgagaagcccctcctggagaaatctcattgcattgccgaagtggaaaacgacgagatgcctgccgacctgccttcactagccgcagattttgtcgagagtaaagacgtgtgtaagaactatgctgaggcaaaggatgtttttcttggcatgtttctatacgaatatgcccggcgccaccccgattattccgtggttttgcttctcaggctggctaagacctatgaaaccaccctggagaagtgctgcgccgctgctgacccccatgagtgctatgccaaggtgtttgacgagttcaagcctctagtggaagaaccacagaacctgataaagcagaattgcgagctctttgagcagttaggggagtataaattccagaatgcactgcttgtgcgctacaccaagaaggtgcctcaggtgtccacaccaacactagtcgaagtgagccgcaatctgggtaaggttggctccaaatgctgtaagcacccagaggccaagcgaatgccatgcgcagaagattacctaagtgttgttctcaatcaactgtgtgtgctgcacgaaaaaactcctgtgtctgatcgagtgacaaagtgctgtaccgagagcctggtgaatcgacgaccatgtttttctgcactggaggtggacgagacttacgtgccaaaggagttcaatgccgagacattcacattccacgcagacatttgtacactgtctgagaaggagcgccagataaagaagcaaacagccctagtggaactcgtcaaacataaacccaaggccacaaaagagcagctgaaagcagttatggacgacttcgctgccttcgtggaaaagtgttgcaaggccgatgataaagaaacttgttttgcagaagaaggcaaaaaactggtcgctgcatctcaggccgccttaggtctg

SEQ ID NO: 249329 - DNA, 2007 bp, synthetic construct
  misc_feature 1..2007: note = Description of Artificial Sequence: Synthetic coding sequence
  source 1..2007: mol_type = other DNA
atgaagtgggtatccttcatttccctcctgtttctgttttcttccgcctactctgggtcactggacaagagacatggagagggaacattcacaagtgatgtttcttcatacttggaaggacaggccgcgaaggaatttattgcgtggttggttaagggacgacacggagaagggacgtttacatctgacgtgagctcgtatctcgagggccaggcagcgaaggaattcatcgcctggcttgtaaagggccgtgacgcccataagtctgaggtggcacatcgttttaaggatctcggcgaagagaatttcaaagctcttgtgctcatagcctttgcgcaatacttgcaacagtgcccgtttgaggaccatgtgaaacttgtgaacgaggtgacggagttcgcaaagacctgcgtcgcggacgagagcgccgaaaactgtgacaagtctcttcacacgctgtttggcgataagttatgcacggtggcaaccctacgcgaaacttatggggaaatggctgactgctgcgccaaacaggagcccgaaagaaacgagtgcttcctacagcacaaagacgataatcccaacctgccccggctggttaggcctgaggtcgacgtgatgtgcacagccttccatgataacgaagaaacgttcctcaagaagtacctctacgagatagcacggcggcatccctacttctacgctcccgaacttctattcttcgcgaagaggtacaaggctgcgttcaccgagtgttgccaggccgctgacaaggctgcctgcctgcttcccaagctcgacgagctccgggacgaaggaaaggccagcagtgcgaagcagaggctgaaatgtgcctctcttcagaaattcggggagcgcgcctttaaagcatgggctgtggcacgtctgtctcagcgtttccctaaggccgaattcgcagaagtcagcaaactggttaccgacctgactaaagtacataccgagtgctgccacggggatctgctggaatgcgcagacgacagagccgatctagccaagtatatctgcgagaatcaggactccatatccagcaagctgaaagaatgctgcgagaagccgcttctcgaaaagtcgcactgtattgccgaggtggaaaatgatgaaatgccagccgacctgccttccttggctgcagacttcgttgagtcaaaggacgtctgcaagaactacgccgaggctaaggacgtgtttctcgggatgttcctgtatgaatacgcacgccgacatcccgactatagtgtagtccttctgctgcgtctcgccaaaacatacgagacaaccctggaaaaatgttgtgcggctgccgatccccatgagtgctacgcgaaagtgttcgacgagtttaagccccttgttgaggaaccacagaacttgataaagcagaactgcgaattgttcgagcagctgggcgaatataagttccaaaatgccctgctcgtgcggtataccaaaaaggtacctcaggtttctactccaacactagtagaagtgtctcggaatctcgggaaggtggggtccaagtgctgtaagcatccagaggcaaagcggatgccatgcgctgaggactacctctccgttgtgctgaatcagttgtgcgtgttgcacgagaagacacccgtgtccgacagggtcacgaagtgctgtaccgagtctctggtgaatagacgcccttgttttagcgcccttgaggtcgacgaaacctatgttccgaaagagttcaacgcggaaacgttcacctttcacgcagacatttgtacgctgagtgaaaaagaacgccaaatcaagaagcagaccgcactcgtcgagctggtcaagcataagcctaaggccaccaaagaacagttaaaagctgtgatggacgatttcgccgccttcgtggagaaatgttgcaaagcggatgacaaggagacctgtttcgcggaggagggaaaaaaacttgtggccgccagccaggccgcattgggactg

SEQ ID NO: 249330 - DNA, 2007 bp, synthetic construct
  misc_feature 1..2007: note = Description of Artificial Sequence: Synthetic coding sequence
  source 1..2007: mol_type = other DNA
atgaaatgggtcagcttcatcagcttgctgtttcttttttctagcgcctacagcggcagcctcgataaaagacacggcgagggcactttcacgagcgatgtgtcatcttatctggaaggccaggctgctaaagaattcatcgcctggctggtcaagggccgccatggagaaggcaccttcacgtctgatgtgagctcctaccttgagggtcaggccgcaaaggaatttatcgcatggttggtgaaaggccgagacgctcacaagtcagaagtcgctcatcgctttaaggatctcggagaggagaactttaaagctctggtgctcattgctttcgctcagtatctccagcagtgcccttttgaagatcatgtgaaactggtgaatgaggtgaccgagtttgccaagacatgcgtcgccgacgagtccgcagaaaattgtgacaaatctctgcacacgctgtttggcgataaactatgcacagtggccaccctcagagagacctacggggaaatggccgattgctgcgcaaagcaggagcctgaacgaaacgagtgtttcttgcagcataaggacgataaccccaacctgccacgcctggtcagaccagaagtggacgtaatgtgtaccgcgttccatgacaacgaggaaacatttctgaagaagtatctgtatgaaatcgctaggagacacccctacttctacgccccagagttgcttttctttgccaagaggtataaggcagctttcaccgagtgttgccaggccgctgacaaagcagcctgcctcctccccaaactggatgaacttagggacgaagggaaagccagcagtgccaagcagagactgaagtgcgcatctcttcagaaattcggggaacgagcctttaaggcttgggcagtagcacgacttagtcagcgatttcctaaggcagagttcgctgaggtgagcaagcttgtgaccgacctgacaaaggtgcatacggaatgctgccacggggacctccttgagtgtgccgacgaccgggcagacctcgctaaatatatctgcgagaatcaagacagcataagctctaaactcaaggaatgctgtgagaagccattgctggagaagtcccactgcatagccgaagtggagaacgacgagatgcccgccgacctcccaagtttggcagctgactttgtcgagtccaaagatgtctgtaaaaactatgcggaagcgaaagacgtgttcctgggcatgttcctgtatgaatacgccagaagacatcctgattattccgtggtcctgctgctcaggctcgccaagacgtacgagacaacgctggagaagtgttgcgccgccgcagaccctcacgagtgctacgcaaaggttttcgacgagtttaaacctctcgttgaggaacctcagaacctgataaaacagaattgcgaactctttgagcagcttggagagtataagttccagaatgccctgctggtccgctacaccaaaaaggtgccacaggtgtcaacccccaccctggttgaagtcagcaggaatctcgggaaggtcggctctaagtgctgcaaacatcccgaggccaaacgtatgccctgcgccgaagactacctgagtgtggtgttgaaccagctgtgtgtgctgcatgagaaaactcccgtctctgatcgcgtgacgaagtgctgtacagagtcccttgtgaacaggaggccctgtttttcagctctagaggtagatgagacttacgtgccaaaagaatttaatgcagaaacctttactttccacgccgatatctgtacgctcagcgaaaaggagcgtcagattaaaaaacaaaccgccctggtcgagctggttaaacataagcccaaagcgaccaaggaacagcttaaggcggtgatggatgactttgccgcattcgtcgaaaaatgttgtaaggcggatgataaagaaacatgctttgcggaggaggggaagaaactggtggctgcgtctcaggccgcactcgggctc

SEQ ID NO: 249331 - DNA, 2007 bp, synthetic construct
  misc_feature 1..2007: note = Description of Artificial Sequence: Synthetic coding sequence
  source 1..2007: mol_type = other DNA
atgaagtgggtttcgtttatcagcctcttgtttctgttttccagcgcatacagcggctcgctggataagcgccatggcgagggaactttcacctccgatgtgagcagctaccttgaaggtcaggcagccaaggaattcattgcatggcttgtgaaaggcaggcacggcgaaggcacctttacctcagatgtgagctcttacctggagggacaagccgcaaaggagtttattgcctggcttgtcaaagggagggatgcacacaaatcagaggtcgcacatcgatttaaggacctgggagaagaaaactttaaggccctggtcctgatcgcctttgctcaatacctgcagcagtgcccattcgaagatcatgtcaaactcgtgaacgaggtgaccgaattcgcaaagacttgtgtggcagatgaaagcgcagaaaactgtgataagtcgcttcatactttgtttggagataaactttgtactgtggccaccctccgagaaacctatggtgaaatggcggactgttgtgcaaagcaggaaccagagcgcaatgagtgttttctgcagcacaaggacgataacccaaatctccccagactggttagaccagaagtggacgtgatgtgtactgctttccacgacaacgaagaaacttttcttaagaagtatctctacgagattgccagacgtcatccttacttttacgcaccagaattgctgtttttcgcaaaacgctacaaggcggcatttaccgagtgttgtcaagcagcagacaaggcagcatgtctgctgcccaaactggatgagctccgcgatgaaggaaaggcttccagcgctaaacagagactgaagtgtgcatcgcttcaaaagtttggggaacgggcatttaaggcatgggcagtggcgcgactgtcgcagcgttttcctaaggcagaattcgcagaagtgtcaaaacttgtgactgatcttaccaaggtgcatactgaatgctgccatggcgatcttctggagtgtgctgatgaccgggcagatctggcaaaatacatttgcgagaatcaggactccatttcgagcaaactgaaggagtgttgcgaaaagccacttctcgaaaagagccattgcatcgcagaagtggaaaacgacgagatgcctgcagatctgccatcgcttgcagcggacttcgtggaatccaaggacgtgtgtaagaactacgctgaagcgaaagacgtgttcctgggaatgtttctgtacgagtacgcacgtcggcatcctgactactcagtcgtgctccttcttaggttggcaaagacctacgaaaccacccttgagaagtgttgtgctgcagcagatccccatgaatgttacgccaaggtgtttgatgagtttaaacccctcgtggaagaacctcagaacttgattaagcaaaactgcgagcttttcgaacagcttggagaatacaagtttcagaacgctctccttgtgcgttacactaagaaggtgccgcaagtgagcactccaactctcgtggaagtgtcgcgaaacctggggaaggtgggaagcaagtgttgtaagcatccagaagctaagagaatgccctgtgcggaggactacctctccgtggtgttgaatcaactttgtgtcctgcatgagaaaactcctgtctcagatcgtgtcactaagtgctgtaccgaatcacttgtgaacaggaggccttgtttttccgcactcgaagtcgatgagacttatgtgcctaaggaattcaatgcagaaactttcacttttcatgccgatatttgcaccctgtcagaaaaggaacggcaaatcaagaagcaaaccgcacttgtcgagctcgtgaagcacaagcctaaggccaccaaggagcagcttaaagcggtgatggacgactttgcagcttttgtggagaaatgctgcaaggcggacgataaggaaacttgtttcgcagaagagggtaagaaactggtggcagcaagccaagcagcactgggtctg

SEQ ID NO: 249332 - DNA, 2007 bp, synthetic construct
  misc_feature 1..2007: note = Description of Artificial Sequence: Synthetic coding sequence
  source 1..2007: mol_type = other DNA
atgaaatgggtcagcttcatttcccttctttttctgttcagctctgcttactccggcagccttgataaaaggcatggcgagggcaccttcacctccgacgtgtcaagctacttggagggacaggcggccaaggagttcatagcatggctcgtgaaaggcaggcatggcgaaggaacgttcacttccgatgtgagtagctacttggagggacaggccgcaaaggagtttattgcctggctggtaaaaggaagggatgcgcacaagagcgaggttgcccaccgcttcaaggatctgggggaggaaaacttcaaagccctcgtcctcatcgccttcgcccagtatctgcagcagtgcccgtttgaggaccacgtaaagcttgtgaatgaggtaaccgagtttgccaagacctgcgttgccgacgagtcagcggaaaactgtgacaagagccttcatactctcttcggggacaaactctgtacagtggctaccctcagggaaacctacggggaaatggctgattgttgcgctaaacaggagcccgagcgcaatgaatgcttcctccaacataaagatgacaaccctaatctgccacggctcgtgcggcccgaggtggacgtaatgtgtactgctttccacgacaatgaagagacgtttctgaaaaaatatctgtacgagatagctagaagacacccatacttttacgccccagaactgctgtttttcgccaaacggtacaaggccgccttcaccgagtgttgtcaggctgccgataaggctgcgtgtttgttgcccaaacttgatgaactgcgcgatgagggtaaggcatcctctgctaaacagagactgaaatgtgccagtctgcagaaattcggcgaaagagccttcaaggcctgggccgtggctagactctcccaaaggttcccaaaggcagaattcgctgaggtgtcaaaactggtgacggacctgactaaggtgcataccgagtgctgccacggggacttgctcgaatgcgcagacgatcgcgccgacctggccaagtatatatgcgaaaatcaggactctatttcaagcaagctgaaggagtgttgtgaaaagcccctgttggagaagtcccactgcattgcggaagtggagaatgacgaaatgccagcggatctcccctcactggccgccgacttcgtggagtcaaaagacgtatgcaagaattacgctgaggcaaaggacgtgttcctgggtatgtttctgtatgagtacgcccgccggcaccctgactattctgtcgttctgctgctccgcctggcgaagacttacgagacaacattggagaaatgctgcgcagctgccgaccctcatgagtgctacgccaaggtcttcgacgaattcaaacctctggtcgaagagccgcaaaatttgattaagcagaattgcgagctgttcgagcagcttggcgagtacaaattccagaacgctctgctcgtgcgctacacgaaaaaggtgccgcaagtgtccactcccaccctggtagaagtgtcaaggaatttgggcaaggtagggtctaagtgctgtaagcatccggaggctaagcggatgccatgcgcggaggactacctgtccgttgtgctgaaccagttgtgtgtgcttcacgagaaaacccccgtaagtgaccgagtcactaaatgctgtaccgagtccctggtcaacaggcgcccatgcttttccgcgctggaggtggatgaaacatacgttcctaaagaatttaacgcggagactttcacctttcacgccgacatttgcacattgtcagaaaaggagagacaaattaaaaaacagaccgccttggttgagctggttaagcacaagccaaaagcaactaaggaacagctcaaggctgttatggatgacttcgccgccttcgtggagaaatgctgcaaggccgatgacaaggagacttgctttgctgaggaaggtaaaaaacttgtagccgcctcccaggcagcactggggctg

SEQ ID NO: 249333 - DNA, 2007 bp, synthetic construct
  misc_feature 1..2007: note = Description of Artificial Sequence: Synthetic coding sequence
  source 1..2007: mol_type = other DNA
atgaaatgggtttctttcatctccctgctcttcttgttctcatctgcctactctggctcactggacaagagacacggcgaaggcacctttacttccgatgtcagctcttatctcgagggacaggctgcaaaggagttcatcgcctggcttgtgaagggccgtcacggagaaggcacttttacctccgacgtaagcagttatctcgagggacaggcagccaaggagttcatcgcctggctcgttaagggccgcgatgcccacaagagtgaggtcgcccatcgctttaaggacctcggtgaagagaattttaaagcacttgtactgatcgcatttgcccaatacctgcagcagtgcccatttgaggatcacgtgaagctggtcaacgaagtgactgaattcgccaagacatgcgtggctgatgaaagtgccgaaaattgcgataagagcctccataccctgtttggtgataagctgtgcacagtcgccacccttcgtgagacctatggcgaaatggccgattgctgtgccaagcaggagcccgagagaaacgagtgtttcttgcagcataaggacgacaaccccaatctgccccgccttgtccgccccgaggtggatgtgatgtgcaccgcttttcacgataacgaagagacctttctcaagaagtacctctatgagatcgcccgcaggcacccatacttttacgctcccgagttgctgtttttcgctaagcgctataaggccgctttcaccgagtgttgtcaagctgctgacaaggccgcatgcctcctgcctaagcttgacgagctgagggacgagggaaaggcttcatcagcaaagcagcgcctgaagtgtgcatctctgcaaaagttcggagagagggcattcaaggcatgggctgtggctcgcctttctcaaaggttcccaaaagctgagttcgccgaggtgtctaagctggttaccgatctcactaaagtgcacacagagtgctgccatggagatctgctcgagtgtgccgacgacagggcagatcttgctaagtatatatgtgagaatcaagattctatatcctccaaactcaaggagtgctgcgaaaaacccctgttggagaagtctcactgtatagccgaggttgagaacgacgagatgccagctgacctgccaagcctggctgctgactttgtggagtccaaggatgtctgtaagaactacgcagaagccaaggatgttttcctgggtatgttcctgtacgagtatgctaggaggcaccccgattattccgtggtgctcttgctgaggctggcaaaaacatatgagaccaccctcgagaagtgttgcgctgcagcagatccacatgaatgctatgccaaggtattcgatgagttcaaacctctggtcgaagagccacagaacctcatcaagcagaactgcgaactcttcgaacagcttggtgagtacaagttccagaatgctttgttggtcaggtatactaaaaaggtgccccaggtgagtactcctaccttggtggaggtgtcaagaaaccttggaaaggtgggcagtaaatgttgcaagcatccagaagctaagcgcatgccttgtgcagaggattatctcagcgtcgtgttgaaccagttgtgcgtgcttcatgagaagacaccagtaagtgatagggtgaccaagtgctgcaccgagtcattggttaacagacgcccttgtttctccgctttggaagtagacgaaacctacgtccctaaagaattcaacgctgagaccttcactttccacgccgatatttgcactctgtctgagaaggagaggcagattaaaaagcaaacagcactggtcgagcttgtcaaacataaacccaaggctaccaaagaacagctcaaggcagttatggatgacttcgctgccttcgtggagaagtgctgcaaagctgacgacaaagagacatgcttcgccgaggaaggcaagaagctggtggccgcaagccaggctgctctgggtttg

SEQ ID NO: 249334 - DNA, 2007 bp, synthetic construct
  misc_feature 1..2007: note = Description of Artificial Sequence: Synthetic coding sequence
  source 1..2007: mol_type = other DNA
atgaaatgggtatcgtttatcagccttctttttctgtttagctccgcatattcgggctcgctggacaagcgtcatggagaagggacctttacctcggatgtgtcgtcgtacctcgaaggccaagcagctaaggagtttattgcttggcttgtgaaaggccgccatggggagggaacttttacgtcagatgtctcgtcttaccttgagggacaagctgcaaaggagttcatcgcatggctggtgaagggtagagatgcacataagagcgaggtggcgcaccggtttaaggaccttggagaggaaaacttcaaggcccttgttctgatcgcattcgcccagtacctgcagcagtgtcctttcgaagatcatgtcaagctggtgaatgaagtgacggagttcgcgaaaacctgcgtcgccgacgaaagcgcggaaaactgtgataagtcccttcatactctttttggtgataaactttgtactgtggcgaccctgcgcgagacttacggtgaaatggcagactgctgcgctaaacaagaacctgaaaggaatgaatgtttccttcagcataaggacgacaatcctaaccttccccgactggtgcggcctgaagtggacgtgatgtgtactgcgttccacgataacgaggagactttccttaagaagtacctgtacgagatcgcacgtaggcatccctacttttacgctccggagctcctgtttttcgccaaaagatacaaggcagcattcactgagtgttgtcaggccgcagacaaagcagcatgtctgctgccaaagctggatgagctccgggatgaagggaaggcctccagcgcaaaacaacgccttaagtgtgcaagcctgcaaaagtttggtgagagagcatttaaggcatgggccgtcgcgcgtctgtcccagcgattccccaaagcagaattcgcagaggtgtcaaaactggtgactgatctcaccaaagtccataccgaatgttgccatggtgacctgcttgaatgtgcagatgaccgagccgaccttgcaaagtacatctgcgaaaaccaagattcgatttcgagcaaacttaaggagtgctgtgaaaaaccgctgttggaaaagtcccactgtattgccgaggtggaaaacgacgaaatgcctgcagatctcccgtcacttgcagctgattttgtggaatcgaaagatgtgtgtaagaattacgcagaggccaaggacgtgttcctcggcatgttcctgtacgaatatgcgaggcgccatccagattactcagtggtgcttctcctcagacttgcaaaaacctacgaaaccacccttgaaaagtgctgcgccgcagccgatcctcacgaatgttacgcaaaggtgtttgacgagtttaagccgcttgtggaggaaccccaaaacctcatcaaacagaattgtgagctttttgaacagctgggagaatacaagtttcagaacgccctccttgtcagatacactaaaaaggtgccacaggtgtcaaccccaactctggtagaggtgagtaggaatcttggaaaggtgggatccaagtgttgtaaacaccctgaagccaaaaggatgccatgtgcagaagattacctttccgtcgtcctgaaccaactctgtgtgctgcatgaaaagacgccagtcagcgatagagttaccaaatgttgcactgagagcttggtgaaccgacggccttgtttttccgcacttgaggtggatgagacgtacgtgcccaaagaattcaatgcagagactttcacttttcacgccgacatctgtaccctctccgagaaggagcgacagatcaaaaaacagactgcgctggtggagctggtgaagcataagcccaaggcaaccaaagagcagcttaaagcagttatggatgattttgcggcattcgtggagaaatgctgtaaggcagatgataaggaaacgtgttttgcagaggaagggaaaaaactggtcgctgcctcccaggctgcactgggactc

SEQ ID NO: 249335 - DNA, 2007 bp, synthetic construct
  misc_feature 1..2007: note = Description of Artificial Sequence: Synthetic coding sequence
  source 1..2007: mol_type = other DNA
atgaagtgggtgtccttcataagtctcctcttccttttctccagcgcgtatagtgggtcactcgataagcgccacggcgaaggcacattcacctccgatgtgtcaagttacctggaaggtcaggccgctaaggaattcatcgcttggctagtgaaggggcgacacggggaagggacatttacctcagatgtgtcatcctatctggaaggccaggctgctaaggaattcatagcgtggttagtcaaaggtcgggatgcccataagagcgaagtggcacataggttcaaggacctcggcgaggagaatttcaaggctctagttcttatagccttcgctcagtacttgcagcagtgtccatttgaggatcacgtcaagctggtgaacgaagtaaccgaatttgctaaaacctgcgtggccgacgagagtgccgagaactgcgataaatcccttcacaccttgtttggagataaattgtgcaccgtggccacactccgcgaaacctacggagaaatggccgactgctgcgcaaaacaggaaccagaaagaaatgagtgcttcctccaacacaaagatgataatccaaacctgccacgtctggtcaggcccgaggttgacgttatgtgcacagctttccatgataatgaggagacttttctaaagaagtatctctacgagatcgcaaggcgccacccctatttctatgcccccgagcttctcttctttgcaaagaggtataaggccgccttcaccgagtgctgccaagccgccgataaggccgcttgcctgctcccgaaactagacgaattacgcgatgagggtaaagcatcgtctgccaagcaacggctgaaatgtgcctcactccagaaattcggggagcgcgcgttcaaagcatgggccgtcgcgcggctgagtcagcgattcccaaaagcagagttcgcggaggtaagcaagctggtaaccgatttgactaaggttcacacggagtgttgccatggggatctactggaatgtgctgacgatagggccgacttggccaagtacatctgcgaaaatcaggacagtatctcctctaaactcaaagagtgttgtgaaaagcctctgcttgagaagtcccactgcatagccgaagtcgagaatgatgaaatgcctgcagatctgcctagtctggctgcggactttgtcgagtctaaggatgtctgtaaaaactacgccgaggcaaaggacgtgttcctgggaatgttcctttatgagtacgctcggcgacaccccgattactccgtcgtcctccttctgaggcttgccaagacttatgaaactaccctggaaaagtgttgcgccgcggctgatcctcacgaatgttacgccaaggtgtttgacgagttcaagcctctcgtggaggaaccccaaaatctgattaagcaaaactgtgaattgttcgagcaactgggggaatataagtttcaaaatgctttgctggttagatataccaagaaggtgccccaggtcagtacccctaccctggttgaagtctctaggaatctgggaaaggtgggatctaagtgttgcaagcaccccgaggcgaagaggatgccatgcgcggaggattacctctctgtggttctcaaccagttgtgcgttctgcacgagaagaccccggtctccgatcgggtgacaaaatgttgtaccgagagcttggtcaaccgcaggccctgcttctccgcgctggaggtggacgagacttatgtgcctaaggagttcaatgcggaaacattcacatttcatgctgacatttgcactctgtctgaaaaagaacgccagatcaaaaagcagacagcactcgtggagcttgtcaagcacaagcctaaggcgacgaaggagcaactaaaagcggtgatggacgactttgcagcctttgttgagaagtgctgtaaagctgacgacaaggagacctgcttcgccgaggaaggtaaaaaactagtagcggccagccaggccgccctcggccta

SEQ ID NO: 249336 - DNA, 2007 bp, synthetic construct
  misc_feature 1..2007: note = Description of Artificial Sequence: Synthetic coding sequence
  source 1..2007: mol_type = other DNA
atgaagtgggtttccttcatatctctgctcttcctgttctcgagcgcctactccgggtccctggacaagaggcacggagaaggcacctttacctccgatgtgtccagctaccttgaaggacaggcggcgaaggaattcattgcgtggttggtcaagggtagacatggtgagggcacgtttacttcggacgtctcaagctacctggaggggcaggccgcaaaagagttcatcgcttggctcgtgaaaggacgcgacgcacataagtcagaggtggcgcacaggttcaaggacctgggtgaagaaaactttaaggctctcgtgctcatcgccttcgcgcaatacttgcagcaatgcccattcgaagatcatgtgaagctggtcaatgaagtcaccgagtttgccaagacttgcgtcgccgatgaatcagccgagaactgtgataagtccctgcacaccctgttcggcgataagctgtgcactgtggcaacgctgcgggagacttacggagagatggcggactgctgtgctaagcaggaaccagagcggaacgagtgctttctccagcacaaggatgataatccgaacctcccccggttggtgcggccagaggttgacgtcatgtgcacggccttccacgacaacgaggaaactttcctgaagaagtacctctacgaaatcgcgagacgccacccttacttttacgctccggaacttctcttcttcgcgaaacgctacaaggccgcgttcactgaatgctgtcaggccgcagataaagccgcatgcctgttgcctaagctcgatgaactgcgggatgaaggaaaggcttcctcggcgaagcaaaggcttaagtgcgcgagcctgcagaagttcggagaaagggcgttcaaggcctgggcagtggccagactgagccagcggttccccaaagcggaattcgccgaagtctctaagctcgtcactgatctgaccaaggtccatactgaatgttgccacggggacctcctggagtgtgccgacgacagagccgatctggccaagtacatctgcgaaaatcaagactctatcagttcaaagctgaaagagtgctgcgagaagcctctgctcgagaaaagccactgcatcgcggaagtcgagaatgatgagatgcctgctgatcttccgtcgctcgccgccgattttgtggaatcgaaagacgtgtgcaagaactacgcggaggccaaggatgtctttctgggcatgttcctgtacgagtacgccagaaggcatccagattactcggtggtgctcctcctgcgcctggcgaaaacctatgagactaccctggagaagtgctgtgccgccgcagatccgcatgagtgctatgcgaaggtgtttgacgagtttaagccgcttgtcgaagaaccgcagaacctcattaaacaaaattgcgaactcttcgaacagctgggcgaatacaagttccagaacgccctgctggtgcgatatactaagaaggtacctcaggtgtcgaccccgaccctcgtcgaagtgtcccggaacctgggaaaagtgggctccaagtgctgcaagcatccagaggcgaaacgcatgccgtgcgccgaggactacctgagcgtggtgctgaaccagctctgtgtgctccacgaaaaaactccggtgagcgaccgcgtgacgaaatgctgcactgagtcgctcgtaaacagacgtccctgtttctccgcccttgaagttgacgagacttacgtgccgaaggagttcaatgccgagactttcacctttcatgccgatatctgcactctgagcgaaaaggaaaggcagattaagaaacagactgcgctggtcgaactggtgaagcacaaaccgaaagccactaaggagcaactcaaagccgtgatggacgacttcgccgccttcgttgagaagtgttgcaaggctgacgataaagagacgtgctttgcggaagaaggcaaaaagctggtggctgcctctcaagccgcacttgggctt

SEQ ID NO: 249337 - DNA, 2007 bp, synthetic construct
  misc_feature 1..2007: note = Description of Artificial Sequence: Synthetic coding sequence
  source 1..2007: mol_type = other DNA
atgaagtgggtttcattcatctcactcctcttcctcttctcttcggcgtacagcgggagcttggacaagagacacggagaaggaactttcacttcagatgtgtcctcgtacctggagggccaagcggctaaagaattcatcgcatggttggttaagggtcgccatggtgagggaactttcacgtccgacgtctcctcgtacctcgaaggccaagccgcgaaggaattcatcgcctggttggtgaagggccgggacgcccataagagcgaggtcgcgcaccggttcaaagatttgggagaagagaacttcaaagccctggtcctcatcgcattcgcccagtacctgcaacagtgcccctttgaagatcatgtaaaactggtgaacgaggtgaccgaatttgctaagacctgcgtggccgatgaatccgctgagaactgtgataagtcgctccacacccttttcggcgacaagctgtgcaccgtggcgaccctccgtgaaacctatggagagatggctgactgctgcgcaaagcaggagcccgaacgcaacgagtgttttctccagcacaaggacgacaatccgaatctccctcgactggtccgccctgaagtcgacgtgatgtgtaccgcgttccatgataacgaagaaacctttctgaagaaatacctctacgaaatcgcccggaggcacccgtacttttacgcgccggaacttctgttctttgctaagcgatataaggcggccttcaccgaatgctgccaagccgccgataaggccgcatgtctcctcccgaagttggacgagttgcgggacgaggggaaggcctcgtcagcgaagcagcggctgaagtgcgcctcgctccagaaatttggagagcgcgcgttcaaggcctgggccgtcgcccgcctctcccaaagattcccaaaggccgaattcgccgaagtttcgaagttggtcacggacctcactaaagtgcacaccgagtgctgtcacggtgatctgctggaatgcgcggatgaccgcgctgacctcgccaagtacatctgcgaaaaccaagactctatctcgtcaaagctcaaggaatgttgcgaaaagccactcctggagaaatcgcactgcatcgcagaggtggaaaacgatgaaatgcccgccgatctcccatccctggcagcggatttcgtggaaagcaaggacgtgtgcaagaattacgcagaggcaaaggacgtgttcctcggaatgttcctgtacgaatacgctcggcgccacccagactactcagtagtcctgctgctgcggctggctaaaacctacgaaactacccttgagaagtgttgcgcggcagctgacccacacgaatgctacgctaaggtgtttgatgagtttaagccactcgtcgaggagccccaaaatctgatcaagcaaaattgcgagctgtttgaacagctgggggaatacaagtttcagaatgcgctgctggtgaggtacaccaagaaggtgccgcaggtgtcaaccccaaccctggtggaagtgtctcggaacctgggaaaggtgggaagcaaatgctgtaaacacccagaagccaagcgcatgccctgcgccgaagattatctgtccgtggtcttgaaccagctgtgcgtgcttcacgagaaaactccggtgtccgaccgggtcaccaagtgttgcactgagagtctggtgaaccgccgcccttgcttctcagcgctggaagtcgatgaaacctacgtccccaaggagttcaacgcagagactttcaccttccatgccgatatatgcaccctgtcggagaaagagcggcagatcaaaaagcagactgcactggtcgaactggtcaagcataagcccaaggccacgaaggaacaactgaaggccgtgatggatgactttgcagctttcgtcgagaaatgctgtaaggcggatgacaaagaaacctgttttgcggaggaaggtaagaagctcgtggcggcctcacaagcagcactgggactt

SEQ ID NO: 249338 - DNA, 2007 bp, synthetic construct
  misc_feature 1..2007: note = Description of Artificial Sequence: Synthetic coding sequence
  source 1..2007: mol_type = other DNA
atgaaatgggtctcctttataagtctgcttttcctgttttcgagtgcttattccggaagtctggataagaggcatggcgaggggactttcactagtgacgttagttcctatctggaggggcaagccgcgaaagaattcatcgcttggctcgttaaaggcaggcacggcgagggcacgtttacctccgacgtttcttcatacctggaggggcaagccgcaaaagaatttattgcctggttggtcaagggacgcgacgctcataagagcgaggttgcccacaggtttaaggatctgggtgaggagaacttcaaggccctcgtgcttatcgcatttgcgcagtacctgcagcagtgcccctttgaggatcacgttaaacttgtgaacgaggtcaccgaatttgctaagacgtgcgttgccgatgagagtgcggagaattgcgataaatccctgcacaccctgtttggtgacaagctatgcaccgtagccacgctgcgcgaaacctacggcgaaatggccgactgttgtgctaaacaggaacctgagaggaacgaatgctttctgcagcacaaggacgataatcctaatctccccagactggtgaggccagaagtggacgtaatgtgtaccgccttccacgacaacgaagaaactttcctgaagaaatacttgtacgagattgcgagacgccacccgtacttttacgcccctgaacttctattctttgcaaaaaggtacaaggcagccttcaccgaatgctgtcaggcagccgacaaagccgcttgcctgctgccaaagctggatgagttgcgagacgaagggaaggcaagcagtgccaagcagaggttaaagtgcgcctcattgcagaagttcggggagcgggctttcaaagcttgggccgtggctcggctgagccagcggtttccaaaggccgagttcgccgaggtgtcgaagttggtcactgacttgactaaagtgcacaccgaatgctgccatggggaccttcttgagtgtgctgacgaccgagctgatcttgccaagtacatctgtgagaaccaagattccatatccagcaagttgaaggaatgttgtgaaaagcccctgctggagaagtctcactgcattgcggaggtggagaatgatgaaatgccggcagatctaccatctctggccgcagacttcgttgaaagtaaggacgtttgcaagaattatgcagaggccaaagacgtcttcctgggtatgtttctgtacgaatatgcccgtaggcatccagattattcagtcgtgctgctattgagactggcaaagacctatgagaccaccctcgagaaatgctgtgcagcagctgatccgcacgaatgctacgcaaaagtctttgatgagtttaaaccactggtagaggagcctcagaatctcattaagcaaaactgcgagctgttcgagcagctcggcgagtacaagttccagaacgccttgttagtgagatacaccaagaaagtcccacaggtgtctacccccactttggttgaggtatctagaaatctaggaaaggtggggtctaagtgttgcaagcatccagaagcaaagagaatgccctgcgccgaggactatctgtctgtggtgctgaatcaactttgcgtgcttcacgagaaaacgcccgttagcgatcgtgtgactaagtgctgcacggagtctctcgtgaatagacggccttgtttcagtgcactcgaagtcgatgaaacatatgtgcctaaggaattcaatgcagaaacctttaccttccacgcggacatctgcaccttgagtgaaaaagagcggcaaattaagaagcagacagccctggtggaactggtgaagcacaagcccaaggcaacaaaggagcagcttaaagccgttatggatgatttcgccgcattcgtggagaaatgctgtaaagccgatgacaaggagacttgttttgccgaggaggggaagaagctcgtcgcagcgtcacaggcggcactggggctc

SEQ ID NO: 249339 - DNA, 2007 bp, synthetic construct
  misc_feature 1..2007: note = Description of Artificial Sequence: Synthetic coding sequence
  source 1..2007: mol_type = other DNA
atgaagtgggtgagctttatatctctattgtttctgttcagtagtgcctacagcggttcattggataaacggcatggcgagggaacatttacttcggatgtctcctcctaccttgagggccaggcggctaaggaatttattgcttggcttgttaaaggtcggcacggagagggcacctttacatctgatgtttcatcatatctggaaggccaggcggccaaggagtttatcgcatggttggtaaagggacgggatgcgcataaatctgaagttgctcataggtttaaagatctcggtgaggagaatttcaaagccctggttctcatcgccttcgcccagtacctacagcagtgtcccttcgaagaccacgtcaagttggtcaacgaagtgactgagtttgctaaaacctgcgtcgcggacgagagcgctgagaactgcgataaaagtctgcacactctgtttggagacaaactgtgtaccgtagccacactgagagagacctatggagagatggccgattgttgtgctaagcaagagcccgaaaggaacgaatgcttccttcagcacaaagacgacaacccaaacctgcctaggcttgttcgcccagaggtggacgttatgtgtacagccttccacgataatgaagagaccttcctcaaaaagtacctttacgaaatagcacgacggcacccgtacttttacgctcccgagctgctgttctttgctaagaggtacaaggccgcatttaccgagtgttgccaggccgctgataaagctgcctgcttactgccaaaactcgacgagttgcgggacgagggcaaggctagcagtgcaaagcagcgcctgaagtgcgcttccctccagaagttcggggagagagcctttaaggcctgggcagtggctcggctcagtcagaggtttccaaaagcagaattcgctgaagtaagtaaactagtaacagacctcaccaaagttcatacagagtgttgtcacggcgatttgctggaatgtgcagatgacagagccgacttggctaagtatatctgtgagaatcaagattccattagtagcaagttgaaagagtgttgcgaaaaacctctgttggaaaagagccactgcatagccgaggtggagaacgatgaaatgcctgcggatctacccagcctagccgccgattttgtggaatccaaagacgtttgtaagaattacgccgaagccaaggacgttttcctgggtatgttcctctatgaatatgccagaaggcatccggattatagcgtggtgctgcttctccgccttgcgaaaacgtacgagacgacccttgaaaaatgctgtgctgctgctgatccacacgaatgttacgccaaagtcttcgacgagtttaagcctctcgtggaagagccccagaaccttatcaaacagaactgcgaactattcgaacaactgggagagtataaattccaaaatgccctcctggtccgatacactaagaaggtaccacaagtaagcactcctacgctggtggaagtctcccgcaacctgggcaaggttggctctaagtgctgcaagcatccagaagcaaagcgaatgccctgtgccgaggactacctgagtgtggtgctgaaccagttatgcgtgctccacgaaaagacgccagtttcagacagagtgactaaatgctgtactgagtcacttgtaaatcggcggccctgtttttcagccctggaggtcgacgaaacatacgtaccgaaggagtttaatgctgagacgttcacctttcacgcggatatctgcactctcagcgaaaaggagcggcagatcaaaaagcaaactgccctggtggaacttgtcaaacataagcccaaggctaccaaagagcagctgaaagccgtaatggatgactttgcagcctttgtggagaaatgctgcaaggcagacgacaaggagacctgtttcgccgaggaagggaaaaagcttgtcgctgcctcacaagccgctcttggatta

SEQ ID NO: 249340 - DNA, 2007 bp, synthetic construct
  misc_feature 1..2007: note = Description of Artificial Sequence: Synthetic coding sequence
  source 1..2007: mol_type = other DNA
atgaagtgggtcagcttcatttctttgcttttccttttcagctctgcatatagtggaagcttggacaaaaggcacggagagggaacatttacctcagatgtttcttcttacctagaagggcaagcggccaaggaattcatcgcctggcttgtaaaaggaaggcacggggagggtacgttcacttccgacgtttcctcctatttggagggtcaggccgctaaagaatttatagcgtggctggtaaaaggaagagacgcgcacaagtcagaagtggcccacagatttaaagatttgggtgaggaaaattttaaggcactggtgctcatcgcctttgctcagtacctccagcaatgtcctttcgaagaccacgtgaaacttgtcaatgaggtgaccgaatttgcaaaaacgtgcgtcgctgacgagagcgcggagaactgcgacaagagcctgcatacactgttcggagataaattatgcaccgttgcgacacttcgcgaaacgtacggggaaatggctgactgttgcgccaagcaggaacctgagcgtaatgaatgctttttgcagcataaggacgacaaccccaacctgcctaggctagtacggcccgaggtggatgtgatgtgtactgcattccacgacaacgaggagacattcctgaaaaaatacctctatgagatcgcaagacgtcatccttacttctacgcccctgaacttctgtttttcgccaaaagatacaaagcggccttcacagagtgttgtcaggctgccgacaaggcagcctgcctccttcccaagcttgacgagctgcgagacgaagggaaagctagctctgccaagcagcgtctgaagtgcgcttcactccagaagtttggagaacgcgcttttaaagcgtgggcagtcgcaagactgtcccagcggtttcccaaagcagaatttgccgaagtgagtaaactggttactgacctcaccaaggttcatacggagtgttgtcacggtgacctcctcgaatgtgcggacgatagggcagatttggcgaagtacatctgcgagaaccaggactcgatttcaagcaaattgaaagagtgctgcgagaaaccacttctcgagaaatcacactgcatcgctgaagtggagaatgacgagatgcccgccgatctgcccagcttggccgccgacttcgtagaatccaaagacgtctgtaaaaactatgccgaggctaaagacgtgtttttagggatgtttctgtatgagtacgcccgcagacacccagattactcagtggttttgttgctgagactcgcaaaaacctacgagactaccctcgaaaagtgctgtgccgccgctgatcctcatgaatgttatgctaaggtcttcgacgagtttaagccgcttgtcgaagaaccccagaatttgatcaagcagaactgcgagctatttgaacagctgggcgagtataagttccagaacgcccttctcgtgcggtatacgaaaaaagtcccacaggtgtcaacgccgactctagtcgaagtgtcacggaacctggggaaggtgggtagtaaatgctgcaagcaccccgaagccaagaggatgccttgtgcagaggactacctgtccgtggtacttaaccagttgtgcgtgctccacgagaaaactcccgtctcagatcgggtgaccaagtgttgtacggaatctttagtcaaccgccgcccctgtttttccgctctggaagtagacgaaacctatgttccaaaagaatttaacgcagagacctttacctttcacgctgacatatgtacccttagcgagaaagaacgtcagattaagaagcagaccgctctggtggaactggtcaaacacaaacctaaggctacaaaggagcaactgaaagcggttatggatgattttgccgctttcgtggagaagtgttgtaaagctgacgataaggaaacgtgctttgccgaagagggcaagaaactagtggccgcgagccaagcagccctcgggtta

SEQ ID NO: 249341 - DNA, 2007 bp, synthetic construct
  misc_feature 1..2007: note = Description of Artificial Sequence: Synthetic coding sequence
  source 1..2007: mol_type = other DNA
atgaaatgggtgtcttttatttcactattatttctgttttcatccgcctatagtggcagtctcgacaaaagacacggagagggaacgttcacttctgacgtgtcttcatacctggagggtcaagcggccaaggaattcatagcttggctggttaagggtcggcacggcgaagggacatttaccagtgacgtcagcagctatttggaaggccaggcagccaaggagtttatcgcctggctggtgaagggccgggacgcccacaagagtgaagtggcccaccggtttaaagacctcggtgaggagaactttaaagccctggtccttatagcgttcgctcagtacttgcaacagtgcccatttgaggaccacgtcaagctggttaatgaggtgacagaatttgctaaaacctgtgtggctgatgagagcgcagagaactgtgataagtcattgcatacgctttttggcgacaagctgtgtacagtggccacattaagggagacgtacggggagatggcggattgctgtgctaaacaggagcctgaacgtaacgagtgctttctccagcataaagatgacaatccaaatctgccccgcttggttaggccagaagtagacgtaatgtgtacagcttttcatgataacgaggagacctttttaaagaagtatctgtacgagattgcgcgtcggcatccgtacttctacgcccctgaactgttatttttcgcaaagagatacaaggctgcctttactgaatgctgccaggccgcagacaaggccgcctgcctgttacccaaattagatgaacttagggatgagggcaaagcctcctcagccaagcagcgcttaaaatgcgcatcattgcagaagtttggcgaaagagcctttaaagcttgggcagtcgctagactaagccagaggtttcccaaagcagaattcgccgaggtgagcaaactcgtcaccgacctgacaaaagtccatacggagtgctgccacggcgatctgctggaatgcgccgacgaccgcgcagacttagcaaaatatatatgtgaaaaccaggactccatctcaagtaaacttaaggagtgctgtgagaaaccactgctcgagaaatcccattgtatcgcagaagtcgagaatgatgaaatgcccgcagacttgccttctctcgccgccgacttcgtagaatcaaaagacgtgtgcaagaattatgctgaagccaaagacgtgtttttaggaatgttcctctatgaatatgcacgccgccatccagactattcagtggtattgctgctgaggctcgccaagacctacgaaaccacactggaaaagtgttgcgccgcagctgacccccacgagtgctacgcaaaagtgttcgacgaatttaagccactggtggaagagccccagaatctcataaaacagaattgcgagctgtttgaacagctgggggagtacaagtttcagaatgctttgctggtacgctacactaaaaaggttccacaggtttctacgccaaccctggttgaggtcagccgtaatctgggaaaagtggggagcaaatgctgcaagcacccagaggcaaagaggatgccctgcgcagaggattatctgtctgtagttctgaaccagctgtgcgtgttgcacgaaaagacacccgtttccgaccgcgtcaccaagtgttgtacggaaagcctggttaatcggcggccatgctttagcgcccttgaagtagatgagacctacgtgcccaaggaattcaacgcagagacatttacattccatgcggatatatgcaccctatccgagaaagaaaggcaaatcaagaagcagacagctttggtcgagttggtgaagcacaagcccaaggccacgaaggagcagttaaaagccgtgatggacgatttcgccgccttcgttgagaagtgttgtaaggctgacgacaaggaaacatgtttcgctgaggaagggaagaagctcgtggcggcttcccaggctgctttgggcctg

SEQ ID NO: 249342 - DNA, 2007 bp, synthetic construct
  misc_feature 1..2007: note = Description of Artificial Sequence: Synthetic coding sequence
  source 1..2007: mol_type = other DNA
atgaagtgggtgagcttcatttcactgctgttcctcttttcctccgcctactcaggatcactggacaagcgccacggagagggtacctttacgtcggatgtctcgagctacctcgagggacaagccgccaaggaatttatcgcctggctggtgaagggccgacatggagagggaaccttcacctccgatgtttcgtcgtatctggaaggtcaagcagctaaggaattcatcgcgtggcttgtcaagggacgggatgctcataaatccgaagtcgcccatagattcaaagacctcggagaggaaaatttcaaggcacttgtgctgatcgccttcgcgcagtacttgcagcagtgtccgttcgaggaccacgtgaaactcgtcaatgaagtgaccgaattcgcgaaaacttgcgtcgccgatgaatcagccgagaattgcgacaagtccctccacaccctgttcggcgacaagctctgtactgtcgcgacccttcgcgaaacttatggtgagatggccgattgctgcgccaaacaagaaccggagcgcaacgagtgcttcctgcagcataaggacgacaaccctaacttgcctagactggtgcggcccgaggtcgatgtcatgtgtaccgcctttcatgataacgaagaaacgttcctgaagaagtacctgtacgaaatcgccagacgccacccgtacttctacgcgcctgaattgctgtttttcgccaagaggtacaaggctgcattcaccgagtgctgccaagcggcggataaggcggcatgtctcctgccgaagttggacgagttgcgggacgaggggaaggccagctcggctaagcagaggctgaagtgcgcatccctccagaaattcggggagagggcatttaaggcttgggcggtggcgcggctctcgcaacgcttcccaaaggcagaatttgcggaagtgtccaagctggtgaccgacctgacgaaggtgcacacggaatgctgccacggggacctcttggaatgcgcagacgaccgggctgatcttgcaaagtacatctgcgagaaccaggatagtatttcatcaaaactgaaagagtgctgcgagaagcccctgctggaaaaatcccactgcatcgccgaagtcgaaaacgatgaaatgccagcagacctcccatcgctcgccgccgactttgtcgaaagcaaggacgtgtgtaagaactacgcggaggccaaggatgtgttcctgggcatgttcctttacgagtacgcgcggagacacccggactacagcgtggtgctcctgctgagactggctaaaacttacgaaaccactctggagaagtgctgcgccgctgcggacccgcatgagtgctacgccaaggtgttcgatgagttcaagccgctggtggaggaaccgcaaaacctgatcaaacaaaactgcgagctgtttgaacagctcggagaatacaagtttcaaaacgcactcctggtccgctataccaagaaagtccctcaggtgagcaccccgaccttggtggaggttagccgcaatctcggaaaagttggcagcaagtgttgtaaacacccagaagcgaagcggatgccatgcgccgaggattacctgtctgtggtgctgaatcagctttgcgtgctccacgaaaaaactcccgtctccgatcgcgtcactaagtgttgcactgaatcgctggtgaatcgccgtccatgcttctcggccctggaggtggacgagacttacgtgccgaaagaatttaacgcagaaactttcaccttccacgcggacatctgtactttgtcagagaaagagcggcagatcaagaagcagactgccctcgtggaactggtgaaacataagcctaaggctaccaaggagcagctgaaggctgtgatggacgacttcgccgccttcgtggaaaaatgctgcaaggccgatgacaaggaaacttgtttcgccgaagaaggcaaaaagctcgtagcagcttcgcaggcagctctgggactt

SEQ ID NO: 249343 - DNA, 2007 bp, synthetic construct
  misc_feature 1..2007: note = Description of Artificial Sequence: Synthetic coding sequence
  source 1..2007: mol_type = other DNA
atgaaatgggtgagctttatctcgctccttttcctgttttccagcgcatatagtggctctctggataagcgtcacggggagggcactttcactagtgacgtgtctagttacctagaaggacaagcagctaaggaatttattgcatggctggtgaagggtagacatggtgagggcactttcacctccgacgtgtcaagctacctcgaggggcaagcagccaaggagttcatagcttggttggtaaaaggaagggacgcacataaatcagaagtggcccatagattcaaagacctgggagaggagaattttaaggccttagtgctgatcgcttttgctcagtacctgcaacagtgtccgtttgaggaccacgtaaaactcgtgaacgaagttaccgagttcgcaaagacatgtgtggctgacgagagcgccgagaattgtgataaatcgttacacacactgttcggtgacaagctgtgtacggttgccacactccgggagacttatggcgagatggccgactgctgcgcaaaacaggagcccgagcggaacgagtgctttctccagcataaggacgacaaccctaacctgcctcggctagttaggcctgaggtggatgtcatgtgtacagccttccacgataatgaggaaacattcctcaagaagtacctgtacgagatcgcgcggcggcatccctacttttatgccccagagctgctgttcttcgctaaacggtataaagccgcattcacagagtgttgtcaagccgctgataaagccgcttgcctcctgccaaagctggatgaactgcgggatgaaggaaaggcctccagcgctaagcagcgactgaagtgcgctagtctgcaaaagtttggggaaagagcgttcaaggcctgggccgtggctagactgtcccagcgtttcccgaaagccgagtttgcagaggtctcaaagctggtaactgacctgactaaagtccacacagagtgttgtcacggggatctgttggaatgtgccgatgatcgcgcagacctcgccaagtacatttgcgagaaccaggattcaattagttccaaactcaaagaatgctgcgagaagccacttctcgagaagagccattgtatcgccgaggtggagaatgacgagatgcccgccgatctgccttcattggctgctgacttcgttgagtcaaaggacgtctgcaagaactatgcagaggccaaagatgtgtttctgggcatgtttctgtatgaatacgcccgccgccacccagactactccgtcgtcctgttgctgcggcttgccaagacttatgaaaccaccttggagaagtgctgcgccgccgctgatccccacgagtgttacgcaaaagtgttcgacgaattcaagcctctggtggaagagcctcagaacctaattaagcagaactgtgaactgtttgaacagcttggcgaatacaaatttcagaacgccctgcttgttaggtacactaaaaaagtgccccaggtgtccacccccaccctggtcgaggtgtcacggaacctgggaaaggtggggtccaagtgctgtaagcaccctgaggctaagaggatgccgtgtgcagaggattacttgtcagtggtgctgaaccagctgtgcgtgctgcatgaaaagacaccagtgtccgatcgcgtcactaaatgttgcactgaatccctggtcaaccgacggccttgcttcagtgccctggaagtggatgagacctatgtgcccaaggagtttaatgccgaaacatttacctttcacgcagacatttgcaccttgagtgaaaaggagaggcagatcaaaaagcaaacagctctcgttgagcttgtgaagcacaagcctaaagccactaaggaacaattgaaggccgtcatggatgattttgccgctttcgtggagaagtgctgcaaggcagacgacaaagaaacgtgttttgccgaagaggggaagaaactcgtcgcggcctcccaggccgcgttggggctt

SEQ ID NO: 249344 - DNA, 2007 bp, synthetic construct
  misc_feature 1..2007: note = Description of Artificial Sequence: Synthetic coding sequence
  source 1..2007: mol_type = other DNA
atgaaatgggtctctttcatttcgcttctatttctcttttcatctgcatatagtggatccctcgataagaggcatggggaaggaacatttactagtgacgtcagttcctatctggaaggacaggctgctaaagagttcatcgcatggctcgtaaagggacgccatggagaagggactttcacaagtgatgtgtcctcatacctggaaggacaggcagccaaagaatttatagcctggcttgtgaaaggaagagatgcacataaatccgaagttgctcacagatttaaagatttaggagaagaaaattttaaagcccttgttctcattgcctttgctcagtatctccagcagtgcccctttgaagaccatgtcaagcttgtgaacgaagtgactgaattcgcaaaaacttgtgtggccgatgaatcagcagaaaattgcgacaaatccctccatacactattcggggataaactgtgtactgtggcaactcttagggaaacatatggggaaatggccgattgctgtgccaagcaggaaccagaacgcaatgaatgttttttacagcataaagatgataatcctaacctaccgaggctggttcgacccgaagttgacgtcatgtgcacagctttccacgataacgaagagactttccttaaaaaatacttgtatgagattgccaggagacatccttatttctacgcccctgaactcctctttttcgctaaacgctataaagctgctttcactgaatgttgtcaggcagccgataaagctgcgtgtctcttgcctaaactcgatgaactacgggatgaaggaaaagcctcctcagcaaagcagcggctcaaatgcgcatctctgcagaaatttggggaacgcgcctttaaggcttgggctgtcgctagactctctcagcggttcccaaaagcagaatttgctgaagtgtcaaaactagtgacagatctaactaaggtgcacactgaatgttgtcacggagatctgctggaatgcgcagatgatagagcagatcttgctaaatacatatgtgagaatcaggactccatatcatctaaactgaaagaatgttgtgaaaaaccattattggaaaaaagtcactgcatagccgaagtggagaatgatgaaatgcctgctgatctcccttcgctcgccgccgatttcgtggaatccaaagatgtttgtaaaaattatgccgaggccaaagatgtgttcctaggaatgtttttgtacgaatatgctaggcggcatcccgattattcagtggtactgctactacggctcgcaaaaacttatgaaactactctggaaaagtgttgtgccgccgccgacccgcatgagtgttacgctaaagtattcgacgaattcaaacccctcgtcgaagaaccacagaacctcatcaaacaaaactgcgagctgtttgagcagttaggggaatacaagtttcagaacgcactgctggttcgatacacaaagaaagtaccacaggtaagtacgcccacactggtggaggtgtctcggaacttagggaaagttggatctaagtgctgtaaacaccccgaggcgaaacgaatgccatgcgcagaagactatctctcagtagtgctcaaccagctttgtgtgttacatgaaaaaactcccgtatcagatagagttacaaagtgttgcacagaaagtctcgtgaaccgccgcccctgcttctccgcgctggaagtggatgaaacttatgtgcccaaagagttcaacgctgaaacatttacttttcatgctgatatctgtacactttctgaaaaagaacgacagataaaaaaacaaacagccctagtggagttagttaaacataaaccgaaggcaactaaagaacagcttaaagcagtgatggatgattttgctgcctttgtggaaaagtgctgcaaagccgacgataaggaaacatgtttcgccgaagaagggaagaaactcgtggccgccagtcaggcagcccttggactc

SEQ ID NO: 249345 - DNA, 2007 bp, synthetic construct
  misc_feature 1..2007: note = Description of Artificial Sequence: Synthetic coding sequence
  source 1..2007: mol_type = other DNA
atgaagtgggtgtccttcatcagcctcctcttcctgttctcatcggcttactcaggatccctggacaagagacacggagaaggaaccttcacctcggatgtgtcctcctacctcgaaggacaagccgccaaagagttcatagcctggctcgtcaaaggacggcacggtgagggtacctttacgagcgacgtgtcctcttacctggagggacaagcagccaaggaattcatcgcatggttggtgaaggggcgcgacgcacataaaagcgaagttgcccaccggttcaaggatctgggcgaagaaaacttcaaggccctggtcttgatcgctttcgcgcaatacctccagcagtgtccgtttgaggaccacgttaagctggtcaatgaagtgactgagttcgcaaagacctgtgtggcggacgagtcggccgagaattgcgataagtcattgcataccctcttcggggacaagctgtgcaccgtggcaacgctgagagagacttatggagaaatggcggactgctgcgctaaacaggaacctgaaagaaacgagtgcttcctgcaacataaagacgacaatccgaatctgccacggctggtgaggccagaagtggatgtgatgtgcactgccttccatgacaacgaggaaaccttcctcaagaagtacctctacgagatcgcgaggcgccatccatacttctatgcgccggagttgctgttcttcgctaagcggtacaaggcagccttcactgagtgctgccaggccgctgacaaagcggcctgcctgcttcccaagctcgacgaactgcgagatgagggaaaggccagcagcgcgaaacagaggttgaaatgtgccagcctccaaaagtttggcgaacgcgctttcaaagcgtgggcggtggcccgcctctcccaacggttcccgaaggcggaattcgccgaagtgtcgaaacttgtgactgatcttacgaaagtccacaccgaatgctgtcatggtgatctgctggagtgcgccgacgacagggcagatctggcaaagtacatctgcgagaaccaagactccatctcaagcaaactgaaagaatgctgcgaaaaacctctcctcgaaaaatcccattgtatcgccgaggtggagaatgacgaaatgccggctgacctgccgagcctggcagcagattttgtggagagcaaggatgtttgcaagaattacgcagaagcgaaagacgttttcctcggtatgttcctgtacgagtacgcacggcgccatccagattactcagtggttctgctgctgcgcttggccaaaacctacgaaaccaccttggaaaagtgctgtgcagcggccgatccacacgagtgctacgctaaggtgtttgacgagttcaagccgctcgtggaggaaccccagaacctgattaagcagaactgcgaattgtttgagcaactgggagaatacaagttccagaacgcattgcttgtccgctacactaagaaggtaccgcaggtgtcgactcctaccctggtggaagtgtccaggaacctgggaaaggtgggctccaagtgctgcaaacacccggaggccaagcggatgccgtgcgccgaagattacctgtcggtggtactgaaccagctgtgtgtcctgcacgagaaaactcctgtgagcgatcgcgtcaccaagtgttgcactgagtccctggtgaacagacggccgtgttttagcgccctcgaggtggacgaaacctacgtcccgaaggagttcaacgccgagactttcactttccacgccgatatctgcaccctgagcgaaaaggaacgccagatcaagaaacagacggccctggtggaactggtcaagcacaagcccaaggcgactaaggagcagttgaaggcggtcatggacgattttgcagccttcgtcgagaagtgctgtaaagctgacgacaaggaaacctgcttcgccgaggaaggaaagaagctcgtagccgcctcgcaggccgccctcggattg

SEQ ID NO: 249346 - DNA, 2007 bp, synthetic construct
  misc_feature 1..2007: note = Description of Artificial Sequence: Synthetic coding sequence
  source 1..2007: mol_type = other DNA
atgaagtgggtgagttttattagtctgctcttccttttctcctccgcatactctggctcgctcgacaagaggcatggtgaagggacttttacttctgatgtctcttcctacctcgaaggccaggcggccaaggagtttattgcctggctagtaaaggggagacacggggaaggaacatttacaagcgacgtgagcagctaccttgagggtcaggcagccaaagagtttatagcttggttggtcaagggaagggatgcccacaagagcgaagtggcacaccgatttaaagatctgggagaggaaaactttaaggccctcgtcctgatagcttttgcgcagtacctgcagcagtgcccctttgaggatcacgttaaactggttaacgaggttacagagtttgctaagacctgcgtggctgatgagtccgcagaaaactgtgataagtctttgcatacccttttcggcgacaaactgtgtacagttgccactctcagggagacttacggggaaatggctgattgttgtgccaaacaagaaccagagcggaatgagtgttttctgcaacacaaggatgataatcccaatcttcctcggcttgttcgacctgaggtcgacgtaatgtgcacggctttccacgacaacgaggagactttccttaagaaatacctgtacgagattgcacggaggcatccctatttctacgcacccgagctgttattttttgccaaacgctacaaggctgcattcacagaatgctgtcaggcagccgataaagcggcctgcttgttgccaaaactggatgagctgcgtgacgaaggaaaggcgtcttctgccaagcagagactgaagtgcgcgagcttacagaaatttggggaaagagcgtttaaagcgtgggccgtggcccgtcttagtcagcgatttcccaaggcagagttcgccgaggtgagcaagttagttacagatcttaccaaagttcacaccgagtgttgccacggcgatcttttggaatgcgccgacgacagggccgatctggccaagtatatttgcgaaaaccaggattccatttcatctaagttaaaggagtgttgcgaaaagccactgttagagaagtcacactgcatcgccgaagtcgagaacgatgaaatgcccgcggatctgccgagcctggccgcagatttcgtcgaatctaaggacgtctgcaagaattacgcagaagcgaaagatgtgttcctgggaatgtttctctacgagtacgcccggcgccacccagattatagcgtggtgttgctccttcggctggcaaaaacctatgagacaacattggagaaatgctgtgctgccgcagacccacatgaatgctacgccaaagtgtttgacgagtttaagccgttggtagaagagccccagaacctcattaagcaaaactgtgagctgttcgagcagttgggagaatacaagttccagaacgcactgttagttcgctacacaaaaaaagtccctcaggtgtccaccccaacgctcgtcgaggtttcacggaacctcggtaaggttggcagcaagtgttgtaaacaccctgaggcaaaaaggatgccttgtgcagaggattatttgtcagtggtgctgaaccagttgtgcgtcctgcacgaaaagacgcctgtgtccgacagagttaccaagtgctgtacagagtctctggtcaaccgtagaccctgtttctctgcgttggaggttgatgagacatacgtgcccaaggaattcaacgctgagacattcacgtttcatgccgacatttgcaccctgagcgagaaggagcgacagatcaagaagcagacagcattggtagaactcgttaagcataagcccaaggctacaaaggaacagctgaaggcggtaatggacgacttcgccgcattcgtggaaaagtgttgcaaagccgatgataaggaaacttgcttcgccgaggagggaaaaaagcttgttgcagcatcacaggcagcactggggctc

SEQ ID NO: 249347 - DNA, 2007 bp, synthetic construct
  misc_feature 1..2007: note = Description of Artificial Sequence: Synthetic coding sequence
  source 1..2007: mol_type = other DNA
atgaagtgggtctcttttattagtctcctgttcctgttctcttccgcctatagcgggtcattagataaaagacacggggagggcacatttacgtcagacgtgagctcatacctcgaaggccaggccgcgaaagagttcatagcttggcttgtgaagggccggcacggggaaggaacgtttaccagcgacgtgtcttcttacctagaagggcaagccgcaaaagagtttatcgcctggcttgttaagggaagggacgcacataaatcagaggtggcgcatagatttaaggatttgggcgaagaaaacttcaaagctcttgttctcattgcctttgcacagtaccttcagcagtgtcccttcgaagatcacgtcaagctggttaacgaagtgaccgaattcgccaaaacttgtgtggctgatgagtcagccgagaattgtgacaaatccctgcacactttgttcggagataagttgtgtacagtagccactttgcgagagacatacggtgaaatggcggactgctgcgccaaacaagaacctgagagaaacgaatgcttccttcaacacaaagatgacaaccctaacctgccaagactggtgcggcccgaagttgatgtaatgtgtaccgctttccacgataatgaggagactttcctaaagaagtatctgtatgaaatcgccagaaggcacccctacttctatgcgccagaactgctgtttttcgccaagcggtataaagcagcgttcacagaatgctgtcaagccgccgacaaagcggcctgcctcttgcctaagttggacgaactgagagatgaaggtaaggcctcaagcgctaagcaaaggctaaaatgtgccagcctacaaaagtttggcgaaagagcctttaaggcatgggctgtcgctcgcttgtcccagcgattcccaaaggcagaatttgccgaggtatctaaactggtcactgaccttacgaaggtgcatacggagtgctgccatggagatcttctagaatgtgccgacgaccgcgcagatttggctaagtatatctgtgaaaaccaggacagcatctcctcaaagcttaaagagtgctgcgagaaaccactgctggagaagtctcactgcatcgctgaagtggaaaatgacgagatgcctgctgacctgcccagccttgccgctgattttgtagaatccaaagacgtgtgcaaaaattacgctgaagccaaggacgtgttcttgggaatgttcctctacgagtacgcccggcggcatcctgattactctgtggtccttcttctgcgccttgcgaaaacatacgaaacgacattagaaaaatgctgcgcggctgctgacccccacgaatgctacgccaaggtgttcgatgagttcaagccgttggtggaggaaccacaaaacctcataaaacagaattgcgagctctttgaacagttgggcgagtacaaattccagaacgcgttgctggtcaggtacaccaaaaaagtcccccaggtgtccactcccacactggtggaagttagtcgaaacctgggcaaagtcggatccaagtgttgcaaacatcccgaggccaaacgtatgccttgtgctgaagattacttgagtgtcgttctgaaccaactttgcgtcctgcacgagaagaccccggtttcggacagagtgaccaagtgttgcactgaaagcctggtcaaccgccgtccttgtttctctgcattagaggtggacgagacttatgttccaaaggaattcaacgcggagacgtttaccttccatgcagacatttgtactcttagcgagaaagagcgtcaaatcaagaagcagacagctttagtggagctcgtgaaacacaaaccaaaggccacaaaggagcagcttaaggctgtgatggacgacttcgccgccttcgttgaaaaatgctgcaaagcagacgataaagagacctgtttcgcagaagaaggaaagaaactcgtcgccgcttcacaggcagccctgggattg

SEQ ID NO: 249348 - DNA, 2007 bp, synthetic construct
  misc_feature 1..2007: note = Description of Artificial Sequence: Synthetic coding sequence
  source 1..2007: mol_type = other DNA
atgaaatgggtgtcatttatctcactgttgttcctgttcagctctgcgtattcaggttctctcgacaaacgccacggtgagggcaccttcacgtcagatgttagttcttacttggaggggcaggccgctaaagagtttatagcgtggctggtcaaagggagacacggggaggggactttcacttctgacgtgtccagttatttggaagggcaagcagcgaaggagtttatcgcttggctggtgaagggcagagacgcacataaatctgaggtcgcacacaggttcaaggacctgggagaggagaatttcaaggccctggtactgatagccttcgcccagtatcttcagcagtgtccctttgaggaccatgttaaactggtgaacgaggtgaccgagttcgcaaaaacgtgcgtggcagacgagtctgccgaaaattgtgataagtctctgcacaccttgtttggcgacaagctctgtaccgtggccacattgagagaaacttacggtgagatggctgactgttgtgccaagcaggaaccagaaaggaatgaatgctttctccagcataaggatgataaccctaatttgcctagactggtgcggccggaggttgatgtcatgtgcacagcatttcacgacaatgaagagactttcctgaaaaaatatctgtacgaaattgcaagacggcatccctatttctatgctcccgagctgctctttttcgctaaacggtacaaagccgccttcacagaatgctgccaggctgcggataaggccgcatgcctcttgccgaagctcgatgagttgagggacgaagggaaagctagttcagccaaacagcgactgaagtgtgctagcctccaaaaatttggcgagagagcttttaaggcttgggcggttgctcgactgagccaaaggtttccgaaggcggagtttgcagaggtgtccaagctcgtgactgaccttaccaaagtgcacacagaatgctgccatggcgatttgctcgagtgtgccgacgacagggccgacctggctaagtacatctgtgagaatcaggactctattagctcaaagctcaaggaatgctgtgagaaaccactgctcgagaagagccattgcatcgcagaggtggagaatgatgagatgcccgccgatctccccagtcttgcggccgattttgtggagtccaaggacgtgtgcaagaactacgcagaggccaaggatgtgttcctgggaatgttcctctacgagtatgccagacggcatccagattacagcgtagtcttgcttcttcggctcgcgaagacatatgagaccaccctcgaaaagtgttgcgccgctgcagaccctcatgagtgttatgctaaggtcttcgatgaattcaagccactggtggaagagcctcagaacctgatcaaacagaattgcgagctgttcgaacagctgggggagtataaatttcagaacgccctgctggtccgatataccaaaaaggtgccgcaggtttccactccaactttggtcgaagtttcacggaaccttggaaaggtgggtagcaaatgctgtaagcatcccgaggcgaagagaatgccctgcgctgaggactatctgtctgttgttctcaaccaactttgcgtactgcatgagaagacccctgtctctgatagggtcacaaagtgttgcaccgagtctctcgtcaatcgaaggccatgtttcagcgcactggaggttgacgaaacctacgtcccgaaggaatttaatgcggagaccttcacatttcatgcagacatttgcaccttgtcagagaaggagcggcagattaagaaacagaccgctctggttgaactcgtgaaacacaaacctaaggccactaaagagcagctcaaagccgtcatggacgatttcgctgcttttgttgaaaagtgctgtaaggccgatgacaaggaaacatgcttcgctgaggaagggaagaaattggtggccgcctctcaggccgcactgggactg

SEQ ID NO: 249349 - DNA, 2007 bp, synthetic construct
  misc_feature 1..2007: note = Description of Artificial Sequence: Synthetic coding sequence
  source 1..2007: mol_type = other DNA
atgaaatgggtaagcttcatctctcttctgtttctgttcagctctgcgtattccggttctctcgataagagacacggcgaggggactttcacttctgatgtgtcttcctatctcgagggccaagctgccaaggagtttatcgcttggctggtgaaaggccgccacggagaaggtacctttacctccgacgtgtcatcttacttggaaggacaagctgcgaaggagttcatcgcatggctggtgaaaggaagggacgcacacaagtcggaggtggcccaccggttcaaagaccttggagaggaaaacttcaaggccctagtcctgatcgcgttcgcccagtatctgcagcagtgtcccttcgaagaccacgtgaagttggtcaacgaggtgacagagtttgccaagacttgcgtggcggatgagtccgccgaaaactgtgacaaatctttgcacacactgttcggagataagttgtgtaccgtggcaacactacgggaaacatatggtgagatggcggactgctgcgcaaagcaggaacctgagagaaacgagtgttttctgcagcataaggatgataaccctaatctgcccaggcttgtcagacctgaagtggacgtaatgtgtaccgcttttcacgacaacgaggagacattcctgaaaaagtacttgtacgaaatcgccagacgccatccctacttttacgcccctgagcttctctttttcgccaagcggtataaggccgcctttaccgagtgttgtcaggcagcggataaggcagcttgcctcttgcctaagttggacgaactccgagacgaaggcaaagccagctcagctaaacagagactcaagtgcgcctcattgcagaagtttggagagcgagctttcaaagcttgggcagtcgcacgcttgagccagcgctttcccaaggctgagtttgccgaagtgagcaagctggttacagatcttactaaggtgcacactgagtgctgccacggagatctcctagaatgcgctgacgaccgggctgatctggccaagtacatttgcgagaaccaagactctattagctcgaagctaaaggaatgctgtgaaaagcctctcttggagaaaagccactgtattgcagaagtggaaaacgatgagatgccggctgacctgccctccctcgcagccgactttgttgagagtaaggatgtctgtaagaattacgcagaggcaaaagacgtgttcctcgggatgttcctttatgagtacgcgcggaggcaccctgactattccgtggtcctcctgctgcgactggctaagacttacgaaacaactctcgagaagtgctgcgcagccgctgacccacacgaatgctacgctaaggtcttcgatgagtttaagcctctcgtggaggagccacagaatcttatcaaacaaaactgtgaactgtttgagcagctgggagaatacaaattccaaaacgcacttctagttagatatacaaaaaaagtgccccaggtgtcaacccccacgctcgtggaggtcagcaggaacctaggcaaggtcggaagcaagtgttgcaagcatcctgaagccaagcgaatgccctgtgcggaggactatttaagtgtggtgctgaaccagctgtgtgttctccatgagaaaacacctgtgagcgatagggtcacaaaatgctgcaccgagtctttagttaaccggcggccttgcttttccgcgttagaggtcgatgagacatacgtccccaaagaattcaacgcagaaacttttacatttcacgccgatatatgtactctttctgagaaggaacggcaaatcaaaaagcaaacggctttggtcgagttggttaagcacaagccaaaggccacaaaggaacaactgaaggccgttatggacgattttgccgctttcgtggagaagtgctgtaaggctgatgataaggagacgtgcttcgccgaagaaggaaagaaattggtggctgcttctcaggctgctctggggctg

SEQ ID NO: 249350 - DNA, 2007 bp, synthetic construct
  misc_feature 1..2007: note = Description of Artificial Sequence: Synthetic coding sequence
  source 1..2007: mol_type = other DNA
atgaagtgggtgtcctttattagcctgctgtttttattcagctccgcctattccggtagtttggacaagcgacatggagaggggactttcacttcggatgtgtccagttacctagagggacaagccgcaaaggagtttatcgcttggcttgtcaagggacgtcatggcgaaggcacgttcacctccgatgtctcttcgtacctggaaggtcaggcggccaaagagtttattgcttggctcgtgaagggacgtgatgcgcataagagtgaagtcgcgcataggttcaaggatttgggagaggaaaactttaaagcactggtcctcatcgcgttcgcccagtacttgcagcaatgtcccttcgaagatcatgtcaaactcgtgaatgaggtcacggaatttgctaaaacttgtgtggccgacgagagcgccgagaattgcgacaaaagcttgcacaccttgtttggagacaaactttgtaccgtggctaccttacgcgagacttacggggaaatggcggactgctgcgcgaagcaagagcctgagcgaaatgagtgcttcctgcagcacaaggatgataaccccaacttgccccgtctagtccgccccgaggtcgatgtcatgtgcacggcttttcacgacaacgaagagaccttcctgaagaagtacctgtatgaaatcgcccggcgccacccctatttctacgctcctgaactgctctttttcgccaagcgatacaaggcggcattcaccgagtgctgtcaggcagctgacaaagcggcatgccttctacccaaactcgacgagctccgtgatgaggggaaggcatcctcagccaagcagcggttaaagtgcgcgagcctgcagaaattcggagagagggcatttaaggcctgggctgtcgcgcgcctctcacagcgctttcccaaggccgagtttgccgaggtatcaaagctcgttacagacctcaccaaggtacataccgagtgctgccacggagacttgctggagtgtgcggacgatcgcgcagacctggccaagtatatctgcgagaatcaggatagtatttcttcgaagcttaaggagtgctgcgagaaaccccttctcgagaaatcgcactgcatcgccgaagttgagaacgacgaaatgcctgccgatcttccaagcctggccgccgacttcgtcgagtcgaaggatgtgtgtaaaaactacgcagaagctaaggatgtctttctcgggatgttcctgtacgaatacgcccgtcgacaccccgattactcggttgtgttgctactccgtctcgccaagacgtatgagacaacgctggagaaatgctgcgcagccgcagacccacacgagtgctacgcgaaagtcttcgatgaatttaagcctctggtcgaggagccacaaaatttgataaagcaaaactgtgaactgttcgaacagttaggcgagtataagtttcagaacgcactcctggtccggtacacaaaaaaggtcccacaagtgtccaccccaactctagtggaggtgtcacgtaaccttggcaaggtgggaagcaagtgttgcaaacatccggaggcgaagcgtatgccgtgcgccgaggattacttgtccgtcgttctgaatcagctatgtgtgctgcatgaaaagactccggtttctgatcgggttacgaagtgttgtactgagagcctggtcaatcggcgcccgtgtttcagcgcactggaggttgatgagacttacgtacccaaggagttcaacgcagagacattcaccttccacgcggatatctgtaccttgtccgagaaggagaggcaaatcaagaagcagactgccctcgttgagcttgtgaagcataagcctaaggcaactaaagagcagctgaaggcagtgatggatgattttgctgctttcgtcgagaagtgctgcaaggccgacgacaaggaaacctgtttcgctgaggagggaaagaaactcgtggccgccagccaggccgcgctgggccta

SEQ ID NO: 249351 - DNA, 2007 bp, synthetic construct
  misc_feature 1..2007: note = Description of Artificial Sequence: Synthetic coding sequence
  source 1..2007: mol_type = other DNA
atgaaatgggtgtcgtttatctcgctcctctttctgtttagcagcgcatactcgggaagcctggataagagacacggtgagggaactttcaccagcgacgtgtcctcatatctggaaggacaggctgccaaggagttcatcgcctggctggtcaagggccggcatggtgaaggaacttttacctcagatgtctcctcttacctggaaggccaggccgcgaaggagtttatcgcgtggctcgtgaagggacgcgatgcccacaaatccgaggtggcccaccggtttaaggacctgggagaagaaaacttcaaggcgctcgtgctcatcgcattcgcacagtacctgcaacagtgcccattcgaggaccacgtgaagttggtgaacgaagtcaccgaatttgctaagacgtgcgtcgccgatgagtcagccgaaaactgcgacaagtcactgcataccctgttcggagacaagctgtgcactgtggcgactcttagggaaacgtacggagagatggcggactgctgtgccaagcaagaaccggagagaaacgagtgctttctgcaacacaaggatgacaaccctaaccttccgagactggtaagaccggaagtcgatgtgatgtgcaccgcgttccacgacaacgaggaaaccttcctgaagaagtacctctacgaaatcgcgcgcagacacccgtatttctacgcacctgaactgctgttcttcgcaaagcggtacaaagctgcatttaccgaatgctgccaggccgccgacaaagccgcatgcctgttgccgaagctggatgaactcagagacgaaggcaaggcgtcctccgctaagcagcgcctgaaatgcgcgtcacttcaaaagttcggcgagcgcgcctttaaagcgtgggcagtggcccgcctgtcacagagattcccgaaggcagaattcgcggaggtgagcaaactcgtgaccgacctgactaaggtgcatacggagtgctgccacggcgatcttctggagtgtgctgacgaccgcgcggatctcgcaaagtacatctgcgagaaccaggattcgatctcgagcaaactgaaggaatgctgtgagaagccgctgctggaaaagtctcactgcatcgctgaagtggagaacgacgaaatgccggcagacctgccatcccttgctgctgacttcgtggagtcaaaggacgtctgtaagaattatgcagaggcaaaggacgttttcctgggaatgtttctctacgaatacgcacggcggcatccggactacagcgtggtgctgctgttgcgcctggctaagacttacgaaacgacccttgagaagtgttgtgcggcagcggacccgcatgaatgctacgcgaaagtgttcgacgaattcaaaccgttggtggaagagccacaaaatctgatcaagcaaaactgtgagctttttgaacagctcggggagtacaagttccagaacgccctcctcgtcagatacactaagaaagtgccccaggtgtccactccaaccctggttgaggtgtccaggaaccttggaaaagtgggatcaaagtgctgtaaacaccctgaagcaaaacgcatgccgtgcgccgaagattacctgtccgtggtgcttaaccagctgtgcgtgctccatgagaaaacccccgtgtccgatagggtcaccaagtgctgcactgaatcgctcgtgaacaggcgcccttgcttcagcgcgctggaagtcgatgaaacctatgtgcctaaggaattcaacgctgaaacctttactttccacgcagacatctgtaccctgagcgaaaaggagagacaaatcaagaagcaaaccgctttggtggagctcgtgaagcacaagccgaaggccacgaaggaacaactgaaggccgtgatggacgacttcgccgccttcgtggagaaatgttgtaaagcggacgataaggagacttgcttcgccgaggaaggcaaaaaactcgtggcggcgtcccaagccgcgcttggtttg

SEQ ID NO: 249352 - DNA, 2007 bp, synthetic construct
  misc_feature 1..2007: note = Description of Artificial Sequence: Synthetic coding sequence
  source 1..2007: mol_type = other DNA
atgaagtgggtgtcgttcatatctctcctttttcttttttcgtcagcctactcgggaagccttgataagcgccacggagagggtacctttactagcgatgtgtcctcctatctcgaaggtcaagcagcaaaggaattcattgcatggctggtcaagggacgccatggtgaaggtactttcacttcggacgtctcctcctaccttgaaggacaggccgcaaaggagttcatcgcctggcttgtcaaaggaagagacgcgcataagagcgaagtcgcacatcgctttaaggatctgggcgaagaaaactttaaggcacttgtgcttattgcatttgctcagtacctccagcagtgtccatttgaggaccacgtgaagctggtgaacgaggtgaccgaatttgcaaagacttgtgtggcagatgaatcagcagaaaattgtgacaagtcactccatactctgtttggagacaagctgtgcaccgtggctactctgcgggagacttacggagagatggcagattgctgcgcaaagcaggaacccgaacgcaacgaatgtttcctgcaacataaagacgataatccgaatctgccccggcttgtgcggcctgaagtcgatgtcatgtgcactgctttccacgataacgaggaaacctttttgaagaagtatctttacgagatagccagaaggcacccttacttttacgctcctgaattgctcttctttgccaagaggtacaaggcagcattcacggagtgctgtcaagcagcagataaagcagcttgtctgctccctaaacttgacgaactgcgtgacgaaggtaaagcctcctccgcaaagcaaaggcttaagtgcgcaagcctgcagaaatttggagagcgggcatttaaggcatgggcagtggcaagactttcgcaaagattccctaaggccgaatttgctgaagtgtcaaagctggtgaccgatctcaccaaggtccacaccgaatgttgccacggcgaccttctggaatgtgcagatgatcgggcagaccttgccaaatacatttgtgaaaatcaggatagcattagctccaagctcaaagaatgctgtgaaaagcctcttctggaaaagtcgcattgtatcgcagaagtggaaaatgatgagatgcctgcagatctgccttccttggcggcagattttgtggagagcaaggatgtgtgtaagaattacgcggaggcaaaggatgtgttcctgggtatgtttctctatgagtacgcaaggagacacccagattactccgtcgtcctgctgcttagactggctaagacttatgaaacgaccctggaaaaatgttgtgcagcagcagatccacatgagtgctacgccaaggtgtttgacgaattcaagccgctggtggaggaaccacagaatttgattaagcaaaactgcgaactgtttgaacagctgggagaatacaaattccaaaatgctcttcttgtgcggtatacgaagaaagtgccgcaagtgtcgactccgactctcgtcgaggtgagcaggaatcttggaaaggtggggagcaagtgctgtaagcaccccgaagcaaagagaatgccatgtgcggaggactatctctcggtggtgcttaaccagctgtgtgtcctgcatgagaaaaccccagtgtcagatcgggtcaccaagtgttgtactgagagccttgtgaatcgacgtccttgcttttcagcattggaggtcgatgagacttacgtgccaaaagaattcaacgcagaaacctttacgttccatgcagacatctgtactctgagcgagaaggaacgccaaatcaaaaagcaaaccgccctggtcgagctcgtgaaacacaagcctaaggcaactaaggagcagcttaaggccgtgatggatgattttgcagcattcgtggaaaagtgttgtaaggcagatgacaaggaaacttgttttgcagaggagggcaaaaagctggttgcagcaagccaggccgcactggggctg

SEQ ID NO: 249353 - DNA, 2007 bp, synthetic construct
  misc_feature 1..2007: note = Description of Artificial Sequence: Synthetic coding sequence
  source 1..2007: mol_type = other DNA
atgaagtgggttagctttattagcctgctttttctgttttcatctgcttactccgggagtctagacaaacggcacggagaaggaacatttacaagtgacgtttcaagctatctcgagggacaggccgccaaggagttcatcgcatggcttgtgaagggacgtcacggagaaggtaccttcacttctgatgtgagctcctacctggagggccaggcggcaaaagagtttatcgcatggttggttaaagggagggacgcacataaatctgaagtggctcaccgctttaaggatttgggggaagagaatttcaaggcactggtgctgattgcattcgctcagtacctgcaacagtgcccttttgaggatcatgtgaaactcgtgaacgaagtcaccgaatttgccaagacgtgtgtggctgacgagagcgctgaaaattgtgataagagcttgcacaccctgttcggggataagctgtgcactgtggctacacttcgtgaaacctatggcgagatggcagattgctgtgcaaaacaagagcccgagcggaacgaatgttttctgcaacataaggatgataatcccaacttgcctcggttggtgagacctgaggtcgacgtgatgtgtacagcatttcacgacaacgaggagaccttcctgaaaaagtacttatacgaaatcgctagaagacatccatacttttatgcccccgagctgctcttttttgctaagaggtacaaggccgcttttaccgaatgctgccaggcagcagacaaagcggcctgcctgttgccaaagctcgatgagctaagagatgaaggaaaggcatcatccgctaagcagcgcctcaagtgcgcctcgctgcagaagttcggagagcgggcattcaaggcctgggcagttgcccgtttatcccagaggtttcccaaagctgagttcgccgaggtttccaaattggtaactgatttgaccaaggtccacacggagtgctgccatggggatctgttggaatgcgctgatgaccgcgctgacctggctaaatacatttgtgagaaccaagattctatttcttccaagttgaaagaatgttgcgaaaaacccctgctcgagaaaagtcattgcattgccgaggtggagaacgacgaaatgccagccgacctgccatccctcgcggcagatttcgtcgagtcaaaagatgtctgcaaaaactacgccgaagccaaggatgtgttcctcggaatgttcctgtacgaatacgcacgaagacaccccgactacagcgtagtgttgctactcagactggcaaagacctacgaaacaacacttgagaagtgctgtgcagcagcagacccccatgagtgctacgcgaaagttttcgacgagttcaaacccttggttgaggaaccacagaacctgatcaagcagaattgcgagctttttgaacagctgggtgaatacaaattccagaacgcgctgttggtaagatatacaaagaaggtacctcaagttagtactccaacactggtcgaggtgtctaggaacctcggaaaagtaggatccaagtgctgcaagcaccctgaagccaagcgcatgccttgcgctgaggactacctgagtgtagtgctcaatcagctgtgcgtgctgcatgagaagacccccgtgtcagacagggttacaaagtgctgcaccgagagtctggtgaatcgcagaccttgtttctcagcccttgaagttgatgaaacatatgtgccgaaagagttcaacgccgagacgtttacatttcatgcggatatttgcaccttgtccgagaaagaacggcagatcaaaaagcagaccgctctcgtggagctggtcaagcacaaacctaaggctacaaaagagcagctgaaggctgtgatggatgacttcgccgctttcgtggaaaaatgttgcaaagcggacgataaggaaacctgctttgcggaagaaggcaaaaagcttgttgctgccagccaggcggccctgggcctc

SEQ ID NO: 249354 - DNA, 2007 bp, synthetic construct
  misc_feature 1..2007: note = Description of Artificial Sequence: Synthetic coding sequence
  source 1..2007: mol_type = other DNA
atgaaatgggtcagcttcatttccctgttgtttctgttcagctctgcgtactcggggtccctcgataagcggcacggagagggtacgttcacctccgatgtctcgagctaccttgaagggcaggccgctaaggaattcattgcatggcttgtgaagggccgtcacggtgaaggtacgtttacgtccgatgtgagctcgtacctcgagggacaggcagcgaaggaattcatcgcgtggctggtgaaggggcgggacgcgcataagtcggaagttgcacacaggttcaaggacctgggggaggaaaactttaaggcgcttgtgctcattgcgtttgcacagtatcttcagcaatgtccatttgaggatcacgtgaagttggtgaacgaggtgacggagtttgccaagacctgcgtggctgatgaatccgccgaaaactgcgataagtcactccacaccctcttcggagataagctctgtaccgtggcaaccctgagggaaacttacggcgaaatggccgactgttgtgcaaagcaagaacccgagagaaacgaatgcttcctccaacataaggacgataaccctaatctcccccggctggttcgcccggaggtcgatgtcatgtgtaccgcatttcatgacaacgaggagactttccttaagaagtacctgtacgaaattgcgcgcaggcatccttacttttacgcaccagagctgcttttcttcgcaaagcgctacaaggccgcttttactgagtgctgccaagccgcagataaagccgcgtgtctgctgcctaagctggacgaacttcgggatgaaggtaaggctagctcagcaaagcaaaggcttaagtgcgcatcgctgcaaaagtttggtgaacgcgcattcaaagcgtgggccgttgcacgcctgtcgcaacgattcccgaaagcagagtttgcagaagtctccaagctggtgactgatctgactaaagtccacactgaatgttgtcatggggacttgctggaatgtgcagatgatcgagcagacctcgccaagtacatttgcgagaatcaagattccatctcctcaaagttgaaggaatgttgtgagaaaccactgttggagaaatcacattgtatcgccgaggtcgagaacgatgaaatgcccgcagatctgccatccctggccgccgactttgtcgaatccaaggatgtgtgtaagaattacgcagaggcaaaggacgtgtttctgggcatgtttttgtacgagtacgcaaggcgtcacccagattatagtgtcgtcctgctgctcagattggctaaaacctacgaaaccactctggagaagtgctgtgcagcagccgacccacacgaatgttacgcgaaggtgttcgacgagtttaagccattggtggaagaaccccaaaacttgataaagcagaactgtgaactgtttgaacagctgggagagtacaaattccagaacgcacttctcgtcagatacaccaagaaagtcccacaagtgtccactcctacgctcgtcgaagtgtcgcgaaaccttgggaaagttggttcgaagtgctgcaagcaccccgaggcaaagagaatgccttgcgctgaagattaccttagcgttgtgctgaatcagctttgcgtgctccatgaaaagactcccgtgagcgacagagtgactaaatgctgtacggaatcgctggtgaaccgcaggccatgttttagcgcacttgaagtggacgagacttacgtcccgaaggagtttaacgcggaaacttttaccttccacgcagatatttgcacgctttcggaaaaggaaagacagatcaagaagcaaaccgcacttgtcgaacttgtgaagcacaagcccaaagccacgaaggaacaacttaaggcggtcatggacgattttgcagcttttgtggaaaaatgttgtaaagcagacgacaaggaaacctgttttgccgaagaggggaagaaacttgttgcagcaagccaggcagcgctgggactg

SEQ ID NO: 249355 - DNA, 2007 bp, synthetic construct
  misc_feature 1..2007: note = Description of Artificial Sequence: Synthetic coding sequence
  source 1..2007: mol_type = other DNA
atgaaatgggtatcgtttatatcgttattatttttattttcgtcggcgtattcgggttcgttagataaacgacatggtgaaggtacgtttacgtcggatgtttcgtcgtatttagaaggtcaagcggcgaaagaatttatagcgtggctagtaaaaggtcgtcatggtgaaggtacgtttacgtcggatgtatcgtcgtatttagaaggtcaagcggcgaaagaatttatagcgtggttagtaaaaggtcgtgatgcgcataaatcggaagttgcgcatcgatttaaagatttaggtgaagaaaattttaaagcgctagttttaatagcgtttgcgcaatatttacaacaatgtccgtttgaagatcatgtaaaattagtaaatgaagtaacggaatttgcgaaaacgtgtgtagcggatgaatcggcggaaaattgtgataaatcgttacatacgctatttggtgataaattatgtacggttgcgacgctacgtgaaacgtatggtgaaatggcggattgttgtgcgaaacaagaaccggaacgtaatgaatgttttctacaacataaagatgataatccgaatctaccgcgtttagtacgaccggaagtagatgttatgtgtacggcgtttcatgataatgaagaaacgtttctaaaaaaatatttatatgaaatagcgcgtcgacatccgtatttttatgcgccggaattattattttttgcgaaacgatataaagcggcgtttacggaatgttgtcaagcggcggataaagcggcgtgtttattaccgaaactagatgaactacgtgatgaaggtaaagcgtcgtcggcgaaacaacgtttaaaatgtgcgtcgttacaaaaatttggtgaacgtgcgtttaaagcgtgggcggtagcgcgactatcgcaacgttttccgaaagcggaatttgcggaagtatcgaaactagttacggatttaacgaaagtacatacggaatgttgtcatggtgatctattagaatgtgcggatgatcgtgcggatctagcgaaatatatatgtgaaaatcaagattcgatatcgtcgaaattaaaagaatgttgtgaaaaaccgctattagaaaaatcgcattgtatagcggaagttgaaaatgatgaaatgccggcggatttaccgtcgttagcggcggattttgtagaatcgaaagatgtatgtaaaaattatgcggaagcgaaagatgtatttttaggtatgtttctatatgaatatgcgcgacgtcatccggattattcggtagtattactactacgtttagcgaaaacgtatgaaacgacgttagaaaaatgttgtgcggcggcggatccgcatgaatgttatgcgaaagtatttgatgaatttaaaccgctagtagaagaaccgcaaaatttaataaaacaaaattgtgaactatttgaacaactaggtgaatataaatttcaaaatgcgttactagtacgatatacgaaaaaagtaccgcaagtatcgacgccgacgctagtagaagtatcgcgtaatctaggtaaagttggttcgaaatgttgtaaacatccggaagcgaaacgaatgccgtgtgcggaagattatctatcggtagttttaaatcaattatgtgttttacatgaaaaaacgccggtatcggatcgagtaacgaaatgttgtacggaatcgctagtaaatcgtcgtccgtgtttttcggcgctagaagtagatgaaacgtatgttccgaaagaatttaatgcggaaacgtttacgtttcatgcggatatatgtacgctatcggaaaaagaacgtcaaataaaaaaacaaacggcgctagtagaactagtaaaacataaaccgaaagcgacgaaagaacaattaaaagcggtaatggatgattttgcggcgtttgtagaaaaatgttgtaaagcggatgataaagaaacgtgttttgcggaagaaggtaaaaaactagtagcggcgtcgcaagcggcgctaggttta

SEQ ID NO: 249356 - DNA, 2007 bp, synthetic construct
  misc_feature 1..2007: note = Description of Artificial Sequence: Synthetic coding sequence
  source 1..2007: mol_type = other DNA
atgaaatgggtgtcttttatttcactcctattcctgttctcctccgcctactctggaagtttagataaaaggcatggagaagggacattcacttcagacgtgtccagttatctggaagggcaggcagccaaagagttcatcgcctggcttgtcaaggggcggcatggagaaggaacatttactagtgatgtatcgtcctacctggaagggcaggccgccaaagagttcattgcgtggctggtcaaaggaagagacgcacataaatcagaagtcgcccaccgattcaaagaccttggagaggaaaactttaaagctctcgttctcattgccttcgcacagtatctccagcagtgccccttcgaggatcacgtgaaactggtaaacgaagtaactgaattcgccaaaacttgcgtagctgatgagtcagctgagaattgtgataaaagtctccatactctcttcggggataagctctgcacagtagctactctgcgagaaacttacggagaaatggcggattgttgcgccaaacaggaacctgagagaaacgaatgcttcctgcagcacaaggatgataatcccaatctacctcgcctggtgagacccgaggtggacgtgatgtgtactgccttccacgataatgaagaaacatttttaaaaaaatatctatatgagatcgcccgacggcatccatacttctacgctcccgaacttcttttttttgccaaacggtacaaggctgccttcacagaatgctgccaggctgccgataaagcagcctgccttcttcctaagttagatgaactgagggacgaagggaaagcctcatcggcgaaacagcgcctaaaatgcgcctcactgcagaaatttggggaaagggccttcaaggcctgggctgtggctaggttatctcaaaggtttccaaaagccgaattcgctgaagtctccaagctagtgacagatctcacaaaagtgcacacggaatgctgccacggggacttgttggaatgtgctgatgatagggctgatctcgcaaaatatatatgcgaaaatcaggatagtatatctagtaaactaaaggagtgttgtgaaaagccattgcttgaaaaatcacattgcatcgcagaagtggaaaatgatgaaatgccagccgatctaccatctctggcggcggattttgtcgaaagtaaagatgtgtgtaagaattacgcagaagccaaagatgtattcttaggaatgtttctctacgaatacgccagacgacatcctgattactctgttgtgctactcctaaggctggcgaaaacatatgaaacaactcttgaaaagtgttgcgcggcagctgatccacacgaatgctatgccaaagtgtttgatgagttcaaaccccttgttgaagaacctcagaatcttattaaacagaattgcgaactttttgaacagctaggggaatataaattccagaatgcactcctggtgcggtatactaaaaaagtaccccaggtgagtacacctacactggtggaggtcagtagaaatctggggaaggtagggtccaaatgttgtaaacaccctgaagcgaagaggatgccatgcgccgaagattatttatctgtggtgctgaaccagttgtgtgtccttcatgaaaagactcctgtatcagacagagtaactaaatgctgcacagaatcccttgtaaaccgacgcccatgcttttcagccctcgaggtggatgaaacatatgtgcccaaagaattcaatgctgaaacatttacattccacgctgatatttgcacactatcagagaaggaaaggcagataaagaaacagactgctttggtggaactcgtgaaacataaacccaaagctacaaaagaacagctgaaagccgtaatggatgacttcgccgccttcgtggaaaaatgttgtaaagccgatgataaagaaacatgttttgccgaagaaggaaaaaagctcgtggcagcttctcaggccgcgctggggcta

SEQ ID NO: 249357 - DNA, 2007 bp, synthetic construct
  misc_feature 1..2007: note = Description of Artificial Sequence: Synthetic coding sequence
  source 1..2007: mol_type = other DNA
atgaagtgggtgtcgttcatttcgctcttgtttctgttctcgtcagcttactctggatcacttgataagcggcacggggaagggacttttacctcggatgtgtcctcctaccttgagggacaagcagcgaaggagtttatcgcctggctcgtgaagggcagacatggggaaggcactttcacgagcgatgtgtcgtcctacctggaaggacaagcagccaaggagttcatcgcttggctggtgaagggtcgggatgcgcataagtccgaagtcgcgcaccggttcaaggaccttggcgaagaaaacttcaaggcactggtgctgatcgcatttgcacaatacctgcagcagtgtccttttgaggatcatgtcaagctcgtcaacgaggtcactgaatttgctaagacctgtgtcgcagacgaatcagccgagaactgtgacaaatccttgcacactttgtttggagacaaactgtgcacggtcgccacgcttcgcgaaacctacggtgagatggccgattgctgcgcaaagcaggagccagagcgcaatgagtgctttctgcagcataaagatgacaaccctaacctccctagactcgtgcggccagaagtcgatgtgatgtgtactgcatttcatgataacgaagaaacttttctgaagaaatacctctacgaaatagcacggcggcatccttacttttacgccccagagcttctgttttttgcaaagagatacaaggcagcttttacggagtgctgccaagcagcggataaggcggcatgtctcctgccaaagctggatgagctgagagatgaaggaaaggcttcgagcgcaaaacagagacttaagtgtgcgagcttgcagaaattcggagaacgagcatttaaggcctgggccgtggcgagactgtcgcagcgcttccccaaggccgaattcgcagaagtgtccaagctggtgaccgatcttaccaaagtgcatactgaatgttgccatggagacttgctggagtgcgcggatgatagagctgatctggcaaagtacatatgtgaaaatcaggatagcattagctccaagctgaaggagtgttgcgaaaagccactcctggaaaaatcacattgtattgccgaagtggaaaacgacgagatgcccgcagaccttccttcgctggcggcagatttcgtggaatccaaggatgtgtgcaagaattatgcggaggcaaaggacgtctttctcggtatgtttctgtacgaatacgcaaggagacacccggactactccgtcgtgcttctcctccgccttgcaaaaacttacgaaactactctcgagaagtgttgcgccgcagcagacccccatgagtgttacgcaaaagtgttcgatgagtttaagccacttgtggaagaaccccagaacttgataaagcagaattgtgaactttttgaacaactcggcgaatacaagtttcagaacgcgttgcttgtgcggtacactaaaaaggtgccacaagtctcgacgcctactttggtggaggtgagccgcaacctgggcaaggtcggttcaaagtgttgtaagcatcccgaggccaagagaatgccctgtgcagaagattacctgtcggtggttcttaaccaactttgtgtgctgcacgaaaagacgccggtgtcagatcgggtgaccaaatgctgcacggaatccctggtgaataggcggccatgtttttctgcactggaagttgacgagacttacgtcccaaaagaattcaatgcagaaacctttaccttccatgctgatatttgtactctctcggaaaaagagcgacagatcaaaaagcaaactgcacttgtggagcttgtcaagcataagccaaaggcaaccaaagaacagctcaaagcagtgatggacgattttgccgccttcgtggaaaagtgctgtaaggcagacgataaagaaacttgttttgccgaagagggaaaaaagttggtcgcagcaagccaagcagcacttggactt

SEQ ID NO: 249358 - DNA, 2007 bp, synthetic construct
  misc_feature 1..2007: note = Description of Artificial Sequence: Synthetic coding sequence
  source 1..2007: mol_type = other DNA
atgaaatgggtcagtttcatctccctgctctttttgttcagcagcgcatactccggctcgctggacaagcgccatggtgaaggaactttcacctccgacgtgtcctcatatcttgaaggacaggccgcaaaggaattcattgcctggctggtgaaagggagacatggagaaggaacttttacttccgatgtgtcgtcgtacttggaaggccaagcagctaaggagttcatcgcatggctggtcaagggacgcgacgcccataagtcagaagtggctcatcggtttaaggacctcggagaagagaactttaaagccctggtgctgatcgccttcgcacaatatctgcagcaatgcccattcgaagatcacgtgaagctggtgaacgaagtgactgagtttgcaaaaacctgcgtggcagacgagtccgcggaaaactgtgacaagtcactgcataccctctttggagacaagctgtgcactgtcgcaaccctccgcgagacttacggagagatggcagactgttgcgccaaacaggagccagagagaaatgagtgcttcttgcaacataaggacgataatcccaacctcccgcgactcgtccggccggaagtggacgtgatgtgcacggccttccatgataatgaggaaactttcttgaagaaatacctctacgaaatcgcccgccggcacccttacttttacgcaccagagctgctgttcttcgccaagcggtacaaggctgcctttacggaatgctgccaggcagccgataaggctgcgtgcctgctcccgaagctggatgagttgagagatgaaggaaaagcgagctccgccaagcaaagattgaagtgcgccagcctgcaaaagtttggagaacgggcctttaaggcctgggcggtggcgagactctcgcagcggtttccgaaggccgagtttgctgaagtgagcaagttggtgactgacctgactaaggtgcacaccgagtgttgtcacggagacttgctcgaatgcgccgacgatcgggctgacctcgcaaagtatatctgcgaaaatcaagatagcatttcgtccaagctgaaggagtgctgcgaaaagccgcttcttgaaaaatcccattgcattgcggaagtggaaaacgatgaaatgccggctgacctgccatcgcttgcggcggacttcgtcgagtcaaaagatgtgtgcaagaattacgctgaggctaaggacgtctttctgggaatgtttctgtacgaatacgcgaggcgccatccggattactcagtcgttttgcttctcagactcgccaagacctacgaaaccactttggagaagtgttgcgccgccgccgaccctcacgaatgctacgcgaaggtgttcgacgagtttaagcctctggtggaggagccacagaacctgataaaacagaactgcgaacttttcgaacagctgggggaatacaagttccagaacgcgctcctcgtgcgctacactaagaaggtcccacaagtgagcactccaacgctggtcgaggtcagccgcaacctgggaaaggtggggtcaaagtgttgcaagcatccggaagccaagcggatgccttgcgcagaagattacctctccgtggtcctgaatcaactctgtgttctccacgaaaaaactccagtgtcggatcgggtcaccaaatgctgtaccgagtccctggtgaatcgcagaccgtgcttctccgctctggaagtggatgaaacctacgtcccgaaagaattcaacgcggaaacttttaccttccatgcggacatctgcaccctgtcggagaaggaacgtcagattaagaaacagactgcgctggtggagctggtgaagcacaagcctaaggcgactaaggagcagctgaaggccgtgatggacgacttcgcagcctttgtcgaaaagtgttgtaaggccgacgacaaggagacttgcttcgccgaagaaggcaaaaaactggtcgcggcttcgcaagccgccctcggtctg

SEQ ID NO: 249359 - DNA, 2007 bp, synthetic construct
  misc_feature 1..2007: note = Description of Artificial Sequence: Synthetic coding sequence
  source 1..2007: mol_type = other DNA
atgaagtgggtgtcgtttatctcgctgctgtttctgttctcctccgcatactcaggaagccttgataagcgtcatggtgaaggaaccttcacttcggatgtttcatcctacctggaaggtcaagcagccaaagaattcattgcatggctggtcaaggggagacatggggaaggaacttttacttccgatgtttcctcttaccttgaaggacaagccgccaaagagtttatagcctggctcgttaagggaagagatgctcataagtccgaggtggcacacaggtttaaagacctgggcgaagagaatttcaaggcgcttgttctcattgcattcgcacagtatctccaacaatgtccctttgaggaccatgtcaagctggtgaacgaagttaccgaatttgcaaagacctgtgtcgcagacgaatcagccgagaactgcgataagagcctccatactctttttggagataaactgtgcactgtcgcaaccctgcgtgaaacttacggagaaatggctgactgctgcgcgaagcaggaaccagaaagaaatgaatgcttcctgcagcataaggatgacaaccctaacctgccacgtctggtgcgtcccgaggtggacgtgatgtgcactgcatttcatgataacgaagaaacttttctgaagaagtacctttacgaaattgcgcgcagacacccgtacttttatgctcccgagcttttgttttttgcaaagcgatataaggctgcattcacggaatgttgccaagccgccgataaggccgcatgccttctccccaaactcgatgaactgagagatgagggaaaggcatcctcggcaaaacaacggcttaagtgtgccagcctgcaaaagtttggggaaagagccttcaaggcatgggccgtggcccggctttcgcaacgctttccaaaggctgagtttgcagaagtgagcaagttggtcaccgatctgaccaaggtgcataccgaatgttgtcacggtgatttgcttgagtgtgcggatgatcgagcagatcttgcgaagtatatctgcgagaaccaagattccatcagctcaaagctgaaagagtgttgcgaaaaacccctcctcgagaaatcccattgtattgctgaggttgagaacgacgagatgccagccgatcttccatccctggcagcagacttcgtggagtccaaagacgtctgtaagaattacgccgaagctaaggatgtgtttctcggtatgttcctctacgaatacgcgcggagacatcctgattactccgtggtgctgctgctccggcttgcgaaaacgtacgagacgactctcgagaagtgttgcgccgctgctgatcctcacgaatgttacgcgaaggtgtttgacgaattcaaacccctcgtggaagaaccacagaatcttatcaagcagaattgtgagctctttgagcaacttggagaatacaagttccagaacgccctcctcgttagatacactaagaaggtcccacaagtctccactcccactcttgtggaagtgagcagaaacttgggcaaggtcggttcgaaatgttgtaagcatccagaagcaaagagaatgccatgtgcagaggactaccttagcgtcgtactgaatcaactttgtgtgctgcatgaaaagaccccagtgtccgacagagtcaccaagtgttgcaccgagagtctggtcaacagaaggccttgtttttcggcgctggaagtcgatgaaacctatgtgcctaaagagtttaacgctgaaactttcactttccacgccgatatttgcactctgtcagaaaaggagagacaaatcaagaagcagactgcccttgtggaactggtcaaacataagcctaaagccacgaaggagcagctcaaggccgtcatggatgactttgccgcatttgtcgaaaaatgctgtaaagcagatgataaggaaacctgctttgcagaagaagggaagaaactggtggcagccagccaggcagcacttggtctg

SEQ ID NO: 249360 - DNA, 2007 bp, synthetic construct
  misc_feature 1..2007: note = Description of Artificial Sequence: Synthetic coding sequence
  source 1..2007: mol_type = other DNA
atgaagtgggtctctttcatcagcctcttattcctgttttccagcgcttactctgggagcctggataaaagacacggagagggtacattcactagcgatgtatcctcgtatttggaaggacaagctgccaaggaattcatagcctggctggttaagggcagacatggagagggtacattcacctccgatgtctcttcttatttagagggtcaggctgccaaagaatttattgcatggctggttaagggacgggacgcacacaagtctgaggtggcccacaggtttaaagaccttggcgaagaaaacttcaaggcactggtgctcatagccttcgctcaatacttgcagcagtgcccattcgaggaccacgtgaagctcgtgaacgaagttacagaattcgctaagacttgcgtggcagacgagagtgccgagaattgtgacaagtccctacacactctctttggagataagctgtgtaccgtagctacgctcagggagacctacggagagatggccgattgttgcgcaaagcaggaacccgagaggaacgaatgctttttgcagcacaaggacgacaatcccaatttgcccagactcgtccgccctgaagtcgatgtcatgtgcactgcatttcatgataatgaggaaacattcctgaaaaagtacctgtacgagattgcacgacggcacccttatttttatgcaccagagctgctcttttttgcaaagcggtataaggccgcatttacagagtgctgccaggcggctgataaggcggcctgtttgctccctaaactggacgagttgagagatgaggggaaggcttcgagcgccaagcagagattgaagtgcgcttccttacaaaagtttggtgagagggcgtttaaagcttgggcagtggctagacttagccaaaggtttcccaaggcggaattcgcagaggtctccaaactggtgactgaccttaccaaagttcacaccgaatgttgtcatggggatctgctcgaatgtgcagacgaccgcgccgatctggcgaagtatatttgtgagaatcaggatagtatcagctctaaactcaaagagtgctgtgaaaaaccactattggagaagtcacattgtattgcggaagtggaaaacgatgaaatgcccgccgatcttcctagcctagcagctgattttgtggagagtaaagacgtgtgtaaaaattacgcggaagccaaagatgtgtttctcggtatgtttctctatgagtatgctcgccgtcaccctgactatagtgtggtgctgcttcttagactcgcaaagacctacgaaaccacgttagaaaaatgttgcgcagccgccgatccccatgaatgttacgccaaggtgttcgatgaattcaaacccctggtggaggagcctcaaaaccttataaagcagaattgcgagctcttcgagcagctcggggagtacaagtttcagaacgcgttgctcgtgaggtacaccaaaaaggttccccaggtgagcacaccaactctggtggaagtctctcggaacctggggaaggtcggcagcaaatgttgcaagcacccagaggcaaagaggatgccgtgcgctgaagactacttatctgtggtccttaatcagttgtgtgtcctccacgaaaagacacctgtctccgatcgcgtaacgaagtgttgcactgagagtttagtcaacaggcggccctgtttctcagcactggaggtcgatgagacatatgtgcctaaggagtttaatgcagagactttcacctttcacgcagacatctgtacgcttagtgaaaaagagcgacaaatcaagaagcagactgcattagtggagctggttaagcacaagcctaaagcaaccaaagagcagctcaaggctgtgatggacgactttgccgcgttcgtcgaaaagtgctgcaaagcagatgacaaggaaacctgctttgccgaggaaggtaaaaagctagtcgccgcctcgcaggccgctctgggactc

SEQ ID NO: 249361 - DNA, 2007 bp, synthetic construct
  misc_feature 1..2007: note = Description of Artificial Sequence: Synthetic coding sequence
  source 1..2007: mol_type = other DNA
atgaagtgggtgtctttcatctctctcctgtttttgttttcctccgcctattccggtagcttggataagaggcacggagagggcacttttacttccgacgtgagcagctacctggagggccaagctgccaaggagttcattgcctggctcgtcaagggtcggcacggcgaaggtacgttcacgtcagacgtctcgtcttacctggagggtcaggcagccaaggaattcatcgcttggttggtcaagggcagagatgctcataagtccgaggtggctcacagattcaaagatctgggggaggaaaacttcaaagctctcgtgctcatagccttcgcacagtacctgcagcagtgtccgtttgaggaccacgtgaaactcgtgaatgaggtgaccgaattcgcaaagacttgcgtcgccgacgagtccgcagagaactgcgacaagtcattgcacactctgttcggagataagttgtgcaccgtggccaccctgcgggaaacctacggagagatggccgactgctgtgccaagcaggaaccggagcgcaacgaatgctttctgcaacataaagacgataaccctaacttgcctcgcctggtccgtcccgaggtggatgtgatgtgtacggcgtttcacgacaacgaggaaactttcctgaagaaatacctctacgaaatcgctagacgccacccatatttctacgcgccagaactcctcttcttcgcaaagcgctacaaagcagcgttcaccgagtgttgccaggccgccgacaaggctgcatgccttctgccaaagctggacgaactgcgtgacgaagggaaagcaagcagcgcaaaacagcggctcaagtgcgcctccctgcagaagtttggcgaaagggctttcaaagcctgggccgtggccaggctgtcgcagagattcccgaaggcagaattcgcggaggtgagcaaattggtgactgacctgaccaaagtgcataccgagtgctgccacggcgatcttctggagtgtgccgatgatcgcgcagaccttgcgaagtacatctgcgaaaaccaggactctatctcctcgaagctcaaggagtgctgcgaaaaacctctcctggaaaaatcccactgcattgcagaagtggagaacgatgaaatgcctgcggacctgccgtcgctggcggcggattttgtcgaatcgaaggatgtgtgtaagaattatgcagaggcaaaggatgttttcctggggatgttcctgtacgaatacgctagaaggcacccggactactcggtagtccttttgctgagacttgccaagacctacgaaaccactctggagaaatgttgcgccgcggcggatccgcacgaatgctacgcgaaagtgttcgacgagttcaagccgctcgtcgaggaaccacagaatctgatcaagcagaattgtgaactgtttgaacaactgggcgagtacaaattccaaaatgcgctgctggtgcgctacacgaagaaggttccgcaagtgtcgactccgactctggtcgaggtcagccgcaatctgggaaaggtcggatcgaagtgttgcaaacacccggaagcgaagcgcatgccgtgcgccgaagattacctgtccgtcgtgttgaaccaactctgcgtgcttcatgaaaagacgccagtgtccgatcgcgtgaccaagtgctgcaccgagagcctcgttaaccgccggccctgcttttccgccctcgaagtggacgagacttacgtccccaaagagttcaacgcggaaactttcacctttcacgccgatatctgcaccttgtccgaaaaagaacggcaaatcaagaagcagacggcactggtggaattggtcaagcataagcctaaagcgactaaagaacagctgaaagcagtcatggacgacttcgccgcgttcgtagaaaagtgctgtaaggccgacgacaaggagacttgtttcgcagaagaagggaagaagctcgtggcggcctcgcaagcggctctgggcctg

SEQ ID NO: 249362 - DNA, 2007 bp, synthetic construct
  misc_feature 1..2007: note = Description of Artificial Sequence: Synthetic coding sequence
  source 1..2007: mol_type = other DNA
atgaagtgggtgtcattcatctcactgttgtttctgttttcctccgcctacagcggaagcctggacaaacgacacggtgaaggcacgttcacctcggatgtgtctagctacctcgagggtcaagctgcaaaggagtttattgcctggctggtgaagggcagacatggcgagggtacttttacgtccgatgtgtccagctatctggaaggacaggccgcaaaagagtttatagcatggcttgtgaagggacgggatgcacataagtccgaggtggcacacagattcaaggacctcggtgaggaaaacttcaaagccctggtgctgattgcatttgcccaataccttcagcaatgtccctttgaagatcacgtcaagctggtgaatgaagtcacggaattcgcaaaaacttgtgtggcagacgagtcagcagaaaattgcgataagtcacttcatacgctgtttggagacaaactgtgtaccgttgccactcttcgagaaacttatggcgaaatggcagactgttgcgccaagcaagaaccagaacgtaacgaatgctttctgcaacataaggatgacaatcctaatctgcctaggctggtccgtcctgaagtcgatgtgatgtgcactgcattccatgataatgaagaaacctttctgaagaaatacctttacgaaattgcgagaaggcacccatacttctacgcacctgaactcctgttttttgccaagagatataaggcagcatttactgaatgctgccaggccgcagacaaggcagcttgtctgcttcccaagctcgatgagcttagagatgagggaaaggcatcctcggccaaacaacgcctcaagtgtgcaagtctccagaaattcggagaacgcgcattcaaggcctgggcagtggcgcgcctctcgcagaggttccccaaggctgaatttgccgaagtctcaaagttggtgactgacctgaccaaggtccacactgaatgttgtcacggtgacctgctggaatgcgccgacgatcgcgctgatctcgcaaagtacatttgtgaaaatcaagactcgatatcatccaaacttaaggagtgttgtgagaaaccactgcttgaaaagtcgcactgcatcgcagaggtggagaacgatgaaatgcccgcagaccttccctcgctggcggcggactttgtggaaagcaaggacgtctgtaagaattacgctgaagcgaaggatgtctttcttggaatgtttctttacgaatacgcacggcgccacccggactactcggtggtgctcctcctgaggcttgccaagacttacgaaaccactctggagaagtgctgcgccgctgcagatcctcatgagtgctacgcaaaggttttcgatgagtttaagccacttgtggaagagcctcaaaatctgatcaagcagaactgtgaactgttcgagcaactcggagaatacaagttccaaaatgcattgcttgtccgatatacgaaaaaggtgccacaagtgtccacgccgacgcttgtggaggtgtcacgcaaccttgggaaagtgggatcgaagtgttgtaagcacccggaggccaaaagaatgccgtgtgcggaagattacctgtccgtcgtgcttaatcaactctgcgtgctgcacgaaaaaactcccgtctcggatagagtgaccaagtgctgtaccgagagcctggtcaaccgcagaccctgtttctcggcattggaagtcgatgaaacttacgtgcctaaggaattcaatgcagaaacttttaccttccatgccgatatctgcaccctgtcagaaaaggagagacagattaagaagcaaactgcgcttgtggaactggtcaagcacaaacccaaggcaaccaaagaacaactgaaggccgtgatggatgactttgcagcctttgtggaaaaatgctgtaaggccgatgacaaggaaacgtgttttgccgaagagggcaagaaacttgtggcagcatcccaggctgcgctgggtctt

SEQ ID NO: 249363 - DNA, 2007 bp, synthetic construct
  misc_feature 1..2007: note = Description of Artificial Sequence: Synthetic coding sequence
  source 1..2007: mol_type = other DNA
atgaagtgggtgagcttcatatcactcttgtttctgttcagctcggcctacagcggcagcctcgacaagagacacggggagggaaccttcacaagtgacgtgagctcgtacttagaaggccaggccgcgaaggagtttatcgcgtggctagttaagggtcgacacggcgagggtacatttacaagtgatgtatcgtcatatctggaggggcaggcggccaaagaatttattgcatggctggtcaagggccgcgatgcccacaagtcggaggtcgctcaccgattcaaggacttgggtgaggaaaattttaaggcgctcgtgttgattgcatttgctcaatacctccagcagtgcccctttgaagaccacgtcaagttagtcaatgaggtgaccgagttcgcaaagacctgcgtcgccgacgagagcgccgagaattgtgacaaaagtttgcatactctattcggagataagctctgtaccgtggctacacttagagaaacttatggtgagatggcagattgctgcgccaaacaggaacccgagcggaacgagtgcttcttacagcacaaagacgacaatccaaatctccctaggctggtgcgtccagaggtcgacgtcatgtgtacggcattccacgacaatgaagagaccttcctcaaaaagtatctgtatgagattgctcgtaggcacccctacttctatgcccctgaactcctcttttttgctaaacgatacaaagccgccttcactgaatgctgtcaagctgctgataaagccgcctgtttgctccctaagctggacgagttgcgagacgaagggaaggcctcatccgcgaaacagcgactcaagtgcgccagtctacagaaatttggagagcgggcgttcaaggcctgggcagtggcacggctgtcgcagcgatttcctaaagctgagtttgctgaggtgagtaagttggtcactgatttgactaaggttcatacagaatgctgtcacggtgacctgttggaatgcgcagacgatagggctgacttggctaaatacatatgtgagaatcaggattctatcagcagtaaactaaaagagtgttgtgagaagcctctcttggagaaatcccactgcatcgccgaagtcgagaacgatgaaatgcctgcagacctgcccagtctggctgccgatttcgttgagagcaaggacgtttgcaagaattatgcagaggcaaaagatgtctttttggggatgtttctatacgaatacgctaggagacacccagactatagcgtggttttgctgctgcgactggccaagacttatgagacgacccttgaaaaatgctgcgcagctgctgacccccacgagtgttacgcgaaggtctttgacgagttcaagcctctggtggaagagccccagaacctcataaagcagaattgcgagttgttcgagcaattgggcgagtacaaattccagaatgcattgttggtgcgctatactaaaaaggtgccacaggtttcaactccaactctggtggaggtcagtcgcaatctgggtaaagtgggatcaaagtgttgcaagcacccggaggcaaagcgaatgccatgcgctgaggactatctctcggttgtgctgaatcagctatgcgtactacacgaaaaaactcccgtgtcagaccgggtcacgaaatgttgcaccgaaagtttggttaatagaaggccgtgtttttctgccctcgaggtagatgaaacttatgtcccaaaagagtttaacgctgagacctttacctttcatgccgatatatgcacgctttccgagaaggagaggcaaattaaaaaacagactgctctggtagaactggtgaagcataaacctaaggcaaccaaagagcaactgaaggctgttatggacgatttcgccgccttcgtggagaagtgctgtaaggccgacgataaagaaacatgctttgcggaggaagggaagaagctggtggctgcttcacaagcggccctcggcctg

SEQ ID NO: 249364 - DNA, 2007 bp, synthetic construct
  misc_feature 1..2007: note = Description of Artificial Sequence: Synthetic coding sequence
  source 1..2007: mol_type = other DNA
atgaaatgggtgtcgtttatcagcctgcttttcttgttctcaagcgcatactcaggatctctcgataagagacatggtgaaggaacgtttacttcagatgtgtcgagctatctggagggtcaggctgcaaaggagtttatagcctggctcgtcaaagggagacatggcgagggtactttcacgtctgacgtgtcgtcgtaccttgaaggacaggcggcaaaggaattcatagcttggcttgtgaagggtcgcgacgcacacaaatccgaggtggcacatagatttaaggatttgggagaagagaacttcaaggcattggtgctgattgccttcgcacagtaccttcagcaatgcccttttgaagatcatgtgaagctggtgaacgaagtgaccgaatttgccaagacctgtgtcgccgacgagtcagccgaaaattgcgataagtcccttcacaccctttttggagacaagctctgtaccgtggcgacgcttcgggaaacctacggcgagatggcagattgttgcgcgaaacaagaacccgaacgtaacgaatgttttttgcaacataaggatgataaccctaatctgccaaggctggtgcgccccgaagtggatgtgatgtgcaccgcatttcatgataacgaggaaacctttcttaagaagtacctgtacgaaatcgcaaggcggcatccatacttttatgcacctgaactgcttttcttcgcaaaacggtacaaagcagcctttactgagtgttgtcaggcagcagataaggcagcttgtctccttcccaaacttgacgagctccgggatgaaggaaaggcatcgtcggcaaagcaaagacttaagtgtgcttcactgcagaagtttggagaaagagctttcaaagcatgggccgtggcaaggctttcccaaagatttcctaaagcagaattcgcagaggtcagcaagctcgtcactgacttgactaaggtgcacactgaatgttgtcatggggacctccttgagtgtgcggatgacagagcagatcttgcaaagtacatttgcgaaaaccaagattccatctcatccaagttgaaggagtgctgtgagaagccactgctcgagaagtcccattgcattgcagaagtcgagaacgacgaaatgcctgccgacctgccctcactggcagcagacttcgtggaatccaaggatgtgtgtaagaattacgcggaagccaaggacgtctttcttggtatgtttctctacgagtatgccaggcgacatcctgactactcggtggttcttctgctgcggttggcaaagacctatgagacgacgctggagaagtgctgtgccgcagcagatcctcacgaatgctacgccaaggtctttgatgagttcaagccgctggttgaagaaccacaaaacctgattaaacaaaactgtgagctttttgaacagctcggcgaatacaaatttcaaaatgcacttctcgtgcgctacactaagaaagtgccccaggtgtcaaccccaacccttgtggaggtgtcacgaaatttggggaaggtgggatccaaatgttgcaaacacccagaggcgaagaggatgccatgtgctgaagattacctttcggtggttctcaaccaactgtgtgttcttcacgagaaaacgcccgtgagcgatagagtgaccaagtgctgcaccgaaagcctcgtcaatcggcgcccgtgtttctcagcactggaggtcgacgaaacctatgtgccgaaggagttcaacgcggaaacctttactttccatgcggacatttgtacgctttctgagaaagaacgacaaatcaagaagcagactgcacttgtggaacttgtgaaacacaagcctaaggcaactaaagagcaactgaaggcagtgatggatgactttgctgcattcgttgaaaagtgctgtaaagcggatgataaggagacttgtttcgcagaagaagggaagaagctggtcgcagcaagccaggctgccctcgggttg

SEQ ID NO: 249365 - DNA, 2007 bp, synthetic construct
  misc_feature 1..2007: note = Description of Artificial Sequence: Synthetic coding sequence
  source 1..2007: mol_type = other DNA
atgaaatgggtcagctttatttccctgctgtttctgttctcaagcgcctattccggatcactcgataagagacatggcgaaggaacctttactagcgacgtgtcttcctatctggaaggtcaggcagccaaggaattcatagcctggctggtcaaaggccgacacggcgaaggcacattcacctccgacgtgagctcttacctggaggggcaggcggcaaaagagttcattgcatggctggtcaagggccgcgatgctcataagagcgaggtggcccatagatttaaggacctcggcgaagagaacttcaaagcattggtcttgatcgcttttgcccaatacctgcagcagtgtcccttcgaggaccacgtaaaactcgttaacgaggtgacggagttcgcaaaaacatgcgtcgccgatgaatcagcggagaattgcgacaagagcctccacacactgttcggtgataaactttgtactgttgcaaccctgagggagacttacggtgaaatggcggattgctgtgcaaaacaagaacccgagcgcaacgaatgtttcttgcagcacaaagatgataatcctaatttgcccagactcgtgagaccggaggtcgatgtcatgtgtactgcctttcacgacaatgaagagacctttctcaaaaagtatctctatgaaattgctagacgccacccgtacttttacgcgccagagctgctcttttttgccaagcggtacaaagctgctttcaccgagtgctgtcaggccgcagataaggctgcctgtctgttgcctaagcttgacgagcttagagacgaaggtaaggcctcaagcgctaagcagcggctgaagtgtgctagtctgcagaaatttggcgagcgggcattcaaggcatgggccgtagccagactgtcccagaggtttccaaaggccgagttcgcagaagtgagcaagcttgttacagacctcaccaaagttcacactgaatgctgccacggggacctgttggaatgcgccgatgacagagcagatctggctaagtacatctgcgagaatcaggacagcataagcagcaaactcaaagaatgttgtgaaaagccactccttgaaaagtctcactgtattgctgaggtcgagaacgatgaaatgccagccgacctccctagcctggcagctgatttcgtggagtccaaggacgtgtgcaaaaactacgccgaggccaaagatgtctttctgggaatgttcctctacgagtatgctagacggcaccccgactattctgtggttctgctgctcagactggcaaagacttatgaaacgacactcgagaaatgttgcgccgccgcagacccacatgaatgctacgctaaggtgttcgacgagttcaaacccttggtcgaggaacctcaaaacttgattaagcagaactgcgaactgtttgagcagctcggtgagtataagtttcagaatgccctgctggtccggtatacaaagaaggtcccccaggtatccaccccaacactcgttgaggtgtcaagaaatctgggaaaagttgggagcaagtgctgtaagcatcctgaggcaaagcggatgccttgcgccgaggactacctcagcgttgttctcaatcagctgtgtgtactgcatgaaaaaactccggtcagtgatcgggttaccaaatgttgcacagaatcactggtgaatagacgcccatgtttctctgctctggaagtagatgaaacttatgttcctaaagagtttaacgctgaaactttcacattccatgcagacatatgcaccctcagcgagaaggagcggcagataaaaaagcaaacagccctggtggaactcgtgaagcacaagcctaaggccaccaaggaacagttgaaggctgtgatggacgatttcgccgctttcgtagagaaatgttgtaaagctgacgacaaagaaacttgtttcgcagaggaaggcaagaaattggttgccgcttcacaggcggcactgggcctt

SEQ ID NO: 249366 - DNA, 2007 bp, synthetic construct
  misc_feature 1..2007: note = Description of Artificial Sequence: Synthetic coding sequence
  source 1..2007: mol_type = other DNA
atgaagtgggtatccttcatctcactcctgttcctcttctccagcgcttacagcggctccctcgataaaagacatggtgagggcaccttcacctccgacgtgtccagctacctggaaggtcaagcggcaaaggagtttattgcatggctggtcaagggaaggcacggagagggaaccttcacctctgatgtatcatcctacctggagggtcaagcggcgaaggagttcatcgcttggcttgtgaaggggcgcgacgcgcacaaatccgaggtggcgcaccgctttaaggacctgggagaggagaacttcaaagctctggttctgatcgcattcgcccagtacctccagcagtgcccattcgaggatcacgttaagctcgtgaacgaagtgaccgaattcgcaaagacctgtgtggccgacgagagtgctgaaaactgcgacaagtcgctgcacacccttttcggcgataaactttgtactgtggcgactctccgcgaaacttacggagaaatggccgattgttgtgcgaaacaggagcccgagcggaacgagtgcttcctgcaacacaaggacgacaacccaaatctccctcgattggtccgccctgaagtcgacgtcatgtgcactgcgtttcacgacaacgaggagactttcctgaagaagtacctgtacgagatcgctcggcggcacccttacttctacgcaccagagctgcttttcttcgccaagagatataaggcggcattcaccgaatgctgtcaagctgcggacaaagccgcgtgcttgctccctaaactcgatgaactgagggacgaagggaaggcttcctccgcaaagcaaaggttgaagtgcgcgtcattgcagaaattcggagaacgcgcctttaaagcatgggccgtggcgagactgagccagcggttcccaaaggccgagttcgccgaagtttctaagctcgtcaccgatctgacgaaggtgcatacggaatgctgccatggcgatctcttggaatgtgctgatgaccgcgcggacctcgccaagtacatctgtgagaatcaggattcgatttcgagcaagttgaaagagtgttgcgaaaagccgttgctggaaaaaagccactgcatcgctgaagtggagaacgacgagatgcccgccgacttgccgagcctggccgcggacttcgtcgaatccaaagatgtgtgtaaaaactacgccgaagcaaaagacgtttttcttggcatgttcctgtacgaatacgctagacgccacccggattactcggtcgttctcctcctccgactcgccaagacttacgaaactactcttgaaaagtgctgcgccgccgcagatccgcacgaatgctatgccaaggtgttcgacgagtttaagccactcgtcgaggagccgcaaaatctgatcaaacaaaattgcgagctcttcgaacagctgggggaatacaagttccagaacgctctgctcgtcagatataccaagaaggtgccacaagtctccactccgaccctggtcgaagtgtcccggaacctcggaaaggtcggatcgaagtgctgtaaacacccggaggccaagaggatgccgtgcgccgaagattacctttccgtggtgctcaaccagctgtgcgtgcttcacgaaaaaaccccggtgagcgaccgggtgaccaagtgctgtacggaaagcctggtgaatcggcggccgtgcttttcagctctggaggtcgatgaaacctacgtgccgaaggaattcaacgcagagacgttcaccttccacgcagacatctgtactttgtcagagaaggagcgtcagataaagaagcaaactgctcttgtcgaactcgtcaagcataaaccgaaggccaccaaggaacagctcaaggcggtgatggacgacttcgcggccttcgttgagaaatgctgcaaggccgacgataaagaaacttgcttcgctgaagagggcaagaagctcgtggcggcgagccaagcagccctcggactc

SEQ ID NO: 249367 - DNA, 2007 bp, synthetic construct
  misc_feature 1..2007: note = Description of Artificial Sequence: Synthetic coding sequence
  source 1..2007: mol_type = other DNA
atgaaatgggtgtccttcatttccctcctgttcctgtttagctcggcctactcgggcagcctagataagcggcacggagagggaaccttcacctcagatgtgtccagttatctggagggtcaggcagcaaaggagttcatcgcctggcttgtgaagggcaggcatggcgagggcacctttacctcggacgtctccagctacctcgagggtcaggccgccaaggagttcatcgcttggctggtgaagggtcgcgatgcacataagagcgaagttgcccaccgattcaaagaccttggcgaggagaacttcaaagcgctggtcctgattgcatttgcgcagtacttgcagcagtgtccattcgaggaccacgttaagttggttaacgaggtgaccgagtttgccaagacctgcgttgctgacgaatccgccgagaactgtgacaagagcctccacaccttgttcggtgacaagctctgcaccgtggcgaccctacgcgagacctacggtgagatggccgattgctgcgcgaagcaggaacccgaaaggaatgaatgcttcctgcagcacaaggatgacaacccgaatctccctcgtctggtcaggccagaggtggacgtgatgtgcactgcttttcacgacaacgaagagaccttcctcaagaaatacctgtacgagatcgcacgtcgccatccgtacttctacgctccggagcttctgttcttcgcgaagcgttacaaagccgcgttcactgagtgctgccaggctgctgataaggctgcttgcctccttcccaagctggatgagctgcgtgacgaggggaaagcgtcctccgctaagcaaaggctgaagtgtgcgtcgttgcagaaattcggagaacgtgccttcaaggcctgggccgtcgcccggctgtcccagcgcttccccaaggcggagttcgccgaagtttcgaagctcgtgacagatctaaccaaggtccataccgagtgctgccacggcgacctgctggagtgcgccgacgatcgcgccgacctggccaagtacatctgcgagaaccaggattccatcagctccaagctcaaagagtgctgcgaaaagccccttcttgaaaaaagccactgcatcgctgaggtggagaatgacgagatgcccgctgacctcccctcgttggccgccgattttgtcgaatccaaagatgtctgcaagaactacgccgaggccaaggatgttttcctcggaatgttcctctacgagtacgcccgacggcatccggattactccgtggtcctgttgttgcgtctcgccaagacctatgagaccaccctcgagaaatgctgcgcggctgccgatccacacgagtgctatgcgaaagttttcgacgagttcaagccgctcgtggaggagccacagaatctgatcaagcagaactgtgagctgttcgagcagttgggggagtacaagtttcagaacgccctcctcgtaagatatactaagaaggtcccacaggtctccacgcctacactcgtcgaggtttcccgcaatttaggtaaggtcggttccaagtgctgtaagcacccggaggccaagcgaatgccctgcgcggaggattacctaagcgtggtgctcaatcagttgtgcgttttgcacgaaaagacccccgtcagcgatcgcgtgaccaagtgttgcaccgagtccctcgtgaataggcgtccttgcttctccgcgcttgaagtagacgaaacatatgtccccaaggaattcaacgctgagactttcaccttccacgcagatatttgcaccctcagtgagaaggaacgccagattaaaaagcagacggccctggtggaactggtcaagcacaaaccaaaagcaaccaaagaacagctcaaggctgtgatggatgatttcgccgcctttgtggagaagtgctgcaaggctgacgacaaagagacctgcttcgccgaggagggcaagaagctggtcgctgcttctcaggccgccctgggcctg

SEQ ID NO: 249368 - DNA, 2007 bp, synthetic construct
  misc_feature 1..2007: note = Description of Artificial Sequence: Synthetic coding sequence
  source 1..2007: mol_type = other DNA
atgaagtgggtatctttcatctcgctgctcttcctgtttagctcggcctactcgggatcgctcgacaagcgccatggcgaaggcaccttcacctcagacgtgtcgagctacttggagggtcaggcggctaaagaattcatcgcgtggctcgtcaagggcagacatggcgaaggaacctttacgtccgacgtgagcagctatttggaaggtcaggccgcgaaggagtttatcgcctggctcgtgaaaggaagggatgcacacaaatccgaagtggctcatcggttcaaggacctgggagaggagaacttcaaagcgctggtgctgatcgcgttcgctcagtacctgcagcagtgcccattcgaggatcatgtgaagctcgtgaatgaagtgactgagttcgccaagacttgcgtagcggacgaatccgcagaaaattgcgacaagagcttgcacactctgttcggagataagctctgcaccgtggcaaccctgagagaaacctacggcgaaatggccgattgctgtgcaaagcaagaaccggagaggaatgagtgtttcctgcagcacaaagacgacaatccgaacttgccgagattggtgcgcccggaagtcgacgtgatgtgtaccgcattccacgataacgaggaaaccttcctcaagaagtacctgtacgagattgccaggaggcacccatacttctacgcccccgagctgctgttcttcgcgaaacgctacaaggccgcgtttactgaatgttgtcaggctgcggataaggcggcttgcttgctcccaaaactggatgaactgcgggacgaagggaaggcctccagcgccaaacagcggctgaaatgcgcatcgctgcaaaagttcggcgaacgcgcattcaaggcatgggccgtggcacgcctcagtcagcggtttccgaaggcggaattcgcggaagtgagcaaactcgttaccgatctgaccaaggtccataccgaatgctgtcacggcgacctgttggagtgcgcagatgaccgggcggaccttgcgaaatacatctgcgagaatcaagactcgatttccagcaagctgaaggagtgctgcgaaaagccactgctcgagaagagccactgtatcgccgaagtcgaaaatgacgaaatgccagccgacttgccgtccctcgctgccgacttcgtggagtcaaaggatgtctgcaagaactatgcggaggcgaaggacgtctttctgggtatgtttctttacgaatacgcgcgcagacaccccgactactcagtggtcctgctgctgagactggcaaagacctacgagacgactctggaaaagtgttgcgccgccgccgatccacacgaatgttacgcaaaggtgttcgacgagttcaagcctctggtggaggagccccaaaatctgatcaagcaaaattgcgaactgttcgaacaacttggagaatacaaattccagaacgccctgctggtgcggtacaccaagaaagtcccacaggtgtcaaccccgaccctcgtggaagtcagccgcaacctgggaaaagtcggcagcaaatgctgcaagcatcctgaggctaagcggatgccttgcgcggaggactacctgagcgtggtgctgaaccaactttgtgtcctgcacgaaaagacgccagtgtccgatcgcgtgaccaaatgctgcaccgagagcctggtgaaccggcggccatgtttttcggccctggaagtggacgagacttacgtgccgaaagagttcaacgccgaaaccttcacgttccatgcagacatttgcactctgtctgagaaggagcggcagatcaagaaacagaccgcgctggtggaactcgtcaagcacaagcctaaggcaactaaggaacagctgaaagccgtgatggatgactttgcggccttcgtggaaaaatgctgtaaggctgacgacaaggaaacctgttttgccgaggaaggtaagaagctcgtggcagcctcacaggcggctctcggattg

SEQ ID NO: 249369 - DNA, 2007 bp, synthetic construct
  misc_feature 1..2007: note = Description of Artificial Sequence: Synthetic coding sequence
  source 1..2007: mol_type = other DNA
atgaagtgggtttctttcatctcactcctgttcctgttctcctcggcctactccgggagcctggacaagagacacggcgaaggcactttcacgtccgacgttagctcctacctcgagggccaagccgccaaggagttcatagcgtggttggtgaaaggcagacatggagaaggcaccttcacctctgatgtctcgtcatacctcgagggacaagcggcgaaggagtttatcgcctggctggtgaagggacgcgacgcccacaaatcagaggtggcacataggttcaaggatctgggagaggagaatttcaaggccctcgtgctgatcgcgttcgcccagtacttgcagcagtgtccttttgaagatcatgtgaaactggtgaacgaagtgactgaatttgcaaagacctgcgtggcggatgagtccgcggagaactgcgacaaatcgcttcacaccctcttcggtgataagctctgtaccgtggccaccctccgagaaacttatggggagatggccgactgctgtgccaagcaggagccggaacggaacgaatgcttcctgcaacataaggacgataatccgaacctgccgagactggtccggccggaggtggacgtgatgtgcactgcattccatgacaacgaagagacttttctgaagaaatacttgtacgaaatcgcacgccggcacccgtacttttacgctccggaacttctgttcttcgccaagcgatacaaggcggccttcactgaatgctgtcaggctgccgacaaagccgcctgtctgctcccaaagctggacgagctgcgcgatgaaggaaaggctagctcagcaaagcagagattgaagtgcgcaagccttcagaagtttggggagagagcattcaaagcctgggctgtggctcgcctgtcccaaaggtttccaaaagctgagttcgccgaggtcagcaaacttgtgaccgacctgacgaaagtgcacaccgagtgctgtcacggcgatctgctggaatgcgctgatgatcgcgcagacttggccaaatacatttgtgagaatcaggactcgatctcctcgaaactcaaggagtgctgcgaaaagccgctccttgagaagtcgcactgcatcgccgaggtggagaacgacgaaatgccggccgaccttcctagcctggccgctgacttcgtcgaatctaaggacgtgtgcaagaattacgcggaggctaaggacgtttttctgggcatgttcctgtacgagtacgccaggcggcatcccgattacagcgtggtgctcctgttgaggctcgcaaaaacttatgaaactactttggaaaagtgctgtgccgccgccgatccgcacgaatgctatgcaaaagtctttgatgagtttaaaccgcttgtggaagagccccaaaacctcatcaagcagaattgcgaattgttcgagcagctgggagaatacaagttccaaaacgcgttgctcgtgcgctacactaagaaggtgcctcaggtttccactccaactctggtggaggtttcgcggaatctgggtaaggtgggatccaagtgctgcaagcacccagaagcgaaacgcatgccatgtgcggaagattaccttagcgtggttctcaaccagctgtgcgtcctgcatgaaaagaccccagtctcggacagagtgaccaagtgctgtacggaatccctggtgaaccgccggccgtgtttttctgccctcgaagtcgacgaaacctacgttccaaaggaattcaacgccgaaaccttcaccttccatgccgacatctgcaccctgagcgagaaggagcggcagattaagaaacagaccgcgttggtggagcttgtgaagcacaagccgaaagcaaccaaggaacagctgaaagcagtcatggacgattttgcagcttttgtggagaagtgttgcaaagccgatgacaaggaaacttgtttcgcggaggaaggaaagaaactcgtcgcggcgtcgcaagcggctctgggtctt

SEQ ID NO: 249370 - DNA, 2007 bp, synthetic construct
  misc_feature 1..2007: note = Description of Artificial Sequence: Synthetic coding sequence
  source 1..2007: mol_type = other DNA
atgaaatgggtaagcttcatctctctgctgttcctgttctccagtgcatatagcggatccctggataaacgtcatggtgaaggtacctttacgagcgatgtatcttcctatctggagggacaagctgcaaaagagtttatcgcttggttggtgaaagggcggcatggcgaaggcacattcacatctgatgttagctcttatctcgaaggccaggcagccaaggaatttatcgcgtggcttgtgaagggtcgcgatgctcacaagagcgaggtcgcccatcggtttaaagatctgggagaggaaaactttaaggctttggtccttatagctttcgcacagtacctgcaacaatgtccgtttgaggatcacgttaaactggtgaacgaagtgactgagtttgctaagacttgtgttgccgatgaaagcgcagaaaactgcgataaatcactgcacaccctttttggggataaactatgcacagtggccactctgcgggagacttacggagagatggctgactgttgcgcaaaacaagaaccagagagaaacgaatgctttttgcagcataaagatgataacccaaacttgccgcgactcgtccgtcctgaggtcgacgtcatgtgcaccgcgttccacgacaacgaagagacttttctgaaaaagtacttgtatgagattgctagaaggcacccttatttttatgcgcccgaattgttattctttgcaaaaagatataaagccgcctttaccgagtgttgtcaggccgcagacaaggctgcatgcttactccctaagcttgatgaacttcgggacgagggcaaggcctcgagcgccaaacagcggctcaagtgcgctagcctgcaaaagttcggcgagcgagcctttaaggcctgggcagtggccagattaagccaaagatttccaaaggccgaatttgcagaagtgtcaaaactggtcaccgacctcacgaaagtgcacactgaatgctgtcacggtgacctgctggagtgcgccgacgacagggcagacctggctaaatacatctgtgaaaaccaggatagtatctcgtctaaattaaaagagtgctgcgaaaaacctctcctggaaaagtctcattgtattgccgaagttgaaaacgatgagatgcccgccgatctgccatctcttgcagctgattttgttgagagtaaggacgtatgtaaaaattatgcagaagccaaagacgtgttcttgggaatgtttctctacgaatacgctcggcggcacccagattatagtgtagtgctcttgcttagactcgcgaagacgtacgaaaccactctggagaaatgctgtgcagcggctgatccccacgagtgttacgccaaagtttttgatgagttcaagccactggtagaggagcctcagaacttgatcaaacagaattgcgaactcttcgaacaactcggcgaatacaagtttcagaatgcactgctggtccgatacaccaaaaaagttcctcaggtgtctactccaactctggtcgaagtgagtcgtaaccttgggaaggtgggcagtaagtgttgcaaacatcctgaggctaagaggatgccatgcgccgaagactacctgtccgtcgtcctgaatcagctttgtgtgctacacgaaaagacaccagtctccgatcgggttacaaagtgctgtacagaaagcctcgtcaacagaagaccgtgctttagcgccctggaggtcgacgaaacatacgtccctaaagagtttaacgcggagacgtttacatttcacgccgacatttgcactctgagtgagaaagagaggcagataaagaaacaaaccgcacttgtcgaactggtgaaacacaaacctaaggctacaaaagagcagctgaaggctgtgatggatgacttcgccgcttttgtagaaaaatgctgtaaggcagacgataaagagacctgcttcgctgaagagggaaaaaaactggttgcagcaagccaggccgccctaggcctg

SEQ ID NO: 249371 - DNA, 2007 bp, synthetic construct
  misc_feature 1..2007: note = Description of Artificial Sequence: Synthetic coding sequence
  source 1..2007: mol_type = other DNA
atgaaatgggtttcattcattagcctgctgttcctgtttagcagcgcatactccgggtcgctcgataagcgccatggtgaaggtaccttcacaagcgatgtttcgtcatatttggagggacaagcagcaaaggagtttattgcttggctagtcaagggcagacatggcgaggggacgttcactagtgatgtgagttcctatctcgaaggacaggcggccaaggaattcatcgcttggttggtcaaggggcgagacgcgcacaaatccgaggtggctcatagatttaaggaccttggtgaggagaattttaaagcgctggtcttgattgcttttgcgcagtacttgcagcagtgccctttcgaggatcacgtgaagttagttaacgaagttacggagtttgcgaaaacttgcgtggccgacgaaagtgccgagaattgcgacaaatcccttcatactttgttcggcgataagctgtgcaccgttgcgaccctccgggagacatacggagagatggctgactgctgtgcgaagcaggaaccagagcgaaacgagtgctttcttcagcacaaggatgataatccgaatctcccacgactagtcaggcccgaggtcgacgtcatgtgtacagcttttcatgacaacgaggaaacattcctcaagaaatatttgtacgaaattgcccgccgtcatccttacttctatgcccctgagctgctgttcttcgcaaagcgatataaggctgcatttaccgaatgttgtcaagctgccgataaggccgcttgtctcctgcctaagctggatgagcttcgggatgagggtaaagcgtcatctgctaaacaacgtctgaagtgtgctagtctccagaagttcggtgagagggcattcaaggcctgggccgtggcgcgtttgagtcagcgcttcccaaaagctgagttcgcggaggtcagcaagttggttactgatcttacaaaggtccacacagagtgttgccacggcgatcttctcgagtgtgctgatgaccgcgcagacctcgcaaagtacatatgcgagaatcaggactctatcagcagcaaattgaaggaatgttgtgagaaacctcttctggagaagtcgcattgcattgcggaagtggaaaacgatgagatgcctgcagaccttccttccctggcggcggacttcgttgagagcaaagacgtctgtaagaattacgcagaagcgaaagacgtttttctgggcatgttcctgtatgagtacgcaaggcgtcacccagattactcggtggtcctactcctaagactcgcgaagacatatgaaacgacactcgaaaagtgttgtgccgctgcagatccacatgaatgttacgcaaaggtcttcgatgaatttaaaccactcgtggaggagccacagaacctcattaagcagaattgcgagcttttcgagcaacttggagagtacaagtttcagaacgcgctattggttagatacactaagaaggtgcctcaggtgtcaacccctacactggtcgaagtatcacgaaacctcggaaaagtaggttcgaagtgctgtaagcaccccgaggctaagcgtatgccctgcgctgaagattatcttagcgtcgtcctcaatcagctgtgtgtcctccatgagaaaacgcccgtctctgatcgtgtcacaaagtgctgtacggagtccttggtgaacagacgcccttgcttcagtgcgctggaggtggacgaaacttatgtaccgaaagaattcaacgccgaaaccttcacatttcacgccgatatatgcactctgagtgagaaagagcgacaaatcaagaagcagacagctctcgtagaacttgttaaacataaaccaaaggccacaaaggaacagcttaaggctgttatggacgacttcgccgcattcgtggaaaagtgttgcaaggccgatgataaggagacgtgtttcgccgaggagggaaagaaactcgtagcggcttcacaagccgccctcggtctt

SEQ ID NO: 249372 - DNA, 2007 bp, synthetic construct
  misc_feature 1..2007: note = Description of Artificial Sequence: Synthetic coding sequence
  source 1..2007: mol_type = other DNA
atgaaatgggtgtcctttatctcgctgctttttctgttttcatcggcatacagcggatccctggataagcgacacggagagggtactttcaccagcgacgtcagttcttacctcgaaggccaagcagcaaaggaattcatcgcatggcttgttaagggtagacatggcgagggtacctttaccagcgatgtgtcgtcatacctggaagggcaggccgcgaaagagtttatcgcatggctggtcaagggacgtgacgctcataagtccgaagtcgcacataggtttaaagatcttggtgaagaaaactttaaggcgcttgttcttatcgcgtttgcacaatatctccagcaatgccctttcgaagatcatgtgaagttggtcaacgaagttaccgaatttgcgaaaacctgtgtggctgacgaatcagcagaaaactgcgacaagtcgctccacaccctgttcggggataagctgtgtactgtggcaactcttcgtgaaacctacggagagatggctgattgttgcgcaaaacaggaacccgagcggaatgagtgtttcctgcagcataaggacgataatcctaacctcccgcgcctcgtgcgcccggaagttgatgtcatgtgcactgcatttcatgacaatgaagagacgttcctcaaaaagtacctgtacgaaatagcaagacgccacccatacttctacgccccagaactgctgttctttgccaagcgctacaaggcagcgtttaccgaatgttgtcaggcagccgacaaggcagcttgtctcctgcctaagctggatgagctgcgggatgaagggaaagcaagctccgctaaacaacgcctgaagtgcgcatcgcttcaaaagtttggagaaagagcctttaaagcgtgggccgtggcgaggctgtcccagcgatttcctaaggcagaatttgcagaagtgagcaaactcgtgacggatctgaccaaggtgcacaccgaatgttgccatggtgacctgctggaatgtgcggatgatcgagctgatcttgcaaagtacatatgcgaaaaccaagacagtatttcgtcgaaattgaaagagtgttgcgaaaagcctctgctcgaaaagtcgcactgtattgcagaagtggagaatgatgaaatgcccgcagaccttccatcacttgccgcagactttgtggaatcgaaggacgtctgcaagaactacgcagaagccaaggatgtgtttctgggtatgttcttgtacgagtacgcccgtagacacccggactactccgtggtgctgcttctgagactcgcaaagacgtacgaaactactcttgagaaatgttgtgcggcagcagatcctcatgaatgctacgcaaaggtgtttgacgagtttaaacctctcgtcgaagaaccacagaacctcataaagcaaaattgtgagttgttcgagcaactgggagagtacaagttccaaaatgcactgcttgtcagatataccaagaaggtgccacaggtgagcactccaaccctcgtggaggtgtcgcgcaacttgggaaaggtgggctcaaagtgttgcaagcatccagaagcgaagcgcatgccttgtgccgaggattacctttctgtggtgctgaatcagctttgcgtcttgcacgaaaagacccctgtatctgatcgggtgactaaatgttgtaccgagtctcttgtgaacagacgaccatgcttttcggcattggaggtcgatgaaacttatgtgcccaaggaattcaacgcggaaacgttcacttttcatgcagatatatgtaccctctcggagaaagagaggcaaatcaagaagcaaactgctctggtggagctcgtgaagcataaaccgaaagctactaaggaacaacttaaggcagttatggacgacttcgccgcattcgtagagaagtgttgtaaagcggatgacaaggagacgtgtttcgcagaggaaggaaagaagctcgtcgctgcatcacaggcagcactcggtctt

SEQ ID NO: 249373 - DNA, 2007 bp, synthetic construct
  misc_feature 1..2007: note = Description of Artificial Sequence: Synthetic coding sequence
  source 1..2007: mol_type = other DNA
atgaaatgggtaagctttatctctctgctgtttttgttcagttccgcttattctggctcactggacaagcggcacggcgaggggacgttcacttcagatgtgagtagctatctggagggtcaggcggccaaggagtttatagcgtggttggtgaagggccgccacggcgaaggaacctttaccagtgatgtgtcgtcctacctcgagggtcaggccgcgaaggaattcattgcgtggctggtcaaggggcgggacgcccacaagtcagaagttgcgcaccgctttaaagatctcggcgaggagaatttcaaggctctggtacttattgccttcgctcagtatttgcagcagtgtccattcgaggaccacgttaaactggtgaatgaggtgacagaattcgcaaagacatgcgttgccgacgaatcggctgagaactgcgacaaatcccttcatactctgttcggtgacaagctttgcacagttgccaccttacgagagacttacggcgagatggctgactgttgtgcgaagcaggagcccgaaagaaatgaatgttttctccagcacaaggacgataaccccaacctgcccagactggttcgtccggaggtcgacgtcatgtgtaccgcctttcatgataacgaggagacatttctcaaaaagtatctttacgagattgcacggcgtcacccctacttttatgctcccgaactgttgttctttgccaagaggtataaagctgccttcactgagtgttgccaggcggccgataaggccgcctgtctcctgccgaagcttgatgaactgcgcgacgagggaaaggctagttcagctaaacagaggctgaaatgcgcaagtttacaaaagttcggtgaaagagcttttaaggcttgggccgtggcgagattgtcccagcggtttcccaaggctgagttcgccgaggtttctaaactagtgaccgatctcaccaaagtccacactgagtgctgccatggcgacttattggagtgcgccgacgaccgagctgacttagccaaatatatttgcgaaaaccaggactcaatttcaagcaagctaaaagagtgctgtgaaaaaccgttactagaaaagtcccactgtatagcagaggtggagaatgacgaaatgcctgctgatctgccgtccctcgccgccgacttcgtggagagtaaggatgtttgcaagaactatgcggaagctaaggacgtgttcctgggcatgttcctgtatgagtacgcgcgccgacaccctgactacagcgttgttttactgctgaggctggccaagacctatgagaccactctcgagaaatgttgcgcagccgccgacccacacgagtgttatgccaaagtattcgatgagtttaaacctctagtggaggagccacagaatctcatcaaacagaattgcgagctgttcgagcagctcggagaatataagttccaaaacgcgctcctggtccgctataccaagaaagtgccccaggtttccacgccaaccctggtggaggttagccgcaaccttgggaaagtgggctccaaatgctgtaagcatcctgaggctaaacgtatgccatgtgccgaggactacctgagcgtagtcttaaaccaactctgtgtcctccatgagaaaactccagtgtccgacagagtcaccaagtgctgtacagagagcctggttaataggaggccctgcttttcagctctggaagtggacgaaacctacgtgccgaaagagttcaacgctgagaccttcacttttcatgccgacatatgtaccctcagcgagaaggagcggcagattaagaaacagacagctctggtggaattggtgaaacacaagcctaaggcaactaaggaacagttaaaggccgtcatggacgacttcgcagcattcgtggagaaatgctgtaaagctgatgataaagagacgtgcttcgctgaggaagggaaaaagctggtagcagcatcacaggctgctctgggactt

SEQ ID NO: 249374 - DNA, 2007 bp, synthetic construct
  misc_feature 1..2007: note = Description of Artificial Sequence: Synthetic coding sequence
  source 1..2007: mol_type = other DNA
atgaagtgggtgtcattcatcagtctgttgtttctcttctcttcagcctattcaggttcacttgacaaaagacatggagaaggtacttttacgtccgacgtttctagttatcttgagggtcaggcggctaaggaatttattgcctggctggttaagggtaggcacggggagggtacattcacttcggacgtttcttcctatcttgagggccaagctgctaaagaattcatcgcttggctggtaaaaggaagggacgcgcataagagtgaagtcgcacataggtttaaagatctcggtgaagaaaacttcaaagctctcgtgcttattgccttcgcacaatacctgcagcagtgcccattcgaggatcatgttaaattggttaatgaagtgacagagtttgctaagacttgtgtggcagacgagtcggccgagaattgcgataagtcgctccatacactctttggtgataaactatgcactgtcgcgacgctcagagaaacatatggtgagatggcagactgctgcgctaaacaggaaccggagaggaatgagtgctttcttcaacataaggatgataatccaaatttgccacggctcgtcaggcctgaagtcgacgttatgtgcactgcctttcatgataatgaggagacctttttgaagaaatatctatatgaaattgcgcggcgacatccctacttctacgctcccgaactcctgttctttgcgaaaagatataaagcagcttttacggaatgctgtcaggctgcagataaggctgcttgccttcttccaaagctggatgagttaagggatgaaggcaaggcgtcttcggccaagcagcgcttgaaatgtgcttcactgcagaagttcggtgagagggcatttaaagcttgggctgtggcacgcttgtcccaacgtttccccaaggctgaatttgctgaggttagcaaattagttacggacttaactaaagtccacactgaatgctgccatggagatcttctcgaatgcgctgacgacagagccgacctggctaaatacatatgcgagaatcaggattctatcagcagcaaattgaaggaatgttgtgaaaagccacttctcgaaaaaagtcattgcatcgctgaagttgaaaacgacgaaatgccggcagatcttccttcgttggctgcagacttcgtagagtccaaggacgtttgtaagaattatgccgaagccaaggatgtatttttgggcatgtttctatatgaatatgcacgccgccatccagattactctgttgtcctcttgctgaggctggccaaaacatatgaaacgactctagagaagtgttgtgctgccgccgatccgcatgagtgctacgctaaagtctttgacgaatttaagccactcgtcgaggaaccacaaaaccttatcaagcaaaattgtgagctattcgaacagcttggggaatataagttccaaaatgcgttacttgttcgttataccaagaaggttcctcaagtttccactcccactcttgttgaagttagcagaaatctaggtaaggtagggtctaagtgttgtaagcaccctgaggcaaagcgtatgccctgcgctgaagattacctttcagtggtgctcaaccagttatgtgttctccatgaaaagacacctgtttccgaccgagttacaaaatgctgcactgagtctcttgttaacaggaggccttgcttcagcgcattagaggtggacgagacctacgtgccaaaagagtttaacgcagagacatttaccttccatgccgacatctgtactctgtccgaaaaagaaagacaaataaaaaaacaaacggctttggtcgaattggtgaaacataagccgaaggctaccaaggaacaattgaaggctgtgatggatgatttcgcggctttcgttgaaaagtgctgtaaagcggatgacaaagagacatgcttcgcggaagagggaaagaagttagtggcggcctcacaggcagcactcggactt

SEQ ID NO: 249375 - DNA, 2007 bp, synthetic construct
  misc_feature 1..2007: note = Description of Artificial Sequence: Synthetic coding sequence
  source 1..2007: mol_type = other DNA
atgaagtgggtatcctttatcagcctgttgtttctgttcagctccgcatactctggtagtctggataagaggcacggagagggcacgttcactagcgacgtttcttcctatctggaagggcaagccgccaaggaatttatcgcttggcttgttaaaggtagacacggtgaaggcacgttcacgtcagacgtctcatcatatctggaagggcaggcagcaaaagagttcatcgcctggctggttaagggtcgcgatgcccacaaaagcgaggttgcacatcgattcaaagacctgggtgaagagaattttaaagcactggtgctgattgccttcgcacagtacctgcaacaatgtccgttcgaggaccatgttaagctcgtgaatgaagtcactgaatttgcgaagacttgtgttgccgatgaatccgctgagaattgcgacaagtctctgcacactctgttcggggataagttgtgcaccgtcgccacgctgcgcgaaacttatggggaaatggctgactgctgcgcgaagcaagaacctgagagaaacgaatgttttctgcagcataaggacgacaaccctaacctgccgcgactggtacgtccagaggtggatgtcatgtgtaccgccttccacgataatgaggaaacgtttctgaaaaaatacctctatgagattgctaggcgacacccatacttttacgcccccgagctgctgtttttcgctaaacgctacaaagcagcatttacggaatgctgccaggctgcagataaggctgcatgcttattgccaaaactagatgagctgcgggatgaaggcaaagctagctccgcaaagcagcgtctgaagtgtgccagcctgcagaaattcggcgagcgcgccttcaaggcatgggccgtggcacgcctgagccagcggtttcctaaggcggagttcgccgaagtttcgaagctggttaccgatctgaccaaggtccataccgaatgctgccacggcgatttgctggaatgtgccgacgaccgcgctgatctggccaaatatatctgcgaaaatcaggatagcatttcgtctaagctgaaagaatgttgcgaaaaaccgctgctggaaaaatcccactgtattgcagaagtggagaacgatgaaatgccggcggatctgccgtcactggcggccgattttgtcgagagcaaagatgtctgcaaaaactatgctgaggcgaaagacgtctttctcggtatgtttctgtacgaatacgcccgccgccatcctgactattctgtggtgctgctactgcggctggcgaagacctacgaaacaactttagagaaatgttgcgcggcggcagacccgcacgaatgttatgctaaagtgttcgatgagtttaaaccactagttgaggaaccgcaaaacctcatcaaacaaaattgcgaattgttcgaacagctgggcgaatataaatttcagaacgcattgctggtccgatacaccaaaaaggtcccacaggtgtccacccctactctggttgaagtcagccgcaatttaggtaaagtcggctccaaatgctgcaagcaccctgaggcaaagcgtatgccgtgtgcagaagactatctgagcgtggtgctgaaccagctgtgtgtgctgcatgagaaaacccctgtttccgatcgcgtgaccaaatgttgtactgagtcactggttaaccgacgcccttgcttttccgcgctggaagtggacgaaacctatgttcccaaggagttcaatgcagaaacgttcacctttcacgcggatatatgtacgctctccgagaaggaacgccaaattaagaaacagactgccttggtggagctggttaagcacaaacctaaggctactaaagaacaactgaaggcggtgatggacgatttcgcggcttttgtcgagaagtgctgcaaggcggatgataaagagacgtgttttgcggaagaggggaaaaaactcgtcgccgcctctcaagcggcactgggactg

SEQ ID NO: 249376 - DNA, 2007 bp, synthetic construct
  misc_feature 1..2007: note = Description of Artificial Sequence: Synthetic coding sequence
  source 1..2007: mol_type = other DNA
atgaagtgggtttcctttatctcactgctgttcctgttctcctcggcatactcgggatcgctggacaaacgccatggtgagggaaccttcaccagcgatgtctcttcgtacctggaaggacaggccgccaaagagtttatcgcgtggctggtgaagggacgccacggcgaggggacctttacttcggacgtgagctcgtacctggaggggcaggctgccaaggagtttattgcatggctggtcaagggccgcgatgcccataagtcagaagtggcccacagattcaaggatctgggagaggagaactttaaagctctcgtcctgattgccttcgcccagtacctgcagcagtgcccattcgaggaccacgtgaagctggtgaatgaggtgactgaatttgccaagacctgtgtggccgacgaaagcgccgaaaattgcgacaagtcactccacacgctctttggagataagctctgcaccgtcgctactctgagagaaacgtacggagaaatggccgattgctgcgcaaagcaggaaccggaaaggaacgagtgtttcctgcaacataaggacgacaatccgaatcttcccaggctggtgcggcctgaggtggatgtcatgtgtacggctttccacgataacgaagaaactttcctcaagaaatacctgtatgaaatcgccaggcgacatccatacttttacgcgccagaattgctgttcttcgcgaagcggtacaaggctgcgttcaccgaatgctgccaagccgccgataaggccgcctgccttctgcctaagctggacgaactgcgcgatgaaggtaaagcgagcagcgcaaagcagagactcaagtgcgcttccctgcagaagtttggagaacgcgccttcaaggcctgggcggtcgcccggctgtcccagagattcccgaaggcggagtttgccgaagtctccaagctggtgaccgacctgactaaggtgcacacggaatgctgtcatggagatctcctggaatgcgcggacgatcgggcggatctggcaaaatacatatgcgagaaccaagattccatcagctcgaagctgaaggagtgttgtgaaaagccactgctcgaaaagagccattgcattgccgaggtggagaacgacgagatgccggcggatctgccatcgctcgcagcggattttgtggagtcgaaggacgtgtgtaagaactacgcggaggcaaaagatgtgttcctggggatgttcctctacgagtacgcgcgccggcatccagactactccgtcgtcctgctcctgagactggccaagacgtatgagactacgcttgaaaagtgctgcgcagcggccgacccacatgaatgttacgcgaaagtgttcgatgaattcaaaccgctcgttgaggagccacaaaacctcatcaagcaaaactgcgagctgttcgagcaactcggagagtataagttccaaaacgccctgctggtccggtacaccaagaaggtcccacaggtgtccactccaaccctggtcgaggtcagcagaaatctgggaaaggtgggaagcaagtgctgtaagcaccctgaagcaaaaagaatgccttgcgccgaagattatcttagcgtggtgctcaaccagctgtgcgtcctgcacgaaaagactccggtgtcggaccgcgtgaccaagtgctgtaccgagtcactggtgaatcggcggccatgcttctcggctttggaggtggacgaaacctacgtgccgaaggaattcaacgcggagactttcactttccatgccgatatttgcaccctgtccgaaaaggaaaggcagatcaaaaaacaaaccgcacttgtggaattggtcaaacacaagccgaaggctacgaaggaacagcttaaagctgtgatggatgacttcgccgctttcgtggaaaaatgctgtaaggcggacgacaaggagacttgctttgcggaagagggcaagaaactcgtggccgcatcacaagcggccctgggactg

SEQ ID NO: 249377 - DNA, 2007 bp, synthetic construct
  misc_feature 1..2007: note = Description of Artificial Sequence: Synthetic coding sequence
  source 1..2007: mol_type = other DNA
atgaagtgggtcagctttatctctcttcttttcctgttctcctcagcatactcgggctcactcgataagagacacggtgaaggtacgtttacgtcggatgtgtcgtcgtaccttgagggacaagcggcgaaggagtttattgcatggcttgttaaaggtagacacggagaggggacttttaccagcgacgtgtcctcatacctggagggacaggccgccaaggaattcatcgcctggttggtgaagggaagagatgcccataaatcggaagtggcacatagattcaaggacttgggggaagagaatttcaaggcgctcgtgctgatagcatttgcacaataccttcagcaatgcccatttgaagatcatgtgaaacttgtgaatgaagtgacggagtttgctaagacctgtgttgcagacgaatccgcagaaaattgcgataaaagcctgcacacgctgtttggtgataaactctgtaccgtggccaccctgcgggaaacgtatggagaaatggcggattgttgcgcgaaacaagaacctgaacggaatgaatgtttccttcaacataaggatgataaccccaacctcccaagactcgtgaggccagaagttgatgtcatgtgcactgccttccacgataacgaggaaacttttcttaagaagtacctctacgaaattgcaagaaggcatccatacttttacgcaccggaactgctcttttttgccaagagatacaaggcagcatttactgaatgttgccaagcagcggataaggcagcctgtctgcttcccaagctggacgaactgcgcgacgagggcaaagcatcaagcgcaaagcaacgtcttaagtgtgcgtctcttcagaagttcggagaaagggcgtttaaagcatgggcggtggcacggctctcacagcggtttcctaaggcagaatttgctgaagtgtccaagctcgtcactgatttgaccaaggtgcacaccgagtgttgccacggcgacctcctggaatgtgcagatgacagggcagaccttgcgaagtacatttgcgagaaccaagattcgatttcatcgaagctgaaagaatgttgcgagaagccacttctggaaaagagccactgtattgccgaggtggaaaatgacgagatgccagcagatctcccttctctggcggccgatttcgtcgagtcgaaggacgtttgtaagaattacgcagaggctaaggacgtgttcctgggcatgtttctctatgaatacgctcgaaggcaccctgattacagcgtggtgttgcttcttaggctggcaaagacttatgaaactacgctggagaagtgctgcgcagccgccgaccctcacgagtgttacgcaaaagtgtttgacgaattcaagcctctcgtggaagaacctcagaaccttatcaaacaaaattgtgagttgttcgagcaactgggagaatacaagttccagaacgcactgctggtgcggtacaccaagaaggtccctcaggtgtcgacccccactctggtcgaagtctcgcggaacttgggaaaggtcggaagcaagtgttgtaaacatccagaggcgaagcgaatgccttgtgctgaggattacctgagtgttgttttgaatcagctgtgtgtgctgcacgaaaagacccccgtgtcagacagagtcaccaagtgctgtactgagagccttgttaaccggcgcccctgcttctcagcccttgaagtcgacgaaacttacgtgcccaaagagtttaacgcggaaacttttacgttccatgccgacatttgtaccctgagcgaaaaggaacgccaaatcaagaagcaaaccgcgcttgtggagctggtgaagcacaaacctaaggctactaaagagcagcttaaagcggtgatggacgacttcgcagcattcgtggaaaaatgctgcaaagctgatgataaggaaacttgcttcgcagaggaggggaaaaagttggtggctgccagccaggcagcgctcggcctc

SEQ ID NO: 249378 - DNA, 2007 bp, synthetic construct
  misc_feature 1..2007: note = Description of Artificial Sequence: Synthetic coding sequence
  source 1..2007: mol_type = other DNA
atgaagtgggtatcgttcatttctttgctcttcctattctcgagcgcttattccgggtctctagacaagaggcacggagagggcacatttacctctgatgtgtcgtcatacctggagggtcaggctgccaaggagtttatcgcctggctcgtaaagggtcgacatggcgagggcacgttcacaagtgatgtctcttcctacctcgaaggccaagccgcgaaagagtttatcgcttggttggtcaaagggcgcgacgcccacaagtccgaggtagctcaccggtttaaggacctcggtgaggaaaattttaaggccctggtgctgatcgcgtttgcgcagtatctgcagcagtgcccctttgaagatcatgtaaagctagtcaatgaagtgactgagtttgccaaaacttgcgtcgccgatgaatcagcggagaactgtgacaagagcctgcatactttgttcggcgacaagctgtgtaccgtggcgacactccgagagacttacggtgaaatggccgactgttgtgccaagcaggagcccgagcggaacgaatgcttccttcagcacaaggacgataacccgaacctgccgaggctggttcggcccgaggttgacgtcatgtgtacagctttccatgataacgaagaaacctttctcaagaagtatctctacgagattgctcgtaggcacccttacttctatgctcccgaactgctctttttcgcaaagcgatacaaggccgccttcactgaatgttgccaggcggcagacaaggcagcgtgtcttctgcccaagttggacgaactacgcgacgagggtaaagcctcttctgcgaaacagagattgaagtgtgcttcactccagaaatttggtgagcgagctttcaaagcgtgggctgtagcacgcctatctcagcggttcccaaaagctgaattcgccgaagtctcgaagctcgtgacagatctaactaaggtgcacactgagtgctgccatggagacctcctagagtgcgctgatgatcgggctgatctggcaaagtatatctgcgagaaccaggacagtattagctcaaagcttaaagaatgctgtgaaaagcctcttttggagaaaagtcactgtatcgccgaggtggagaacgatgagatgcccgctgacctgccaagcctcgctgcggacttcgtagaaagcaaggatgtgtgcaaaaactacgctgaggctaaagacgtgtttctcggaatgttcctctatgaatacgcaagaaggcaccctgactattccgtcgtgctcctcttgaggttagcaaagacctatgagaccactttggaaaaatgctgcgccgccgcagatccccacgagtgctacgcaaaggtgtttgacgagttcaaacccctcgtcgaagagccacagaacctgatcaaacagaactgtgagctcttcgagcagttgggcgagtacaagttccagaacgctctccttgtgcgctataccaaaaaagtgccacaggtgagcacacctacactggttgaggtgtctagaaacctcggaaaggttggatccaaatgctgcaagcacccggaggccaaacggatgccatgcgccgaagactatctcagcgtcgtcctcaaccagctgtgcgtcctgcatgagaaaacacctgtgtccgatcgtgtgactaaatgttgcactgaatctctcgttaaccgccgcccctgcttcagcgctctggaggtcgatgaaacctatgtaccaaaagagttcaacgctgagacatttacgtttcatgctgatatttgtactttatctgagaaggaacggcagattaagaagcagacagccctcgtcgaattggttaaacacaagcctaaagctactaaggaacaattaaaagccgttatggacgactttgccgcgttcgtggaaaagtgttgtaaagcggatgacaaggagacatgcttcgctgaggaaggcaagaaactcgttgccgcctcccaggcagcccttggcctg

SEQ ID NO: 249379 - DNA, 2007 bp, synthetic construct
  misc_feature 1..2007: note = Description of Artificial Sequence: Synthetic coding sequence
  source 1..2007: mol_type = other DNA
atgaagtgggtcagctttatctctctcctcttcctcttctcgtcagcttactccggatcactggacaagagacacggtgagggaaccttcacttccgacgtgagtagctacctcgagggtcaggccgccaaggaattcatcgcctggctggtgaaaggccgtcatggagaaggaaccttcacctccgatgtgtccagctatctcgaaggccaggccgctaaggagttcattgcgtggctggtgaagggacgggacgcacataagtccgaggtggctcatcggttcaaggacctcggagaggagaactttaaggcactggtgctgatcgctttcgctcaatacctgcaacaatgcccgtttgaagatcatgtgaagttggtgaatgaagtaactgagttcgctaaaacttgcgtcgcagacgagtcagccgaaaactgcgacaagtctcttcataccctcttcggcgacaaactgtgcactgtcgccaccctgagagaaacctacggggaaatggccgactgttgtgccaagcaggaaccggaacgcaatgagtgtttcctccagcacaaggatgataatccgaacctgccacgactggtgcgccctgaggtggacgtcatgtgcacggccttccatgacaacgaagaaaccttcctgaagaagtacttgtacgaaatcgcccgccgccacccttacttctacgccccggaactcctgtttttcgccaagcgttacaaggccgcgttcactgagtgttgtcaggccgcggacaaagccgcctgtctgctgcccaagctggatgaacttagagacgaaggaaaggcatcctcggccaaacagcggctgaagtgcgcgtccctccagaaattcggagagagagcttttaaggcctgggcagtggccaggctctcccaacgcttcccgaaagccgagtttgctgaagtcagcaagctggtgactgaccttaccaaggtgcacacggagtgttgtcacggagacttgcttgaatgcgcggatgaccgcgcagacctcgctaagtacatttgcgagaatcaagactcgatctcgagcaaattgaaggagtgttgcgagaaaccgcttctggaaaagtcccactgtattgccgaagtcgagaacgacgagatgcctgcagacctgccgagcctggctgcagacttcgtggaatccaaagacgtttgcaagaattacgcggaagccaaggatgtgtttctgggaatgtttttgtacgagtacgcaaggcggcatccagactactcggttgtgctgttgttgagactggccaagacctacgaaactacgctggagaagtgttgcgccgccgctgacccacacgaatgctacgcgaaagtgttcgacgagttcaagccgctggtggaggagccgcaaaacctcatcaagcaaaactgcgaacttttcgagcagctcggagaatacaagttccagaacgcactcctggtgcggtacactaaaaaggtgccacaggtttcgactcctaccctggtcgaggtgtcgaggaacctcgggaaggtgggcagcaagtgctgcaagcatccagaggcaaagaggatgccatgcgccgaagattacctctccgtcgtgctgaaccaactttgcgtcctccatgaaaagacgcctgtgagcgatagagtgactaagtgttgcactgaatcccttgtgaatcgcaggccgtgtttctcagccctcgaggtggacgagacttacgttcctaaggagtttaatgcggaaactttcacgttccatgccgatatctgcactctcagcgaaaaagaacgccaaatcaaaaagcaaaccgctctcgtggaactggtgaagcacaagccgaaggcgacgaaggagcagctcaaagccgtgatggatgactttgccgcgttcgtggagaagtgctgtaaggctgacgacaaggaaacctgctttgctgaagagggtaagaaactggtggccgcctcccaagccgcactcggattg

SEQ ID NO: 249380 - DNA, 2007 bp, synthetic construct
  misc_feature 1..2007: note = Description of Artificial Sequence: Synthetic coding sequence
  source 1..2007: mol_type = other DNA
atgaagtgggttagctttataagccttctttttcttttctctagcgcttactcaggctctcttgataagaggcacggagaggggaccttcacaagcgacgtgagtagctaccttgagggacaggccgcaaaagaattcattgcctggctggtaaaagggagacatggggaggggaccttcaccagtgatgtatcatcctacctggaaggccaggcagctaaggaatttattgcctggctggtgaagggcagggatgcccataagagcgaagtggcccacagatttaaagatctcggagaggaaaacttcaaggccctggtgctgattgcctttgctcaatacctacagcagtgcccttttgaggatcacgtcaagctggttaacgaggtgactgagttcgccaaaacctgtgtggctgacgaaagtgctgaaaactgcgataaatcactgcatacactgttcggcgacaagctgtgtacagtggctactttgagggagacttacggcgagatggccgattgttgcgctaaacaggagccggagagaaacgaatgcttcctgcagcacaaagatgacaatccgaatttgccccggctggtgcgcccggaggtcgatgttatgtgcactgcttttcacgataatgaagagactttcctgaaaaagtacttgtacgagatcgcaagacggcacccatatttttacgctccagagctcctgttttttgctaagagatataaggctgctttcacagagtgctgtcaggcagctgataaagcagcgtgcctgttgcccaaactggatgagctccgtgacgagggtaaggcatcctcagccaagcagcggcttaaatgcgcctcacttcagaaattcggggagcgcgcctttaaggcctgggccgtcgcacggcttagccagcgtttccctaaggcggagttcgctgaggtgagcaaactagtaacagacctcacaaaagtgcacacagaatgttgtcacggcgatctgttggaatgtgccgatgatcgcgcagacctagctaagtacatttgtgaaaatcaggacagcatatcttccaaactgaaggagtgttgcgaaaagcccttgcttgagaagagccattgtatagctgaagtggaaaacgacgagatgcccgccgatttgcctagcctcgcagccgattttgttgagtcaaaggacgtgtgcaagaactatgcggaggccaaagacgtctttcttgggatgttcctgtacgagtacgcaagacgtcatccggattatagtgtggtactgttgctaaggctcgccaaaacatatgaaactaccctggagaaatgttgcgctgccgctgatccccacgagtgttacgccaaagtttttgacgagttcaagccgctggtggaggaaccgcaaaacctgatcaaacaaaactgcgaactatttgagcagctgggagagtacaagtttcagaacgcgctactggtgcgctacactaagaaagtgccacaggtctccacccccacgctggttgaggtgtctcgaaatctgggaaaagtaggcagcaaatgctgtaagcaccctgaagccaagcgcatgccatgcgccgaagactatctgagtgtagtgctgaaccagctttgcgtcctgcacgaaaaaaccccagtctccgatcgagtcaccaagtgttgtaccgagtccctggtcaatagacgtccctgctttagtgctctcgaagttgacgagacttacgtccccaaagagttcaatgcagagacatttacatttcatgccgatatctgcaccctaagcgaaaaggagaggcagattaagaaacagacagccctggttgagcttgtcaaacacaagcctaaagctaccaaggagcagttaaaggcggtgatggatgattttgccgcttttgtggagaaatgttgcaaggcggacgacaaggagacatgcttcgctgaagaaggtaaaaaattagtcgcagcctcacaagccgctttgggtctg

SEQ ID NO: 249381 - DNA, 2007 bp, synthetic construct
  misc_feature 1..2007: note = Description of Artificial Sequence: Synthetic coding sequence
  source 1..2007: mol_type = other DNA
atgaagtgggtcagcttcatctccttgctgtttctctttagctccgcttactcgggatcgttggacaagcgccacggggagggcaccttcacttcggatgtgtcgtcgtacctcgaaggacaagccgccaaggaattcatcgcgtggctggtgaagggacgccacggcgaagggacgttcacgtccgacgtgtcatcgtacctggaaggacaagcggccaaagaattcatcgcctggctggtcaagggaagggatgctcacaagagcgaagttgcgcaccgattcaaggaccttggagaagaaaacttcaaggcactggtgctcatcgctttcgcacagtatctccaacaatgcccattcgaggaccatgtcaagctcgtcaatgaggtcactgaattcgccaagacgtgcgttgccgacgaatccgcagaaaattgcgacaagtccctccacaccctgttcggagataagctgtgcactgtcgcgaccctcagagaaacttacggagagatggcggattgctgcgcaaagcaggagcctgagagaaatgaatgcttcctgcagcacaaggacgacaaccccaatctgccacgcctggtccgcccggaagtggacgtcatgtgcactgcctttcatgataacgaggaaaccttcctgaaaaagtacctgtacgaaattgcccggaggcatccgtacttctacgcccctgagcttctcttcttcgcaaaacggtacaaagcggcttttaccgagtgctgccaggccgcagataaggctgcatgcctcctcccgaaactcgatgagctgcgcgacgaaggaaaagcctcctcagctaaacaacggctgaaatgcgcctcgctgcagaagtttggggagagagcgttcaaggcttgggcagtggcgcggctgtcccaacggtttcccaaggccgagttcgcggaggtgtctaagctggtgaccgacctgaccaaggtccacaccgaatgctgccacggtgatctcctggagtgcgccgatgacagagccgaccttgcaaagtatatctgcgagaaccaggactccatcagctccaagctcaaggagtgctgcgagaagcccctgttggagaagtcacactgcatcgctgaggtggagaacgacgaaatgccagctgatctgccatcgctggcggccgacttcgtggaatcgaaggatgtgtgcaagaactacgcagaagcgaaggacgtgttcctgggcatgtttttgtacgaatacgcgcgccggcacccggattactccgtcgtgctcctgcttcggctggccaagacttacgaaaccaccctggagaaatgttgcgcggcagcggacccacatgaatgttacgcaaaggtctttgacgagttcaagcctctggtggaggagccgcaaaatctgatcaaacagaactgcgaactttttgaacaactcggagaatacaagttccagaatgcgttgttggtgcggtacaccaagaaggttccgcaggtcagcaccccaactctggtggaagtgtcgagaaacctgggcaaggtcggtagcaagtgctgcaaacacccggaggcaaagagaatgccttgtgcagaggactacctcagcgtcgtgctgaaccaactctgtgtgctccatgaaaagactccggtttccgaccgggtgaccaaatgctgcaccgaatccttggtcaaccgcagaccgtgcttttcagcactggaagtggacgaaacgtacgttccgaaagagttcaatgccgaaactttcacgttccatgcggacatctgcaccctctccgagaaggagcgccagatcaagaagcagaccgctctggtggagctggttaagcacaaacccaaggctaccaaggaacagctcaaggccgtgatggatgatttcgccgcattcgtggagaagtgctgtaaagcagacgataaggaaacgtgtttcgcagaggaggggaagaagctggtggctgcctcacaggccgccctgggactg

SEQ ID NO: 249382 - DNA, 1146 bp, synthetic construct
  misc_feature 1..1146: note = Description of Artificial Sequence: Synthetic coding sequence
  source 1..1146: mol_type = other DNA
atggcactgcagggtatctctgttgtcgaactctccggactggctccaggacccttttgtgccatggttcttgccgacttcggggccagagtggtacgggtggatagacccggaagccgatacgatgtaagtcgcttaggtcggggaaagcggtcactcgtgctagatctgaaacagcctcgcggagctgcagtgctgaggaggctgtgtaagcgcagcgacgttctgttggaacccttccgcagaggagtaatggaaaagcttcagctgggacccgaaatattacagagggagaaccctcgcctcatttatgcgcgactgtcagggtttggtcaatctggttcgttctgtagattggccggtcacgacataaattacctagcactgtcaggcgtcctttcaaaaatcgggagaagtggtgagaacccatacgctcccctcaacctccttgccgatttcgccggaggtggtttgatgtgcgctttgggcatcatcatggctttatttgatcggacccgtacagggaagggacaggtcattgatgccaatatggtggaaggcaccgcttatctttcatcattcctatggaagacccagaagctaagcttatgggaggcgcctaggggacagaacatgttagatgggggtgcccctttctacacaacttatcggacagcagatggggaattcatggctgttggggccattgaacctcagttctacgaactgctgataaaaggcctaggcttgaagtccgatgaacttcctaaccagatgagcatggatgactggcctgagatgaagaaaaaattcgcagatgtttttgccgagaagaccaaggctgaatggtgtcagatttttgatggaactgacgcctgtgtaacacccgtactcacgttcgaggaggttgtgcaccacgaccataataaggagagaggcagcttcataacttctgaagaacaggacgtgtctccacgcccagccccactgctgctgaacactcccgcaatacctagttttaaacgcgatccctttattggagagcatactgaggagattttagaagagttcgggttcagtcgcgaagaaatctatcagctcaactcggacaaaatcatcgagtcaaacaaagttaaggcatcactc

SEQ ID NO: 249383 - DNA, 1146 bp, synthetic construct
  misc_feature 1..1146: note = Description of Artificial Sequence: Synthetic coding sequence
  source 1..1146: mol_type = other DNA
atggctttacaggggatctcagtggtggagctctcaggtctcgcccctggtcctttctgtgctatggtattggccgacttcggggcccgggtcgtgcgcgttgatcgccccgggtccagatatgatgtctctcggttgggacggggaaagcggtcactggtgctggatctgaagcaaccacgcggggctgctgtgttgcgacggctgtgtaagagaagtgatgttctcctggagccctttcgtcgcggagtgatggaaaagctacagctcggccccgagatcctccagcgcgaaaacccgcggttgatctacgctaggttgtccggttttggccaatctggatctttttgcagactcgctgggcacgacatcaactacctcgccctcagtggagtgctgagcaagatcgggaggagtggagaaaatccttacgcccccctgaatctcctcgcagacttcgccggtggcggtcttatgtgtgcattgggcatcattatggccctgtttgataggacaaggacaggcaaaggtcaggttatagacgccaacatggtggagggcaccgcctatctgagttcttttctctggaagacccagaaactgtctctgtgggaggcgccccgaggccagaacatgctggatggaggtgcccccttttatactacatacagaactgcggacggggaattcatggccgtgggcgccatcgagccccagttctatgagctgctgatcaagggtctgggattgaaatctgatgaactgccaaatcagatgagtatggacgattggcctgagatgaaaaagaagttcgccgacgtgttcgcagagaaaaccaaggctgaatggtgccagattttcgatggaacagacgcctgcgtcacaccagttctgacgttcgaagaagtggtacaccatgaccacaacaaggagcgtggttcctttatcacttcagaggagcaggacgtgtcaccccgccctgccccccttctgctgaatacacccgcaatcccatccttcaaaagggatccttttattggcgagcatactgaagagattctggaggagtttggcttcagtagggaagaaatctatcagctgaattctgacaagatcattgagtctaataaggtgaaagcttctctg

SEQ ID NO: 249384 - DNA, 1146 bp, synthetic construct
  misc_feature 1..1146: note = Description of Artificial Sequence: Synthetic coding sequence
  source 1..1146: mol_type = other DNA
atggccctgcaaggaattagcgtggtggaactcagcgggctggctcctggaccattttgtgccatggtgttggcagattttggtgcaagagtggtccgcgtggaccggcctggatcccgctacgatgtttcacggctgggcagaggaaagagatccctcgtgcttgacttgaagcaaccacgcggtgcggcagtgcttagacggctctgcaaacggtcagacgtcctgctggaaccctttcgcagaggtgtgatggaaaaacttcaactgggacctgaaatcctgcagcgcgagaacccacgactgatctacgcccggctttccggctttggccaatcggggtccttttgtcgtctcgcgggccatgacatcaattatctcgctctttcaggcgtgcttagcaaaattggcagaagcggagagaacccttacgcgcctcttaatctgcttgcggattttgccggaggggggcttatgtgtgcattgggaatcattatggcactgtttgatcgcaccaggactggaaaggggcaggtcattgacgcaaacatggtggagggtaccgcatacctttcgtcatttctctggaaaacgcaaaaactctcactgtgggaggcacctaggggacagaatatgcttgatggtggcgcccctttttacactacgtacagaactgccgacggagaattcatggccgtgggtgcaatcgagcctcaattctacgagcttctgatcaagggactgggtctgaaatccgatgaactgccaaatcagatgtcgatggatgattggcctgagatgaaaaagaagtttgcagatgtctttgccgaaaagactaaggctgaatggtgccagatcttcgatggtactgatgcatgcgtcacccccgtcctcactttcgaagaagtcgtgcatcatgaccacaataaagagcgcggttcgttcattacttcggaggaacaggatgtctcgcctcgacctgcacctcttcttctcaatacccccgcgattccttccttcaaacgcgatccctttattggggagcacactgaagaaattcttgaggaatttggattctcgcgtgaggagatttatcagctgaactccgataagattattgagagcaacaaggtgaaagcgagcctc

SEQ ID NO: 249385 - DNA, 1146 bp, synthetic construct
  misc_feature 1..1146: note = Description of Artificial Sequence: Synthetic coding sequence
  source 1..1146: mol_type = other DNA
atggccctccagggcataagtgtggtcgagttgtccggcctcgcaccaggccccttttgcgcaatggtgctggctgacttcggggcaagagtggtgcgggtagacaggccaggctcccggtatgatgtgtctagactaggcagagggaaacgcagcctcgtgctggatctcaagcagccccgcggagcagcggttttgagaaggctctgtaagagaagcgacgttctactcgagccttttcggcgcggggtgatggaaaaactacaattggggcccgagatcctgcaacgcgagaaccccagactgatctatgcccgcctgtcgggattcgggcagagcgggtccttctgccgtctggccggccatgacattaactacctcgctctgtccggcgtcctgagtaaaatcgggcgatccggggagaacccatacgcccccctgaacctgctagcagatttcgcaggtggcgggttaatgtgcgctctcggaattattatggccctattcgacaggacacgtacaggcaaaggccaggtgattgacgccaacatggtggaaggtaccgcctatctaagcagctttctttggaagacgcagaagctgtccttgtgggaggctccgaggggacagaatatgctggacggcggagcaccattctacacgacctatagaactgctgatggagagttcatggccgtcggagccatagagccccagttttacgaacttctgataaaaggcttaggactcaagagtgacgaactgccgaaccaaatgtccatggacgactggcctgagatgaaaaaaaagtttgcggatgtgtttgctgagaaaaccaaggctgagtggtgccaaatttttgatggcaccgatgcctgtgttaccccggttctaactttcgaagaggttgtgcatcacgaccacaataaggaaagaggttctttcattacgagtgaggaacaggatgtttctcctagaccggcccctttgctcctcaacacccctgccattccgtcatttaaacgggacccttttatcggtgaacacaccgaggaaatcttagaggagttcggtttttctcgagaggagatctaccagctgaattcagacaaaataattgagagtaataaggtcaaggcttcactg

SEQ ID NO: 249386 - DNA, 1146 bp, synthetic construct
  misc_feature 1..1146: note = Description of Artificial Sequence: Synthetic coding sequence
  source 1..1146: mol_type = other DNA
atggcccttcaggggatctccgttgtcgagctgtccggacttgctcccgggccattctgcgccatggtcctcgccgattttggagctcgggttgtcagagtggatcgacccggaagtagatacgacgtctcccggttagggaggggcaaacgttccttggtgctggatttaaagcagccgcgcggcgcggccgtactgcggcgcctctgcaaaaggagtgatgtgttactggagccctttagaaggggagtgatggagaaattgcagctgggacctgagatcctccagagggagaaccccagacttatttatgcaagactgagcgggttcggccagtcaggcagcttttgcagattggccggccacgacattaactatttggccctaagcggagtgctctcgaaaatcgggcgctccggcgagaatccatacgctcctcttaatttgctcgcagacttcgcaggaggcggtcttatgtgcgccttaggaattatcatggccctgtttgacaggacacgcactggcaaaggccaggttatcgacgcgaacatggtggaaggcacggcttacttgtcctccttcctgtggaagactcagaagctctctctatgggaagctcctcgcggtcagaacatgctggacggaggcgcccccttttacaccacgtatcggaccgccgacggagagttcatggcagtcggcgcgattgaaccacaattctatgagcttcttattaagggactgggcctgaaatccgatgagctgcctaatcaaatgagcatggacgattggccagaaatgaagaagaaatttgctgatgttttcgcagagaaaaccaaggccgaatggtgccagatcttcgacggcacagacgcctgcgtaacaccagtgttaactttcgaagaagtggtgcatcacgatcataacaaggaacggggctcgttcatcaccagtgaggaacaagatgtgtcaccccgacccgcccccctcttactcaataccccggccattcccagcttcaagcgtgatcccttcattggagagcacaccgaggaaattttggaagagttcggcttttcacgagaggagatctaccaattaaattctgacaaaatcattgagtccaataaagtaaaggctagcctc

SEQ ID NO: 249387 - DNA, 1146 bp, synthetic construct
  misc_feature 1..1146: note = Description of Artificial Sequence: Synthetic coding sequence
  source 1..1146: mol_type = other DNA
atggcccttcagggaatttcagttgtggagctcagcggcctcgcccctgggccgttctgcgctatggtcttggctgacttcggagctagggttgttcgcgtcgacagaccaggatccagatacgatgtgagcaggcttgggcggggtaaaaggagcctagttcttgacctgaagcagcctagaggcgcagccgttctgagacgcctttgcaaaagaagtgacgtcttgttggagcctttccgacgcggggtgatggagaaactgcagctcggccccgaaatcttgcaaagagagaaccctcgcctgatctatgcgaggctcagcggctttgggcaatccggttctttctgtcggctggcaggccatgatatcaactacctggcactctcaggggtgcttagcaaaatcggacggagcggagagaacccttatgctccattgaacctgttggcagacttcgctggggggggcttgatgtgcgccctgggaatcatcatggcactgttcgatcgcacaagaactggcaaaggccaggtcatagacgcaaacatggtggagggaacagcttacttgtctagcttcctgtggaagacccagaagctgtccttgtgggaggctccacggggccaaaacatgctggacggcggcgctcctttctacactacctaccgcactgcagacggggaattcatggctgtgggagcaattgagcctcaattctacgagttgttgatcaaaggtctcggcttgaagagtgatgagctgccaaaccaaatgagtatggacgattggcccgaaatgaagaagaagttcgcggatgtcttcgctgagaaaaccaaggccgaatggtgccaaattttcgacggcactgacgcttgtgtgacacccgtcctgactttcgaagaggtggtgcaccacgatcataacaaggaacgcggaagcttcattacttcagaggaacaagacgtctcccctcgccctgcacctctcctgctgaacactcctgcgataccttccttcaagcgcgaccctttcataggagaacacactgaggagattctggaggagttcggattttctagggaagaaatttatcaattgaacagtgacaagatcattgagtcaaacaaagtcaaagccagcctt

SEQ ID NO: 249388 - DNA, 1146 bp, synthetic construct
  misc_feature 1..1146: note = Description of Artificial Sequence: Synthetic coding sequence
  source 1..1146: mol_type = other DNA
atggctctgcaaggcatttccgtggtggaattgtcggggctcgcgcctggaccgttttgtgcgatggttctggctgatttcggtgcccgagtggttagagtcgataggcctggatcgcgctacgatgtgtcaaggcttggtcgtggcaagcggtcgctggtgctggatttgaagcaacctcgcggcgcagccgtgctcaggcgcctctgtaagagaagcgatgtcctgctcgaaccctttagacgtggggtgatggaaaagttgcagcttggcccggaaatcctgcaacgtgagaaccccaggctgatttacgcccgactcagcggttttggtcagtcggggagcttttgtcgcctggccggacacgacataaactacctcgcactttccggcgtcctgtccaaaatcggacggagcggggaaaacccatatgcacctcttaacttgctggcagactttgctggcggaggactgatgtgcgcattggggatcattatggcactctttgataggactcggacgggtaagggacaggtgattgatgcgaacatggtggaaggaaccgcatatcttagctcctttctgtggaaaacccaaaaactttctctttgggaggcgccaagaggacagaacatgctggatggtggtgcaccattctatacgacttatcgtaccgcggatggagaattcatggcagtcggggctattgagccacaattctacgaacttcttatcaaaggtcttggtctgaagtcggacgaactgcccaatcagatgtcgatggatgactggccagagatgaagaagaaatttgcggatgtctttgcagaaaaaactaaggcggaatggtgccaaatctttgacggaactgacgcttgcgtgaccccagtccttacttttgaggaggtggtccaccatgatcataacaaagagagaggttcgttcataacgtccgaagaacaagacgtgtcccccagacctgcccctctcctcctgaataccccggccatcccctcatttaagagagatccgttcataggcgagcataccgaggagattctcgaagaatttggtttttcaagagaagagatctaccagcttaattctgacaagattattgaatcaaataaggtgaaggcatccctc

SEQ ID NO: 249389 - DNA, 1146 bp, synthetic construct
  misc_feature 1..1146: note = Description of Artificial Sequence: Synthetic coding sequence
  source 1..1146: mol_type = other DNA
atggcactccaaggaatttcagtcgttgaattaagtggattagcaccaggacctttttgtgctatggtgttagctgattttggagctagagtagtaagagtcgatagaccaggttcacgatatgatgttagtagacttggtagaggtaaaagaagtttggttttagatttaaaacaacctagaggagctgcagttttaagaagattatgtaaaagatcagatgttttgttagaaccatttagaagaggagttatggaaaagttacaattaggtcctgaaatattacaaagagaaaatccaaggctcatttatgcacgattatctggatttggacaaagtgggtcattttgtagattagccggtcatgacattaattatttagctttatctggagttcttagtaaaattggtagatcaggtgaaaatccatatgcaccattaaatcttcttgcagattttgcaggaggaggattaatgtgcgcacttggaattattatggctctttttgatagaactagaactggtaaaggacaagtaatagatgcaaatatggttgaaggaacagcatatctttcatcttttctttggaagacccaaaaactttcgctttgggaagctcctagaggacaaaatatgcttgatggaggtgcacctttttatactacctatagaacagcagacggagaattcatggccgttggagctatagaaccacaattctatgaattattgatcaaaggattaggtttaaaatcagatgaattgcctaatcaaatgtcaatggacgactggccagaaatgaaaaaaaaatttgctgatgtatttgctgaaaagactaaggctgaatggtgtcaaatttttgatggtactgatgcatgtgtaactccagttttaacttttgaagaagttgttcatcatgaccataataaagaaagaggatcatttattacaagtgaagaacaagatgtatcacctaggcctgctcctttacttcttaataccccagctattccatcatttaaaagagatccatttattggagaacataccgaggaaattcttgaagaatttggattctctagagaagaaatatatcaattaaattctgacaaaattatcgaatcaaataaagtaaaagctagttta

SEQ ID NO: 249390 - DNA, 1146 bp, synthetic construct
  misc_feature 1..1146: note = Description of Artificial Sequence: Synthetic coding sequence
  source 1..1146: mol_type = other DNA
atggctttacaaggcatcagcgttgtcgagctgtctgggctggctcctggtcccttctgcgccatggtcctagctgactttggggcaagagttgtacgggtcgaccgcccagggagtcggtacgacgtgtcccgtctcggcagaggtaagaggtccctcgtgctggacctgaagcaaccccgaggcgcagcggtgctccggcggctgtgtaaaagatctgatgtacttctagagccattccgtcggggagtcatggagaaactgcaactcggccccgagatcctgcagcgcgagaaccctcggttgatttacgcacgcctgtccggattcggacagagcggctctttttgtaggctggcaggtcacgacataaactacttggctttgtcgggcgtgctgtcaaaaatcggccggtccggggagaatccctatgctccactgaatctgctggcagactttgccggtggaggcctcatgtgcgccctgggcattattatggcactgtttgacagaacccgcactgggaaaggacaggtgatcgatgccaacatggtcgaaggaaccgcctatctatcgtctttcctgtggaagactcagaagttaagcctgtgggaagctcctcgcggtcagaacatgttggatgggggcgctccgttctacactacttaccggaccgctgacggcgagtttatggcagtgggtgcaatcgaacctcagttttacgaacttttaatcaagggcctaggcttgaaaagcgacgagctccccaatcagatgtcaatggacgattggcccgagatgaagaaaaaattcgctgacgtgttcgccgagaagaccaaagccgagtggtgtcagattttcgacgggacagacgcttgtgtcactcccgtgctcaccttcgaggaggtggtccaccatgatcacaataaggagagaggctcgtttattactagcgaggagcaggacgtttctcccagaccagcgcccctacttctaaataccccggccatacctagctttaagcgtgacccatttattggcgagcacaccgaggagatcctggaggagttcggcttcagccgtgaggagatctatcagttgaatagcgataagattattgaaagtaataaggtcaaggccagcctg

SEQ ID NO: 249391 - DNA, 1146 bp, synthetic construct
  misc_feature 1..1146: note = Description of Artificial Sequence: Synthetic coding sequence
  source 1..1146: mol_type = other DNA
atggctctgcaaggcatctctgtcgtcgaactttctggactggctcccggacctttctgcgccatggtgcttgcagacttcggtgcccgcgtggtaagggtggataggccaggtagccgttacgacgtgagcagattgggtcgcggcaaaaggagccttgtgcttgatttgaagcagcctcgcggtgccgccgtactgaggcgtctttgcaagagaagtgacgtcctgcttgaacccttccgtcgcggagtcatggaaaaactgcagctgggtccagaaatccttcagcgtgaaaatccacgtctgatatacgccagactctccggattcggtcagtctggatcattctgccgtctggccggtcacgatatcaactatctggctctcagcggtgtgctctccaaaatcggcaggtccggagagaatccctacgcccctctcaacctgttggccgacttcgctggtggaggtcttatgtgtgccttgggtataattatggccctgttcgatcgcactaggaccggcaagggccaggtgattgatgccaacatggtcgagggtacagcataccttagctcattcctgtggaagacacaaaagctcagcctttgggaggctccacgtggccagaacatgcttgacggcggtgctcctttctacacaacttacaggaccgctgatggagagtttatggccgtgggtgccatcgaaccacagttctacgagctgctcatcaagggtttgggccttaagagcgacgaattgccaaaccagatgtccatggatgactggcctgaaatgaagaaaaaatttgctgatgtcttcgctgagaagacaaaagcagagtggtgtcaaatcttcgacggtacagacgcctgtgttaccccagtcctgacatttgaggaggtcgtacaccacgaccataacaaggagcgcggtagctttatcacctccgaggaacaagatgtcagccctagacctgccccactcctgttgaatactcccgctatcccatcttttaagagggatccattcattggcgagcacacagaagagatactggaagaatttggattctcacgcgaggagatatatcagcttaactccgacaaaattatcgagagcaacaaggttaaggcttccttg

SEQ ID NO: 249392 - DNA, 1146 bp, synthetic construct
  misc_feature 1..1146: note = Description of Artificial Sequence: Synthetic coding sequence
  source 1..1146: mol_type = other DNA
atggccctccagggaatctctgtggtcgagctttccggactagctcctggcccattctgcgcaatggtcctagccgactttggcgctagagtggtgagagtcgatcggcctggatcccggtatgacgtgagccggctaggcagaggaaagaggtccctcgtgctggatctgaagcagcctagaggagctgcggtgctgcgtcgactttgtaagcgcagtgacgtgctgctggagcctttcaggcggggcgtaatggaaaaactacaactcggacccgagatcttacaaagagaaaatcctagactcatctatgctagactctcaggctttggacagtcaggaagtttttgtcggctggccggccacgacatcaactatttggcgcttagcggagtgctctccaaaatcgggcggagtggtgaaaacccctacgccccattgaacctgctcgccgactttgcagggggcgggctgatgtgtgccctgggtatcattatggctctcttcgacagaaccagaactggtaagggacaggttattgacgctaatatggtggagggaacagcctatctgagttcatttctttggaagactcaaaaacttagcttgtgggaggccccacgaggccaaaatatgctggatgggggcgcgcccttttatacaacgtataggactgcagatggagagttcatggcggtgggggctatcgagccacagttttacgagctgttaataaaaggcttaggcctaaaatccgatgagctcccaaaccagatgagtatggatgattggccagaaatgaagaagaaatttgcagatgtcttcgccgagaaaacgaaggcagagtggtgtcagatctttgacggcacagatgcgtgtgtgacccccgtgcttactttcgaggaggtggtgcatcatgaccacaacaaagagcgcgggagctttatcacttccgaagagcaggacgtttccccccggcccgcacccctgcttttaaacactcccgctataccctcttttaagagagacccgttcattggagagcacaccgaagagattctggaggaattcggattcagccgagaggagatctaccagctcaacagcgacaagataatcgagagtaataaggtgaaggcctcacta

SEQ ID NO: 249393 - DNA, 1146 bp, synthetic construct
  misc_feature 1..1146: note = Description of Artificial Sequence: Synthetic coding sequence
  source 1..1146: mol_type = other DNA
atggcgcttcaaggaatctcggtcgtggagctcagcggactcgctccaggccctttctgcgcaatggttttggccgactttggagcccgcgtagtacgtgtcgaccgaccaggctcgagatacgatgtctcccgtcttggtagagggaagcgatcgctggtactggacctaaagcagccccggggagccgccgtgctgaggcgattgtgtaaacgaagtgacgtccttctggaacccttcaggcgaggagtgatggaaaaactacaattgggaccagaaattctccagagagagaatccaagactgatctatgccagactatctgggttcgggcagtccgggagcttttgcagactggcgggacatgatatcaactatctcgccctgtctggggtgctctctaaaatcggcaggagtggggaaaatccctatgctcccctgaacctattagctgacttcgctggcggtgggttaatgtgtgccttggggattatcatggccctgtttgacagaacgagaactgggaagggacaggtgatagatgcaaacatggtggaggggaccgcctacttatcctccttcctttggaaaacccaaaaactgtctctgtgggaagccccacggggccagaacatgctggatggcggtgccccattttatacaacgtatcgaaccgccgatggggagtttatggccgttggagctatcgaaccacagttctacgaactactgatcaaaggactggggctgaaaagcgacgagctcccgaaccagatgagtatggatgactggcccgagatgaagaaaaaattcgctgacgtatttgccgagaagacaaaggcggagtggtgtcagatcttcgatggcaccgacgcttgtgtgacaccagtcctgacttttgaagaggttgtgcaccacgaccacaacaaagagcgtggcagctttatcacatcagaagagcaagatgtaagccccagacctgctcctctgctgctgaacactccggcaattcctagtttcaaaagagatcccttcattggggaacatacagaagaaattctcgaagaatttggattcagtcgagaggagatttaccaattgaattcagacaagataatcgaatcaaataaagtgaaggcttcatta

SEQ ID NO: 249394 - DNA, 1146 bp, synthetic construct
  misc_feature 1..1146: note = Description of Artificial Sequence: Synthetic coding sequence
  source 1..1146: mol_type = other DNA
atggcccttcagggaatcagtgtggtggagctgtccgggctggcgccgggccccttttgtgctatggtcctggcagacttcggggctcgagtcgtgcgcgtcgaccggcccgggagtagatacgatgttagccgcctcggccgcggtaagcgcagtttggtcctggacttgaagcagcctcgcggcgcggccgtcctgaggcgcctttgtaaaaggtccgatgtactcctggagcctttccggaggggtgtgatggaaaagctgcagctcggacccgagatcctccaacgggagaatccgcggctcatttacgcacgactgagtggattcggacagtcagggtctttctgcaggctggctggacacgacatcaactacctggccctgagcggagtcttgagcaaaatcggcagatcaggcgagaacccctatgcaccccttaatctcttggccgacttcgctggcggaggcttgatgtgtgctttggggattatcatggccttgttcgaccgcacccgcacagggaaagggcaagttatagacgcaaacatggtcgaagggacagcatatctgtccagtttcctgtggaagacacaaaagcttagtctttgggaagcaccccgcggtcaaaatatgttggacgggggtgcgcctttttacaccacatatcggacagccgacggagaattcatggccgtgggcgcaatcgagccacaattctacgaattgcttattaaggggctggggctgaagtcagatgagctgcctaatcagatgagcatggacgactggccggaaatgaaaaagaaatttgcggatgttttcgccgagaagacaaaggctgagtggtgtcagattttcgacggcaccgatgcctgcgttactcctgtcttgacttttgaagaagtggtgcaccacgaccacaacaaggaaagaggctcctttatcacgtccgaggagcaggatgtaagtccaaggcccgcacctctcctcttgaatacaccagccatacctagtttcaagcgcgatcctttcattggcgagcacaccgaagaaatactcgaagaattcggctttagtcgagaggagatctaccagctcaactccgataaaatcattgaaagtaataaggtcaaggcgtctttg

SEQ ID NO: 249395 - DNA, 1146 bp, synthetic construct
  misc_feature 1..1146: note = Description of Artificial Sequence: Synthetic coding sequence
  source 1..1146: mol_type = other DNA
atggcattgcaggggatttctgtggtggagctttccggcctggccccagggccattctgtgctatggtccttgccgacttcggagcccgagtggtccgggtcgacaggccaggatcccggtatgatgtgagcaggcttggcagaggtaaaagaagcctggtcttggatctgaaacaaccaaggggggctgcagtacttaggagactgtgtaagagatctgacgtgcttctagagccgttcagaagaggcgtcatggagaagctccagttgggaccggagatactacaaagggagaacccccgactgatttatgccagactttctggcttcgggcagtcgggttccttttgccgtctggcgggccacgatattaattacctggccctctccggtgtattgtcaaagattggaaggagcggcgaaaacccttatgctccactaaacctcttagctgatttcgccggaggcggtttgatgtgtgctctgggaatcatcatggccctgttcgataggacccgcactggaaaaggccaggtgattgatgccaacatggtagagggtaccgcgtatctgtcaagtttcttatggaaaacccagaaactaagtctgtgggaagccccacgcggccagaatatgctggatggcggggctccattttatactacatataggacggctgatggggagtttatggctgttggagccattgagcctcagttttatgagttgctgattaagggactcggtctcaaaagcgacgagctacctaatcagatgagcatggacgactggcccgagatgaagaaaaagttcgcagacgtttttgctgagaagactaaagctgagtggtgtcagatctttgacggcaccgatgcttgcgtgacacctgtgctcacttttgaggaggtggtccaccacgatcacaacaaagagcgaggctcattcattacctccgaagaacaggacgtgtccccaagacctgcacccctgctgctgaacacgccggctataccatcatttaaacgagatccattcattggagaacacaccgaggaaattttggaggagtttggctttagccgagaggagatttaccaactgaattcggacaagattatagagagcaacaaggtgaaggcatccttg

SEQ ID NO: 249396 - DNA, 1146 bp, synthetic construct
  misc_feature 1..1146: note = Description of Artificial Sequence: Synthetic coding sequence
  source 1..1146: mol_type = other DNA
atggcattgcaggggatcagcgtagttgagctctctgggctcgcgccggggccattctgcgcaatggtcttggctgacttcggagcccgagtcgtgagggtggacaggcctgggtcccgctatgatgtcagccggctgggcaggggcaaacgatccttggtcttggaccttaaacagcccaggggagccgctgtattgcgcagattatgcaaacgtagtgacgtgcttctggagccttttcgccgtggcgtgatggagaaactgcagctgggaccagagatacttcagagagaaaatcctcggcttatatacgctagattgagcggattcggtcagtccgggagcttctgccgactcgctggacacgatatcaattacttggctctttctggagttctcagtaagatcggccgttccggcgaaaatccctacgcccccctgaatctgctggcagattttgctgggggcggcctgatgtgtgcattgggaattatcatggcgctctttgaccgcactagaaccggaaagggccaagtcattgacgctaatatggtcgaaggaacagcatatctcagttccttcttgtggaagactcagaaactgtccttgtgggaagcaccccggggccagaacatgctggacgggggcgctccattctacaccacttatcggaccgccgacggtgagttcatggctgtcggggccattgagccccagttttatgagctcctgatcaaaggtctggggctgaaaagtgatgagctgcctaatcagatgtccatggacgactggcctgaaatgaagaaaaaattcgcagacgtcttcgcagaaaagacgaaagcagagtggtgccagatcttcgacggtaccgatgcctgtgtcaccccagtgctcactttcgaggaagtagtccatcacgatcataataaggaaagaggctccttcattacctcagaagaacaggatgtgtcaccccgacccgctcctctcttactgaacacaccggctattccctctttcaagagagacccattcatcggtgagcatactgaggagattctggaggaatttgggttcagtcgggaggagatctatcaacttaacagcgataagatcatagaaagcaataaggttaaagcctctctg

SEQ ID NO: 249397 - DNA, 1146 bp, synthetic construct
  misc_feature 1..1146: note = Description of Artificial Sequence: Synthetic coding sequence
  source 1..1146: mol_type = other DNA
atggcccttcagggcatcagtgtggtggagctctcgggactggcccccgggcccttttgtgccatggttttagctgacttcggagcccgggtagtgagagtggatcgtcctgggtctcgctatgacgtcagcaggctgggacgaggcaagcgcagtctggtgctggacctgaagcagccccggggggccgccgtcctgcgtcgactttgtaaaagatccgacgtgctgctcgaaccattccgaagaggtgtgatggaaaaactgcaactaggcccagaaattctgcaaagggaaaatcccaggctcatttacgctcgcctgtcaggctttggacaaagcggcagtttttgtcgcctcgcaggacacgatatcaactacctggcgctgtctggcgttctttccaaaatcggccgtagtggcgagaacccatatgcacccctcaatctgttggccgactttgcgggaggaggcctcatgtgcgcgctgggaatcatcatggctctgtttgacagaaccagaacgggcaaaggccaagttattgacgccaatatggtggaaggaaccgcctacctgagcagcttcctgtggaaaacccagaaactgagtttgtgggaagcaccaaggggccagaacatgctggacggaggtgcacctttttataccacctacagaacggccgacggagaatttatggccgtcggcgccattgagccccagttttatgagcttctcataaaaggcctggggcttaaatccgatgaactacccaatcagatgagcatggacgactggcctgagatgaagaagaagttcgcagatgtttttgccgaaaagaccaaagccgaatggtgtcaaatcttcgacggaacggacgcatgcgtgactcccgtgctgacctttgaagaggtcgttcatcacgaccacaacaaggagcgagggagctttatcactagtgaggaacaggatgtctcgccgcgccccgctcccctccttcttaacacacctgcaatcccatccttcaagagagatcccttcataggagagcacactgaagagattctggaggagtttggtttctcgagagaggagatctaccagcttaactctgataaaattatcgagtccaataaggttaaggcctcactc

SEQ ID NO: 249398 - DNA, 1146 bp, synthetic construct
  misc_feature 1..1146: note = Description of Artificial Sequence: Synthetic coding sequence
  source 1..1146: mol_type = other DNA
atggctctacagggaatttccgtcgtggagctttcagggctcgcccccggaccattttgcgctatggttctcgcagattttggagctagagtggtgcgcgttgatagaccagggtcaagatacgatgttagtcggttaggacgggggaaacgttcactggttctagatctgaaacagccccgaggagcagccgttctgagacggttatgtaaaagaagtgatgtgttacttgaaccttttcggcggggggtgatggaaaaattgcagcttgggcctgaaatactacagcgcgaaaatcctcgcctgatttacgctcggttgtcagggttcggacagagtggatccttctgcaggttagccgggcatgatataaactaccttgcgctctcaggggtgctcagtaaaataggacggtcaggggagaatccttatgctcctctcaatctactggctgattttgccgggggggggctcatgtgcgccctagggataatcatggccctcttcgaccggacacggacaggaaaaggacaggtgattgatgctaacatggttgaaggaactgcatatttatcttcatttctctggaaaactcagaaacttagtttatgggaagccccaagaggacagaacatgctcgacggaggggcacccttttacactacttatagaacagcagatggagagttcatggccgtgggagccatagaacctcaattttatgaactacttataaaagggctgggactaaaatccgatgagctgccaaatcagatgagtatggacgattggcctgaaatgaaaaagaaattcgccgatgtattcgccgaaaaaactaaagccgagtggtgccagatctttgacggaacagatgcttgtgtgacaccagttctcacattcgaagaagtggtgcaccatgatcacaataaagaaagggggtcattcattacatccgaggagcaggatgtgtcaccccggcctgctcccctactgttaaatacacctgccatcccctctttcaaaagggaccctttcatcggagaacacactgaagaaatccttgaagaatttgggttcagtcgtgaagaaatctatcagctcaactcggataagatcattgaatctaacaaagtgaaggcctctctc

SEQ ID NO: 249399 - DNA, 1146 bp, synthetic construct
  misc_feature 1..1146: note = Description of Artificial Sequence: Synthetic coding sequence
  source 1..1146: mol_type = other DNA
atggcccttcaaggaattagcgtggtcgagctctcgggtctggccccaggacctttctgtgccatggtgctggctgattttggggcgcgcgtcgtgcgtgtggatcgtcccggctcgagatacgatgtgagccgcctcggcagagggaagcgttccctcgtgctggacctcaagcaaccccgcggagcggcggttcttaggcgcttgtgtaagcgctccgatgtgctgctcgagccattccgccgcggcgtgatggagaagctgcaactgggtccggagatactgcagcgggagaacccccggctgatttacgcaagactctccggctttggacagtcaggatcgttctgccgcctggcgggtcatgacatcaactacctggcattgtcaggagtcctgagcaaaattggtcgatcgggagaaaatccatacgcgccccttaaccttcttgcggattttgcaggcggtggtttgatgtgcgcccttggcattatcatggctctgtttgatcgcacccggactggtaagggccaggtgattgatgcaaatatggtggaaggaactgcatacctgtcctcatttctttggaaaactcaaaaactttcgctgtgggaggccccgagaggacaaaacatgctggacggcggcgcaccattctacacgacctacaggaccgcagacggagaattcatggccgtgggagcgatcgagccgcagttctacgaactgcttatcaaagggctgggactgaagtcggatgaacttcctaatcaaatgtctatggatgactggcctgaaatgaagaagaagttcgcagacgtgtttgcagaaaaaacgaaggcagaatggtgccagatttttgatggaactgacgcatgcgtaactcctgttcttacttttgaagaggtggtccaccatgatcataacaaagaacgtggatcctttatcacctcggaagaacaggatgtgtcacctcggcctgcgcctctgctgcttaacactcctgcaatcccatctttcaaacgtgatccgtttattggagaacacaccgaggaaatccttgaggaatttggttttagccgggaggagatctaccagctgaacagcgacaagatcatcgaatcaaacaaagtgaaggctagcctc

SEQ ID NO: 249400 - DNA, 1146 bp, synthetic construct
  misc_feature 1..1146: note = Description of Artificial Sequence: Synthetic coding sequence
  source 1..1146: mol_type = other DNA
atggctctacagggtatctctgttgtcgagctttcaggcctcgccccaggaccgttttgcgctatggtgctggccgatttcggcgctagagtggttagagtggaccggcctggatcacgttacgatgtttcccggttaggtcgagggaaacggagtcttgttttggatttgaaacagccacggggggctgccgtgttacgacggctttgcaaacgcagcgatgtgttgttagagcccttcagaagaggggtgatggagaaactgcagctgggccctgagatactgcaacgcgagaatcctagactgatttacgctaggctctcagggtttggtcagtctgggagtttctgccgcctggccggtcacgatatcaactatctagccctcagcggggtgctgagcaagatcgggcgctctggagaaaacccatacgcacccctgaacctactcgcagattttgccggaggaggtttaatgtgcgctctgggcatcataatggctctatttgacaggacccggacggggaaaggacaagtcattgacgcaaatatggtcgaaggtactgcatatctcagctccttcctgtggaagacccagaagttatctctctgggaggcgcccaggggacagaatatgctggatggcggagcacccttttacacaacataccgcactgctgacggtgaattcatggctgtgggggcaattgaaccccagttctacgaactgctaataaagggactgggcctcaagtcagacgagctgcccaatcagatgtcaatggatgactggccggaaatgaagaagaagtttgctgacgtattcgccgagaaaaccaaagccgaatggtgtcagatattcgacggaacagatgcctgtgtgacaccagtcctcacgtttgaggaggttgttcatcacgatcacaataaggagaggggttcctttataacatccgaggaacaggatgtcagtccgcgccctgcccctctgctgctgaacacgcccgctatcccttcttttaagcgagacccgtttattggcgaacacacggaggagatcctggaggaattcgggttttcgcgggaagaaatctaccagctcaactcagacaaaatcatcgaatctaataaggtcaaggcttccctc

SEQ ID NO: 249401 - DNA, 1146 bp, synthetic construct
  misc_feature 1..1146: note = Description of Artificial Sequence: Synthetic coding sequence
  source 1..1146: mol_type = other DNA
atggctcttcagggcatttctgtcgtcgagctgtccggcctggcgcctggccccttttgcgctatggttctggcagatttcggcgctcgggtcgtccgcgtcgatagacctgggtctcgatacgatgtcagccgcctgggacgcggtaaacggtctttagtactggatctgaagcagcctcgaggtgccgcggtgcttaggcggctttgcaagagaagtgacgtccttctggaaccttttaggagaggtgtgatggaaaaacttcagcttgggccagaaattctccaacgtgagaacccacgccttatctatgcacgactgtctggcttcggacaatctggttccttttgtcgattagcaggacatgatattaactacctggccttatcaggcgttctgtctaagatcggtaggtcgggtgaaaatccgtacgccccgctgaacctcttggccgatttcgctggtggcggactgatgtgcgccctgggaatcatcatggcgctattcgaccgcaccaggacaggcaaaggccaggtgattgatgccaatatggttgaagggacggcctatctatcctcctttctctggaagacgcagaaactgtccttgtgggaggcccctcggggccagaacatgctcgatgggggtgcacctttttacacgacctacagaactgccgacggggagttcatggctgtgggcgccatagagccgcaattttacgagctcctcatcaaaggactgggactcaagagtgatgaactacctaatcagatgtctatggatgattggcctgagatgaaaaaaaagttcgctgacgtcttcgccgaaaaaactaaagccgagtggtgtcagattttcgacgggactgatgcttgtgtaacccctgttctgaccttcgaagaggtggtccaccacgatcataataaggagcggggcagtttcattacttctgaggagcaggacgtgagccctcggccggcccctctgctgctgaatacccccgccatccccagcttcaagcgggatccatttattggcgaacacaccgaagagattctagaggagttcggcttctcacgggaagaaatctatcagcttaacagcgataagatcattgagagtaacaaagtgaaagcgtctctc

SEQ ID NO: 249402 - DNA, 1146 bp, synthetic construct
  misc_feature 1..1146: note = Description of Artificial Sequence: Synthetic coding sequence
  source 1..1146: mol_type = other DNA
atggcacttcaagggatctctgttgtggaattgtccggactagctccaggaccgttttgtgccatggttcttgctgattttggagcacgcgtcgttcgagtcgataggccaggatcacggtatgatgtatcgagattaggtcgcggaaaacgatctctggtgttggatctaaagcagcctcggggggcagctgttctgcggcgtctttgcaagaggagtgatgttcttcttgagccattccgtagaggagtgatggaaaaattacaattaggaccggaaatcttgcaacgagaaaatccacgccttatctatgcaaggttgtcgggattcggacaaagcggcagcttttgccggttggcaggacacgatatcaattacctggctctatcaggagtactttccaaaatcggaagaagtggcgagaatccatacgcgccattgaatcttcttgcggattttgctggaggtggactgatgtgtgcgttgggaattatcatggcactcttcgaccgtacccgtactggaaaagggcaagttatcgatgctaacatggtggagggaactgcctatttatcttcgtttttgtggaagacgcaaaaactgtctctctgggaggctcctaggggacaaaacatgttagatggaggggcgcccttctacaccacgtatcgtacagcagacggagaatttatggctgttggtgccattgagcctcagttttacgagttgcttattaagggacttggactaaagtcagatgaactgcctaaccaaatgtcgatggatgattggccagagatgaaaaaaaaattcgcagatgttttcgctgaaaagactaaagcagaatggtgtcaaattttcgatgggacggacgcttgcgtaacaccagtcctaacattcgaggaagttgtgcaccacgatcacaacaaggaaaggggatcattcatcacatcagaagaacaagacgtttcgcctcgccccgctccattgctacttaacacacccgcaattccatcatttaaacgagatcctttcattggtgagcatacagaagagatacttgaagaattcggattttcccgtgaggaaatctaccagcttaatagcgataagattatcgaatcaaataaggtgaaagcttcactt

SEQ ID NO: 249403 - DNA, 1146 bp, synthetic construct
  misc_feature 1..1146: note = Description of Artificial Sequence: Synthetic coding sequence
  source 1..1146: mol_type = other DNA
atggctctccagggaatatccgtcgtggagctgtcagggctggctcctggacctttctgtgcaatggtcctggccgactttggagctcgggtggtacgagtcgataggccgggttctaggtatgatgtgagtagattgggccgcgggaagcggtccctggtgctggacctcaaacaacctcgaggcgcagcagtgcttcggcggctgtgcaaacgttcagacgtgctattagagccctttcgacgcggagtgatggagaaacttcagctcggccccgagattctgcaacgggagaatccacggctgatctatgcccgattatcgggattcggccagtcgggtagcttttgccgactcgccggacacgatattaactatctggcactgtcgggagtgttgagtaagatagggagatctggggagaatccctacgcacccctgaatttgctcgccgattttgcaggcggtggacttatgtgtgctctgggaatcatcatggctctgtttgaccgaactcgaaccggcaagggacaggtgattgatgccaacatggtcgaagggaccgcgtacttgtcatcctttctttggaaaacacagaagctgagtctgtgggaggcaccccgcggacagaatatgttagacggaggggcaccgttttacacaacgtaccgcacggccgacggtgagttcatggcagttggagccattgagccacagttctacgaactgctgataaaggggctcggattgaagagtgatgagcttccaaatcagatgtccatggacgattggcccgagatgaaaaagaaattcgccgatgtctttgcagagaaaactaaagctgaatggtgccagatcttcgacggcacggacgcatgtgttacacccgtacttactttcgaggaagtggtgcaccacgaccacaataaggaacgcgggtcgtttatcacctccgaagagcaggatgtgagtccgcgaccggcaccacttttgctgaacacgcccgccattcccagcttcaagagagatccattcatcggcgaacacacagaagagatcctcgaagagttcggattctcaagagaggagatatatcagctcaatagcgacaaaatcatcgagtctaataaggtaaaggcctctttg

SEQ ID NO: 249404 - DNA, 1146 bp, synthetic construct
  misc_feature 1..1146: note = Description of Artificial Sequence: Synthetic coding sequence
  source 1..1146: mol_type = other DNA
atggcactccagggcatcagcgtggtcgaattgtccggtctggccccagggccgttctgcgccatggtgctggccgactttggtgcccgcgtggtgcgggtcgataggccaggatcgcgatacgatgtgagccgtcttggaagaggaaagcgatccctcgtgctggatctgaagcagccaagaggtgctgctgtgctccggcggctgtgcaagcgctcggacgtcttgctggaacctttcaggaggggtgtgatggaaaagctgcaactgggaccagagatcctccagcgggagaacccgcggctgatctacgctcggctgtccggtttcggacagtcgggatccttttgcagattggctggacacgacatcaattacctcgccctgtcgggcgtgttgagcaagatcggccgctcaggcgaaaacccttatgctccccttaatcttttggcggattttgcgggtggtggactgatgtgcgccttgggcatcattatggcgctgttcgacagaaccaggaccggaaagggacaggtgatcgacgccaatatggtggaaggaaccgcttacctgtcgagcttcctgtggaaaactcaaaaactctctttgtgggaggctccgcgagggcagaacatgctggacggcggagcaccgttttacactacgtaccggactgcggacggggagtttatggccgtgggagccatcgagccgcagttctacgaacttttgattaagggactcggattgaagagtgacgaactcccaaaccagatgagcatggatgactggccagaaatgaagaagaaattcgcagacgtttttgccgagaaaaccaaggctgagtggtgtcagatctttgatggaactgacgcgtgcgtcacgccagttctgacttttgaagaagtggtccaccatgaccacaacaaagaacgggggtccttcatcacttccgaggagcaagatgtgagcccacgcccggctcccctcttgcttaacactcccgccatcccgtcgttcaagcgggacccctttattggggagcacactgaggaaattctggaggagttcggcttctccagagaagaaatctatcaactcaactcagacaaaatcatcgagtccaataaggtgaaagcctcgctg

SEQ ID NO: 249405 - DNA, 1146 bp, synthetic construct
  misc_feature 1..1146: note = Description of Artificial Sequence: Synthetic coding sequence
  source 1..1146: mol_type = other DNA
atggccttgcagggaatctccgtggtcgaactgtccggcttggcgccagggccgttctgtgctatggtcctcgctgacttcggcgcgcgagtggtgcgcgtggatagaccgggaagccgctacgacgtctcaagactcggtagaggaaaacgatctctcgtgctggaccttaagcagcctcggggagcggcggtgctgagaaggctgtgcaagcggtccgacgtgctcctcgaaccgttccgcagaggtgtcatggaaaagttgcagctgggtccagaaatcttgcaacgtgagaacccgcggctgatttacgccaggctttcggggttcggccaatccggctcgttctgcaggcttgcaggacacgatatcaattacctcgcactgtcaggcgtgctttcgaagatcggccggtcaggagagaacccttacgctccactcaacttgctcgcagactttgccggaggcggactgatgtgtgccctgggaatcatcatggccctgtttgatcggacccgcactggtaaaggacaagtgatcgatgcgaatatggtcgaaggcaccgcttacctgtcctcgtttctgtggaaaacgcagaagctcagcctttgggaagccccccggggacagaacatgctggacggaggagcgccgttttacacgacctaccgcactgcagacggggaatttatggccgtgggagccatcgagccgcaattctatgaactgctgattaaaggactcggcctgaagagcgacgaactgcccaatcaaatgtcgatggacgattggcctgaaatgaagaagaagttcgcggatgtctttgcagaaaaaactaaggccgaatggtgccagatcttcgatgggactgatgcctgcgtgactccggtgctgaccttcgaggaggtggtccatcacgaccacaacaaggagcgggggtcattcatcaccagcgaggagcaggacgtgtcgccccgcccagctccactcctgctgaataccccggccatcccttcgttcaagcgcgacccgttcatcggagagcataccgaagagattctggaagagttcggattctcacgcgaggaaatctaccagctgaacagcgacaaaattatcgagtccaacaaggttaaggcatccctc

SEQ ID NO: 249406 - DNA, 1146 bp, synthetic construct
  misc_feature 1..1146: note = Description of Artificial Sequence: Synthetic coding sequence
  source 1..1146: mol_type = other DNA
atggccttgcagggtatctcagttgtcgagctcagcggcctggcccccggcccgttttgcgccatggtgctggctgacttcggcgcccgggtggtgcgagtggacaggccggggtcgagatacgacgtgtcgcggttgggaagggggaaacgatcgcttgtgttggacctgaagcagccacggggtgcagccgtgctgcgccggctgtgcaagcgatccgacgtgctgctcgagccgttcaggcgcggagttatggaaaagctccagttgggcccagaaatactccaaagagagaatcctcgcctcatctacgccagactttccggatttgggcaaagcgggagcttctgcagattggcaggacacgacatcaattacttggcgctcagtggagtgctgagcaagattggaagatccggggaaaacccgtacgcccctcttaacctgctggccgatttcgccgggggcggtctgatgtgcgccctggggatcatcatggccctgttcgatcggactcgcaccggcaagggacaagtgatcgacgcaaacatggtggagggtaccgcgtacctgtcatcgttcctttggaaaactcaaaagctgtcactgtgggaggcgcctcgaggccagaacatgcttgacggaggcgccccgttctataccacctaccggactgctgacggggagtttatggcggtgggagccattgaaccacagttttacgagcttttgatcaaaggattggggctgaaatccgacgaactgccaaatcaaatgtccatggacgattggcccgagatgaagaaaaagttcgctgatgtgttcgcggaaaaaaccaaggccgaatggtgtcagattttcgatggaactgacgcttgcgtcactccggttctgacttttgaagaggtcgtccaccacgatcataacaaggaacggggttcattcatcacctccgaggaacaggatgtgtctccaaggccggccccgctgctgctgaacacgccagcgatcccgtccttcaagagagatccttttatcggtgaacatacggaggaaatcttggaggagttcggattctcgagggaagagatctaccaacttaatagcgacaagatcatcgaaagcaacaaggtcaaggcctcactg

SEQ ID NO: 249407 - DNA, 1146 bp, synthetic construct
  misc_feature 1..1146: note = Description of Artificial Sequence: Synthetic coding sequence
  source 1..1146: mol_type = other DNA
atggcactacaagggatatcggttgtggagctctccggtcttgctccaggacctttttgtgcaatggtcttagctgattttggcgccagggtcgtgcgtgtggaccggcctggatccaggtacgacgtgtcgcgtctcggtaggggtaaacgctcgttagtgctcgatctaaaacagccgagaggggccgctgtgctacgtcgtctgtgcaaacggtctgatgtgctactggaaccctttagaaggggtgtcatggagaagttgcaactcggccctgaaatcctgcagcgcgagaatcctaggttgatctatgctaggttgtccgggttcggacagtcaggaagtttctgtcgtctggctgggcatgatatcaactaccttgccctcagcggtgtgttatccaaaattggccgctctggggaaaacccctatgcaccattgaacctgctggcagacttcgcgggcggaggcctcatgtgtgccttaggcattataatggccttgttcgacaggacccggacaggaaagggtcaggtcatcgatgccaacatggttgagggaactgcgtacctgagctctttcctctggaagacgcagaaactcagcttgtgggaggcaccaagggggcaaaacatgctcgacggaggggcaccattttacacaacataccgtactgccgatggcgagtttatggccgtgggcgccatcgagcctcagttctacgaactgcttattaaaggtctcggccttaagtctgacgagttgcctaaccagatgagcatggacgattggcccgagatgaagaagaagtttgcagatgtgttcgcggagaagacgaaggccgaatggtgccagattttcgacggcactgacgcatgcgtgacccctgttttgacattcgaagaggtggtccaccacgatcacaacaaggaaagaggcagctttatcacctccgaggaacaggatgtgtcccctcggccggctcctttgcttttaaatacacctgcaataccctcgttcaaacgggatccttttataggcgaacacacagaggagatcctggaggagttcggcttcagtcgggaggagatttaccagcttaattcagacaagattattgaaagcaataaagtgaaggccagtctt

SEQ ID NO: 249408 - DNA, 1146 bp, synthetic construct
  misc_feature 1..1146: note = Description of Artificial Sequence: Synthetic coding sequence
  source 1..1146: mol_type = other DNA
atggcccttcaaggaatcagcgttgtggaacttagcggacttgcaccgggtccattttgcgcaatggtgctggctgattttggggcaagagtggttagagtcgaccggcccggttctaggtacgacgtctcacggcttggtagaggtaagcgatccctggtgcttgatcttaagcagcctcgtggggcagctgtgcttaggagactttgcaaacgcagcgacgtgctgctcgaaccattccgccgcggcgtcatggaaaaactgcaacttggcccagaaatacttcagcgcgagaatccgcggctgatttacgcccgcttgagcggtttcggccaatccggaagtttttgtaggctggcaggtcatgacatcaattatctggccctgtcgggggtgctttcaaagattggaagatcgggggagaacccatacgcgccccttaaccttctcgccgacttcgcgggaggcggactcatgtgtgcccttggaatcattatggcgctgtttgatagaactcggactggaaagggtcaagtcattgatgccaacatggtggagggcactgcctacctttcgtccttcctgtggaaaacccagaagctgtccctttgggaggccccacggggacagaatatgctggatggtggtgccccgttttacactacgtacagaactgcggatggcgagtttatggcagtgggagcaattgaaccacagttttacgaactcctgatcaaaggacttggtctgaagtcagatgaattgccaaaccagatgtctatggacgattggcctgaaatgaaaaagaaattcgcggatgtgttcgctgaaaagaccaaggcagaatggtgtcagatttttgacggtactgatgcgtgcgtcactcctgtcctgaccttcgaggaagtggtccatcacgatcacaacaaggaaagaggatcgttcataactagtgaagaacaggatgtgtccccccgaccagcaccactgcttttgaatacccccgcgattccttcttttaagcgagatccgtttattggagagcatacggaggagattctcgaagaatttggctttagcagagaagagatttaccaacttaactccgacaaaatcatcgagtctaacaaggtgaaggcctccctc

SEQ ID NO: 249409 - DNA, 1146 bp, synthetic construct
  misc_feature 1..1146: note = Description of Artificial Sequence: Synthetic coding sequence
  source 1..1146: mol_type = other DNA
atggcccttcaaggtatttcagttgtagagctttcaggactagcaccagggcctttctgtgccatggtgctcgccgactttggtgctcgcgtcgtccgcgtcgacaggcccggcagcagatatgatgtgtcgcggctgggccgcggcaagcggagcctggtgctagatctaaaacaaccaaggggggccgcagtcctccggaggctttgcaagcgttcagatgtgctgttagaaccgttcagacggggtgtcatggagaaactgcaactcggccctgagatcctgcagcgggagaatcccagactaatttacgcacggctgagtggctttgggcagtccggatcattttgcagactggctggacatgacatcaactatcttgccctttcaggcgtgcttagcaagatcggccgatccggcgaaaatccgtacgccccactgaatctgttggctgactttgctggtggcggattgatgtgcgctctagggatcattatggcattatttgaccgcacacgtacagggaaggggcaagtcattgatgccaacatggttgaaggcaccgcttacttgagttcttttctgtggaaaacccagaaactctcattgtgggaagctcccagaggccagaacatgttggatgggggggcgccgttttacactacctatcggactgcggacggggagttcatggcagtgggcgccatagaaccgcaattctatgagttacttatcaaagggctaggcctgaagtcagacgagttgcccaaccagatgagcatggatgactggccggaaatgaagaagaaattcgctgacgtgttcgctgaaaagacgaaagccgagtggtgtcagatatttgacggcaccgatgcctgcgtgacaccagttctcacgttcgaggaggtggtccaccacgaccataataaggagaggggctcgttcattacctccgaggaacaggatgtctctcctcggcctgcccccctcttacttaatacccctgccattccttcctttaaaagagatccatttatcggtgagcacactgaggagattctcgaggagttcggcttcagtcgagaggagatttatcagttgaacagcgataaaatcatcgaatccaataaggtaaaggcttcgctg

SEQ ID NO: 249410 - DNA, 1146 bp, synthetic construct
  misc_feature 1..1146: note = Description of Artificial Sequence: Synthetic coding sequence
  source 1..1146: mol_type = other DNA
atggccctccaaggaataagtgtagtcgagctctccggattagcacctggacctttttgcgccatggtgctagctgattttggagcaagggtggtgcgggtggatagaccagggagtaggtatgatgtgtctcggctcgggagggggaaaaggagtcttgttctggatctcaaacaacccagaggagctgccgtgctacgccgtctttgtaaaaggtcagatgtgctccttgaaccctttcggagaggagtaatggaaaaactgcagctcgggcccgagatcctgcagcgagaaaaccctaggcttatttatgctagactcagtgggtttgggcagtccgggagtttctgcaggctggccggacatgatataaattacctcgctctcagtggagtattgtctaaaataggaagatcaggagaaaacccatatgccccacttaaccttctcgctgacttcgccggaggagggcttatgtgcgctctaggaataatcatggctctttttgataggacaagaactggaaaggggcaggtcattgatgccaacatggtggaagggactgcctacctaagttccttcctgtggaaaacacagaaactatctctttgggaggctccacgcgggcagaatatgctggatgggggggccccattttatacaacatacaggacagcagatggggaatttatggccgtcggggctatcgaacctcagttctacgaactgctcataaaagggctaggactaaaatccgatgaacttcctaaccaaatgtctatggatgactggccagaaatgaaaaaaaaatttgctgatgtgttcgccgaaaaaacaaaggccgaatggtgccagattttcgatggaacagatgcttgcgtgacgcctgtgctgacttttgaagaagtggtccatcacgatcacaacaaagagagggggtcctttatcacaagtgaagaacaggatgtgtcgccaagaccagcccctttactccttaacacacccgctatccctagttttaaaagagatcccttcatcggggagcacacagaagaaatccttgaagaatttggattttctcgcgaggaaatataccagcttaattccgataaaattatcgaatcaaataaagtcaaagcctcttta

SEQ ID NO: 249411 - DNA, 1146 bp, synthetic construct
  misc_feature 1..1146: note = Description of Artificial Sequence: Synthetic coding sequence
  source 1..1146: mol_type = other DNA
atggcgctccagggaatctcagtggtcgaactttctggcctggctccagggcctttctgtgccatggtactggcagatttcggggcgcgagttgtgcgcgtggacaggccaggcagtcgctatgacgtctctcgtttgggacgagggaaacgttcgctagtgctagacctcaagcagcccaggggcgctgccgtgctcaggaggttgtgcaaaaggtccgacgtcctgctggaaccctttcgacgcggcgtaatggagaaactgcagcttggacctgagatcctccaacgcgagaatcctcgcttgatttatgccaggttgtccggctttggacagtccggatccttctgtcggctcgcaggtcacgacattaattatctggccttgagcggagtgctctcaaaaatcggtaggagcggcgagaatccctatgccccacttaatctcctcgcagattttgctggcgggggattgatgtgcgcattgggaataattatggccctgttcgaccgaaccaggacaggcaaaggacaggtgatagacgcgaatatggtggaggggacggcttacttatcctccttcctgtggaaaacgcagaagctgtcactgtgggaggcgccaagaggacagaacatgcttgatggtggcgctccattttataccacctaccgcacagcagatggcgagtttatggctgtgggagctattgagccccagttctacgaactgctcattaagggcctcggtttaaagtccgacgagctgccaaatcagatgtcgatggacgactggccagaaatgaagaaaaagtttgccgatgttttcgccgagaaaaccaaggctgagtggtgtcagatcttcgatggcactgatgcctgcgtgacccctgtgctgaccttcgaggaagtagtgcatcatgatcataataaagagagggggtcatttataacgtctgaggagcaagacgtgtcacctcggccagctcccctgctgttgaacacgcctgccatcccgtcattcaaacgcgatcccttcatcggtgagcacaccgaagaaatactcgaggagtttggattttcccgagaagaaatatatcagcttaactcggataaaatcatcgaaagcaacaaggtaaaagcctcactg

SEQ ID NO: 249412 - DNA, 1146 bp, synthetic construct
  misc_feature 1..1146: note = Description of Artificial Sequence: Synthetic coding sequence
  source 1..1146: mol_type = other DNA
atggcactccagggcattagcgttgtggaactcagcgggctggcaccgggacctttctgcgcaatggtgcttgcggattttggcgcgcgcgtggtacgagtggatcgccccgggagtcggtatgatgtcagcagactcgggcggggaaaacggtccctcgtcctggacttgaagcagccgaggggtgctgctgtcctcagacgactttgcaaacgcagcgacgttctcttggaaccgttcaggaggggggtcatggagaaattgcagctcggccctgagatcctccagagagaaaaccccaggctgatatatgcacggctttctggtttcggccagagcggttccttttgccggttggccgggcacgacattaactacctggcgctgagcggcgtcctgagcaaaataggccgcagtggtgaaaatccttatgcccctctgaacctcctggctgattttgctggaggaggtctgatgtgcgcccttgggattatcatggccctgttcgatcggacgagaaccggtaagggtcaggtgatcgatgcgaacatggtggaaggcaccgcctatctgtcatccttcctgtggaagacccaaaaactgtctctgtgggaggccccgcgggggcaaaacatgcttgacggcggagcccctttctacaccacctatcgcacagccgatggggaatttatggccgtgggagctatagagccccaattctatgaactgctgatcaaaggcctcgggcttaagagcgacgaactgccaaaccagatgtcaatggatgactggccagaaatgaagaaaaaatttgccgacgtcttcgccgaaaagacaaaggcagaatggtgtcagatttttgatggaactgatgcttgcgttacacccgtgctcacgttcgaagaagtcgtgcatcacgatcacaacaaagagcggggtagctttattaccagcgaggagcaggacgtgtccccgcgaccagcaccgctgcttctcaatacccccgccatcccctctttcaaacgagatcccttcatcggcgaacataccgaggagatacttgaagagttcgggttcagtagagaggaaatttatcaactgaatagtgacaagatcatcgaaagcaataaagttaaagcctccctc

SEQ ID NO: 249413 - DNA, 1146 bp, synthetic construct
  misc_feature 1..1146: note = Description of Artificial Sequence: Synthetic coding sequence
  source 1..1146: mol_type = other DNA
atggctcttcagggaatttcagtggtcgagctgagcggtctggcaccaggccccttttgcgcgatggtgctcgccgattttggtgccagggtggtcagggttgaccgcccaggatcaagatacgacgtgagtaggcttggaagaggtaagagatctcttgttctggacctgaagcaacctcgcggtgcggccgtgctgcgcagactttgtaagagatctgatgtgctgttggagccattcaggaggggagttatggagaaacttcagctgggtccagaaatcttgcagagagaaaacccaaggttgatctacgctcgcctgagtggctttggccaaagcggttcattctgcagactggccggtcacgacattaactacctggccttgagcggcgtcctttcaaagatcggcaggtccggcgaaaacccttacgctccactgaatctcctggccgacttcgcgggaggcggactcatgtgtgccttgggcattattatggcgcttttcgataggaccagaaccggtaagggtcaagtgattgacgccaatatggttgagggaaccgcgtacctgagttctttcctgtggaagactcagaagctctctttgtgggaggctcccagaggacagaatatgctggatggcggcgcacctttctacaccacgtacagaacagccgacggcgaatttatggcagtcggcgccattgagccgcagttctatgagctgcttatcaagggcctgggactgaaatccgacgaactcccaaaccaaatgtccatggatgattggccagagatgaagaagaagttcgccgacgtatttgcggagaagaccaaggcagagtggtgccaaatcttcgatggaactgatgcctgcgtaactcctgtcttgacattcgaggaggtggtgcaccacgatcacaacaaggagcgcggctcatttatcacctctgaagaacaagacgtgagccctaggccagcgccccttctccttaatacccctgccattccgtcttttaagagggaccctttcatcggtgagcataccgaagagatactggaggaattcggcttctctagggaagaaatttatcagctcaactctgataagataattgagtccaataaagtgaaggcatctctc

SEQ ID NO: 249414 - DNA, 1146 bp, synthetic construct
  misc_feature 1..1146: note = Description of Artificial Sequence: Synthetic coding sequence
  source 1..1146: mol_type = other DNA
atggccctgcagggaatctctgtagtggaactttcagggcttgcacctggaccgttctgcgcaatggttttggccgactttggtgccagagtagtcagggtggatagacctggttcacggtacgacgtatctcgtctgggccgcgggaaacgctccttggttctggaccttaaacagccacggggtgcagccgtcttgagaagactatgtaagcgtagtgatgtcctcctggagccatttcgaagaggagttatggagaagcttcaactcggcccagagatactgcagagagagaacccccgcctgatttacgcccgtctgtcaggcttcggtcagagcggatctttttgcaggctcgcaggacatgacatcaattacttggcactcagtggcgtcctatcaaagataggacgaagcggagagaacccctacgccccgcttaacctgctggcagattttgcggggggggggctgatgtgtgcattgggcattatcatggcactctttgacagaactcgcaccggaaagggtcaggtgatcgatgctaatatggtggagggaacggcttatttgagttccttcctttggaaaacccagaagctctcactttgggaggccccccgcgggcaaaatatgctggacgggggggccccattttacaccacatatcgcacagctgatggcgagttcatggccgtcggggccattgagcctcaattctacgaactcctcatcaagggactgggactgaagtcagacgagctccccaatcagatgtctatggacgattggcctgagatgaagaagaagtttgccgacgtgtttgcagaaaaaactaaggctgagtggtgtcagatcttcgacggcactgatgcatgcgtgactcccgtactgaccttcgaggaggttgttcaccacgatcataataaagagcggggcagtttcataacgtctgaagaacaggatgtgagccctaggcccgctcccctcctgctgaacacaccagccatcccgagtttcaagcgagaccccttcatcggcgagcacacagaggagatcctagaggagttcggattttctcgagaggaaatttaccagttgaactccgacaagatcatcgagtctaataaggttaaagctagctta

SEQ ID NO: 249415 - DNA, 1146 bp, synthetic construct
  misc_feature 1..1146: note = Description of Artificial Sequence: Synthetic coding sequence
  source 1..1146: mol_type = other DNA
atggcactccagggcatctctgttgtggaactgtctggactggcccccggccccttctgtgctatggtacttgcggatttcggggcccgcgttgtacgggtggaccgaccagggagccgctacgatgtgtccaggctaggccggggtaaaaggtcgctggtgctcgacctgaagcagccgcgtggggcagccgttctcaggcgcctgtgtaaacgatccgacgtgcttctagagcccttcagacgaggcgtgatggagaagctgcagttgggccctgaaatcttgcagagagaaaatccgcgcctgatatacgccagactgtctggcttcggtcagagcgggagcttctgtaggctggccggacatgatatcaattatctggcgctctcaggtgtacttagtaagataggaagatcaggagagaatccttacgcaccacttaatctcctagcagatttcgctggagggggtctaatgtgcgcgcttggcatcattatggctctattcgaccgaactcggaccggcaaagggcaggtgatcgatgctaatatggtggaaggaaccgcgtacctctcctcgtttctctggaagacacagaagctgtctctgtgggaggcgcctcgcggccaaaacatgcttgacggcggcgccccattctatacaacgtatcggacagccgatggcgagttcatggctgtgggggccattgagcctcaattctatgagctcctgattaaaggactgggtctgaagagcgatgaattacccaatcagatgagcatggacgattggcctgaaatgaaaaagaagtttgccgacgtctttgccgagaagaccaaggcagaatggtgtcagatttttgatgggaccgacgcctgtgttacacccgtgctgacttttgaagaggttgtacaccacgaccacaacaaagaacggggcagttttatcacctctgaagagcaggatgtatcccctcggcccgccccattgctgttgaatacccctgcaatcccaagcttcaagcgcgatcctttcatcggggaacataccgaggagatccttgaagagttcgggttctcccgagaggaaatctatcagctcaacagcgataagatcattgaaagcaacaaagtcaaagccagtctg

SEQ ID NO: 249416 - DNA, 1146 bp, synthetic construct
  misc_feature 1..1146: note = Description of Artificial Sequence: Synthetic coding sequence
  source 1..1146: mol_type = other DNA
atggccctccagggcattagcgtcgtggagctgagtgggctggcccccggacccttttgcgccatggtgttggcagattttggcgcccgagttgtacgagtggataggcctggttctagatacgacgttagccgtctgggcagggggaaacgtagccttgtcttagatttgaagcagccccgtggggccgctgttctccgaaggttgtgtaagcgctcagacgtattgttggagcccttcaggaggggggtcatggagaaactgcaactgggtccagagatcctgcaacgcgagaaccccagattaatctacgcccgcctctccgggtttggacagtctggtagtttctgtcggctggcagggcacgacatcaactacctggcgctatctggcgtgctctcaaaaataggccgctctggcgagaacccatatgctccactgaacttactggctgactttgcaggaggcgggctgatgtgcgccctgggaattattatggcactgttcgatagaactagaactgggaaagggcaggtgattgatgccaatatggtggaaggaaccgcctacctgagctccttcttatggaaaactcagaaactgtctttgtgggaggcacctcggggtcagaacatgctggacggtggggctcccttctacaccacctatagaactgctgacggagaattcatggcagtcggagctattgagccccaattctacgagctgttaatcaaggggctcgggctcaaatcagatgaactcccaaaccagatgagtatggatgactggcccgagatgaagaaaaaatttgcagatgtgttcgccgagaaaactaaagctgaatggtgccagatcttcgacggaacagatgcctgcgtgacgcctgtactgactttcgaagaagttgtgcaccacgaccacaacaaagagagggggagtttcattacctccgaggaacaggatgtgagcccgaggccagccccccttttgctaaatactccggccatcccctccttcaagcgcgacccttttatcggagagcacactgaggagattctcgaggagttcgggtttagtagggaagagatctaccagctgaacagcgacaaaataattgaaagtaataaggtcaaggcgagtctt

SEQ ID NO: 249417 - DNA, 1146 bp, synthetic construct
  misc_feature 1..1146: note = Description of Artificial Sequence: Synthetic coding sequence
  source 1..1146: mol_type = other DNA
atggccctacagggaatatccgtggtagagctgtccggactcgcaccgggcccattctgcgcgatggtgcttgcagacttcggggctagagtcgtgagggtcgaccgacctggttcgcgatacgacgtgtcgcgactgggtagaggaaaacggtccctcgtattggatctgaaacaaccaagaggggccgcagttctccgaaggctctgtaagcgatcggacgtgcttttggagcccttcaggagaggcgtaatggagaaactgcaactaggaccagagatcttacaaagggagaatcctaggctcatctacgcccgcctgtcgggtttcggtcaaagcggatccttttgccgactcgcgggccatgacattaactatctggctctgtccggcgtgctttcaaagattggccggtcaggagaaaacccctacgctcctctgaatctgctggccgacttcgcaggaggcgggttgatgtgtgctcttgggattattatggcgctctttgatcgcacccgtactggcaaaggccaggtgatcgatgccaatatggttgaaggcactgcctatctgtcaagcttcctgtggaaaactcagaagctatcactgtgggaagctccaaggggccagaacatgctagacgggggagccccgttctatacaacctacagaacagccgatggcgagtttatggccgtcggcgcaattgaaccccaattttacgaactgttgatcaagggcctcgggctgaaaagcgatgagcttcccaatcaaatgtccatggatgactggcccgaaatgaaaaaaaagtttgctgatgtgtttgcggaaaaaacgaaagcggaatggtgtcagatcttcgacggaaccgacgcctgcgtgacacccgtacttacattcgaggaagttgtgcatcacgaccataataaagaaagaggctcttttataacttctgaggagcaggatgtcagccctaggcccgccccattgctgctaaacacgccagctattcccagctttaagagggacccctttatcggagaacatacagaggaaatcctcgaggaatttgggttttcccgagaggaaatttaccagctgaacagcgacaagatcatcgaaagcaacaaagtgaaagcttcactg

SEQ ID NO: 249418 - DNA, 1146 bp, synthetic construct
  misc_feature 1..1146: note = Description of Artificial Sequence: Synthetic coding sequence
  source 1..1146: mol_type = other DNA
atggctcttcaggggatcagcgtggttgagctgtccgggctagcgccggggccgttctgtgcaatggtgttagcggattttggggccagggtggttagggtagaccgccctggaagcaggtacgacgtgtctcgactgggtcgcggcaagcgatcactggtgctggatctgaaacagcctcgcggggctgctgtgctccgtcgactttgcaaaaggtctgacgtactcctcgaaccattccggagaggcgtgatggaaaagctccaattgggccccgagattctgcagagggagaatcccaggcttatctatgcacgcctatctggcttcggccagtctggctcattctgcagactggcgggacatgacattaactatctcgcactgtctggggtactgagcaaaataggccgatctggcgagaacccgtacgcacctctgaatttgctcgctgacttcgcaggaggggggctgatgtgcgccctggggataataatggcactgtttgaccggacaagaacaggcaaaggccaagtgatcgacgccaatatggtggagggaacagcctatctatcaagcttcctttggaagacccagaagctgagtctctgggaagcgccgagaggccaaaacatgttggatggcggcgcccccttctatacgacatataggacagccgacggtgagttcatggcggtcggcgcaatcgagccccagttctatgagctgttgattaaaggtctgggcctgaagtcagatgaactccccaaccagatgagcatggacgattggcctgaaatgaagaagaaatttgcagatgtgtttgctgaaaaaaccaaagccgagtggtgccaaatcttcgatggcacagacgcatgcgtaacaccggtgcttactttcgaggaagtggtacaccatgaccacaacaaggagaggggcagttttatcactagcgaagagcaggacgtctcaccgcggccggcccctcttcttcttaatacccccgcaataccgagcttcaagagggacccctttatcggcgagcacaccgaggagattctggaagagtttggcttctcccgtgaagagatttaccagctcaattcagataaaatcattgagtccaataaggttaaggcttcactg

SEQ ID NO: 249419 - DNA, 1146 bp, synthetic construct
  misc_feature 1..1146: note = Description of Artificial Sequence: Synthetic coding sequence
  source 1..1146: mol_type = other DNA
atggcgttgcaagggatttccgtcgtggaactcagcgggctggcgccggggccgttctgtgcgatggtgctcgcggactttggagcccgcgtggtgagagtggacagacctggatcgaggtacgatgtgtcccggctcggacgtgggaaaaggtcactggtgctcgatctgaagcaaccacgcggcgctgcggtgctgcgaaggctgtgcaaacggagcgacgtcctgcttgaacctttcagaaggggtgtgatggagaagttgcagctgggaccagagatcttgcagcgggagaacccacggctcatctatgcgaggctctcgggcttcgggcagtcaggatcgttctgccgattggcaggacatgacatcaactacctggctctctcgggagtgttgtccaaaattgggcgctccggggaaaacccgtacgccccactcaatctccttgctgatttcgcgggtggaggactgatgtgtgccctggggattatcatggcactgtttgatagaactcgcaccggaaaggggcaggtgatcgatgccaacatggtggaaggcaccgcgtacctgtcatcattcctctggaaaactcagaagctctcgctctgggaagcccctcgcggacaaaacatgcttgacgggggcgccccgttctacactacttacagaaccgccgacggcgaattcatggctgttggggccatcgaaccccaattctacgagctgctcatcaagggtcttggcctcaagagcgacgaactcccaaaccagatgagcatggacgactggccagagatgaagaagaagttcgccgatgtgttcgctgaaaagaccaaagccgagtggtgtcagatttttgacggcaccgacgcgtgcgtcaccccggtgctgacgttcgaagaagtggtccaccatgaccataacaaggaaagagggagcttcatcacctccgaagagcaggatgtcagcccaaggccggcccctctgctgctcaacactccggccatcccgtccttcaagcgggaccccttcatcggagagcatactgaagaaatcctcgaggaattcggattctctcgggaggaaatctaccagctgaactcggataagatcatcgaatcaaataaggttaaagcatcgctt

SEQ ID NO: 249420 - DNA, 1146 bp, synthetic construct
  misc_feature 1..1146: note = Description of Artificial Sequence: Synthetic coding sequence
  source 1..1146: mol_type = other DNA
atggccctgcaagggatcagcgtcgtcgagctctcgggtcttgcgcctggcccattctgtgccatggtgctggcagattttggagcacgtgtggtgcgtgtggatcgccctggcagcaggtacgatgtcagccggcttggccgcgggaagcggagccttgtcctggatctcaagcagccacgcggtgctgcagtgctgcgccgactgtgtaagcgctcggatgtgttgctggagccatttaggcggggcgtgatggaaaagttgcagcttggtcctgagattctgcaacgagagaatcctcgcttgatttacgcaagacttagcggatttggacaaagcggatccttttgccggctggcaggtcatgacattaactatctcgcgctgtcgggagttctttcgaagattggacggtccggggaaaatccatacgcgcctcttaaccttctggccgattttgccgggggtggtcttatgtgtgcattgggaatcataatggctctgttcgatcggacccggactggaaaaggacaggtcatcgatgctaacatggtggaaggtactgcgtacttgtcgtcatttctctggaaaacccaaaagttgtcgctgtgggaagcaccacggggacagaacatgctggatggtggtgcgccattctacaccacctaccgaacggcagatggcgagttcatggcagtgggcgccattgagcctcagttttatgaactgctgattaaggggttgggtctgaaatccgacgaactgcctaaccaaatgtccatggatgattggcctgaaatgaagaagaagttcgcagatgtttttgccgaaaagaccaaggcagagtggtgtcaaatctttgatggcacggatgcctgcgtgacccctgtccttacgttcgaagaagtggtccatcatgaccacaataaggaaagaggctcattcataacttcggaagaacaggacgtcagccctagacctgcaccactgcttcttaataccccagctataccgtcgttcaagagagatccgtttatcggtgagcacactgaagaaattctggaagaatttggtttttcacgcgaagagatttaccaacttaattcagataagatcattgagagcaacaaggtgaaggcatcgctt

SEQ ID NO: 249421 - DNA, 1146 bp, synthetic construct
  misc_feature 1..1146: note = Description of Artificial Sequence: Synthetic coding sequence
  source 1..1146: mol_type = other DNA
atggccttgcagggaatctccgttgtggaactgtcagggcttgcacccgggcctttttgcgctatggttctggccgacttcggcgcacgcgtggttcgggtcgaccgacccggaagccgctacgacgtgagccgactggggagagggaagcgcagcttagtgctggatctgaagcagccgcgaggtgctgccgttttgaggagactgtgcaagcgaagtgacgtcctactcgaacctttcaggcgaggtgtcatggagaaactgcagttgggcccagaaatcctgcagagagaaaaccctcgacttatctacgcaaggctaagcgggttcggccagagtggatcattctgcaggttggccgggcacgatattaactaccttgccctctctggcgtactgagtaaaattgggagatcaggagagaacccatatgctcctttgaacctcctggctgatttcgccgggggagggctcatgtgcgccctcgggattatcatggctctgtttgatcgaacccgtaccggaaaggggcaagtcatcgacgcaaacatggttgagggaacagcctacctctcttctttcttgtggaaaacccagaaactgtccctgtgggaagcaccacgagggcagaacatgctcgacggcggggcgcccttctataccacctacaggactgctgatggggagtttatggccgtgggagccatcgaacctcaattttatgaactgctaatcaaggggttggggctgaaatcagacgaactgcctaaccagatgtctatggacgactggcctgaaatgaagaagaagtttgctgacgtttttgccgagaaaactaaggccgagtggtgccagatttttgacggtacagatgcctgcgtaacgcccgtgctgacattcgaggaagtggtgcaccacgatcacaacaaagaacgaggttcttttataacatccgaagaacaagacgtgtcaccaaggccggcccccctccttttgaacactcctgccataccaagttttaagagagacccattcataggggaacatactgaagaaattttggaggagtttggattttcacgagaggagatatatcagctgaattcagataaaatcattgaaagcaataaggtaaaggcctccctg

SEQ ID NO: 249422 - DNA, 1146 bp, synthetic construct
  misc_feature 1..1146: note = Description of Artificial Sequence: Synthetic coding sequence
  source 1..1146: mol_type = other DNA
atggccctgcagggaatctcggtggtcgaactctccggccttgccccaggaccgttttgcgcgatggtgctggcggattttggggccagagtcgtgcgggtagaccggcccggctccagatacgacgtgagccggctgggccgcggaaagcgatcattggtgctggaccttaaacaacctcggggcgcagcagtgctccgtaggctgtgcaaaaggtcggacgtgttgctcgagccgttccgcaggggagtgatggaaaagttgcagttggggccggaaatcctgcagagggagaatccccgccttatctacgcaagactctcaggatttgggcagtcaggatccttttgtaggctggctgggcatgacatcaactacctggctctgtcgggagtcctttccaagatcggacggtcgggcgaaaacccatacgcaccactgaacctccttgcggacttcgcaggcggtggactcatgtgcgcacttggcataatcatggccctctttgacagaacccgcaccgggaaaggacaggtcatagacgctaacatggtggaaggaaccgcttacctctccagcttcctgtggaaaacccagaaactgagcctgtgggaggctccgcgggggcagaacatgctcgatggcggagcaccgttctataccacctaccgcactgccgatggagagttcatggcggtgggagccatcgagcctcaattctatgagctgctgatcaagggccttgggctcaagtctgacgagctgccgaaccaaatgtcaatggacgattggcccgaaatgaagaagaagttcgccgatgtgtttgcagaaaagactaaggcggaatggtgccaaatcttcgacgggaccgatgcatgcgtcaccccggtgctgactttcgaagaagttgtgcatcacgatcataacaaagagagagggagcttcatcacttccgaagaacaggatgtgagcccgcggccggcaccccttctgctgaacacgccggccattccatcgttcaagcgggacccgttcatcggagagcacaccgaggagatcctggaagagttcggattctcccgcgaagaaatctaccagctgaatagcgacaagattatcgaatcgaataaagtgaaggcatcgttg

SEQ ID NO: 249423 - DNA, 1146 bp, synthetic construct
  misc_feature 1..1146: note = Description of Artificial Sequence: Synthetic coding sequence
  source 1..1146: mol_type = other DNA
atggccttgcagggcatcagcgttgtggagctgtccgggctcgccccagggccgttctgtgccatggtcctagcggattttggtgcccgggtagtgcgcgtcgataggcccggtagcagatacgacgtgtctcggctcgggcgaggtaaaaggtctctggtccttgacctcaaacaaccacgcggcgcagctgtgctgcgcagactctgcaagaggtctgatgtgttgcttgagccttttcgcaggggcgtcatggaaaagctgcagctggggccggaaattctgcagcgggagaatccccggttgatctatgcgaggctgtctgggttcgggcaatccggtagcttctgtagactggcagggcatgacattaattatctggccttaagcggcgtgctgtccaaaattggccgttcgggcgagaatccttacgctcccctaaacctcctcgccgatttcgcgggggggggcctgatgtgcgctttagggatcatcatggccctctttgaccgcactaggaccggtaagggccaggtgattgacgccaacatggtcgaaggtacagcctatctgagttcgttcttatggaaaacgcagaaactgagtttgtgggaggcgccgcgggggcagaatatgctggacgggggggcccctttctacaccacatacaggacggcggatggggagttcatggccgtgggtgcgatagagccacaattctacgagctgctgattaagggcctcggcctgaaaagcgatgagctacctaatcagatgtcgatggacgattggcccgaaatgaaaaaaaaatttgctgatgtttttgcagagaaaaccaaggccgaatggtgccaaattttcgacggtacggatgcttgcgtaacaccagtgcttacttttgaggaggtggtgcaccacgaccacaataaggagcgcggcagtttcatcacttcagaggagcaggatgtctcaccaagacctgcacctctgttgcttaacactcccgccatcccctcttttaagcgcgaccctttcattggagagcacactgaagagattttagaggagttcggtttctctagggaagaaatctatcagttaaactccgataaaatcatagagtccaataaagtgaaggcatcactc

SEQ ID NO: 249424 - DNA, 1146 bp, synthetic construct
  misc_feature 1..1146: note = Description of Artificial Sequence: Synthetic coding sequence
  source 1..1146: mol_type = other DNA
atggcgttgcagggaatatccgttgtcgaactgagtggcttagcccctggacctttttgcgccatggtgctggccgacttcggcgctagagtggtgcgggtggatagacctggatcccgatacgacgtttcgcgcctggggcgcggaaagagatctctagtgctggatctgaaacagcctcgaggcgcagctgttctgagaaggctgtgtaagaggagcgatgtgctgctcgaacctttccggcggggcgtaatggagaaactccagctgggccctgaaatcctgcaacgggaaaacccacgtctgatttatgctagactctcagggttcggccagtctggcagcttttgcagattagctgggcacgatatcaattaccttgcgttgtccggcgtgttgtctaagataggaaggtcaggggaaaatccctacgcccccttgaatttgctagccgacttcgcagggggcggtcttatgtgcgccctggggattattatggccctgttcgaccgaacacggaccgggaaagggcaggtgatagatgctaacatggttgagggcacagcctacctgagttcttttctgtggaaaacacagaaattgtctctctgggaagccccgagagggcagaacatgctggatggcggtgcccctttctatacaacgtacaggactgctgacggcgagttcatggcggtcggcgccatagagccccagttctatgaactcctgatcaaggggctgggcctaaagagtgatgagttaccgaatcaaatgtctatggacgactggcctgagatgaagaaaaaattcgctgacgtgttcgctgaaaagactaaggccgagtggtgccagattttcgatggcacggacgcctgcgtcacgccagtgctgactttcgaggaagtcgtgcaccatgaccataacaaggagcgcggttcattcatcacttccgaagaacaggatgtttccccaaggccggccccgcttctgcttaacactccagccattccctcatttaagcgggaccccttcatcggcgaacacactgaggagatcttagaagagttcggattcagtcgggaagagatctatcagctcaattcggacaagattatcgaatcaaacaaggtgaaagccagcctc

SEQ ID NO: 249425 - DNA, 1146 bp, synthetic construct
  misc_feature 1..1146: note = Description of Artificial Sequence: Synthetic coding sequence
  source 1..1146: mol_type = other DNA
atggcattgcagggaatctcggtcgtcgaactcagcggactcgcccctggacccttctgtgctatggtgctggcagactttggtgcccgcgtggtgagagtcgacaggcctgggtcgcggtacgatgtgtcacgactgggccggggaaagaggtccctggtgctggatctcaagcagcctcgcggtgcagccgtcctgcgcagactttgtaagcgctcggatgtccttctggaaccctttagaaggggggtgatggagaagctccagcttggaccggaaattctgcagcgagaaaaccctcggctcatttacgctaggctttcggggtttggacagtctgggagcttttgtcgtcttgcaggccatgacattaactacctggcacttagcggagtgctctcaaagatcggaagatccggagaaaatccatacgcaccactcaatctcctggccgattttgccggcggtggacttatgtgtgcactggggatcattatggcactttttgacagaacgcggaccggaaagggacaggtgatcgatgcaaacatggtcgaaggtactgcctacctttcctcgtttttgtggaaaactcagaaactctccctgtgggaggcacctcggggtcaaaacatgcttgacggcggcgcccctttctacaccacctaccggaccgctgatggtgaattcatggcagtgggagccattgaaccccaattctacgaattgctgattaagggacttggactgaaatcggatgagctgcctaaccaaatgtcgatggatgattggccagagatgaagaaaaagtttgcagatgtgtttgcagagaaaactaaggctgaatggtgtcaaatcttcgacggtaccgacgcttgcgtgactcccgtgctcacttttgaagaggtggtccatcatgatcacaataaggaacgcggatcgttcattacgtcggaagaacaagatgtgtcacccagaccagcaccgctgcttctcaatacccctgcaatcccttccttcaagagagatccgtttattggcgagcacactgaagagatccttgaagaatttggcttttcccgcgaagagatttatcaacttaactccgataagattattgaatccaacaaagtgaaggcaagcctt

SEQ ID NO: 249426 - DNA, 1146 bp, synthetic construct
  misc_feature 1..1146: note = Description of Artificial Sequence: Synthetic coding sequence
  source 1..1146: mol_type = other DNA
atggcgttgcaaggaatctccgtcgtggagctctccggactcgcacctggaccattctgcgctatggtcctggcggattttggcgcacgggtcgtcagggtggacaggcccggctccagatacgacgtgagcaggctgggacgtggtaagagatcacttgtgttggacctgaagcagcctcggggagccgcagtgttgcgtcgcctctgcaaaagatcagatgttttgctcgagcctttccggaggggcgttatggaaaagctgcagctgggtccagaaattcttcaacgggaaaatccacgtcttatctacgcgcggttgagcgggtttggacagtcgggttccttttgtcgactcgctggtcacgatatcaattaccttgcactttcgggagtgctttccaaaattggtaggtccggtgaaaacccctatgcaccgctgaacctcttggcagattttgccgggggaggactcatgtgcgcactgggaatcattatggcactgtttgaccggacccgaaccggcaaagggcaagtcattgatgccaacatggtcgagggaactgcatacctgtcatcgtttctgtggaaaacccagaaactttcactttgggaagcaccaagaggtcaaaacatgctggacggaggcgcgcctttttacactacctaccgtacggccgacggggagttcatggcggtgggagcaattgagccgcaattctatgaactgcttatcaagggattgggactcaagtccgacgagcttccaaaccaaatgtctatggatgactggccagagatgaagaaaaagttcgccgatgtgttcgctgaaaagaccaaggccgaatggtgccagatttttgatgggacggacgcatgtgtgactccagtgttgacgtttgaagaagtggtccatcatgatcataacaaggaacggggttcgtttatcacttccgaagaacaagatgtgtctccccgacccgcacctctccttctgaatacccctgcaatcccgagcttcaagcgcgatccattcatcggtgagcacaccgaggaaattctggaagaatttgggtttagcagagaggagatttaccagctcaatagcgataagataattgaaagcaacaaagtgaaagctagcctt

SEQ ID NO: 249427 - DNA, 1146 bp, synthetic construct
  misc_feature 1..1146: note = Description of Artificial Sequence: Synthetic coding sequence
  source 1..1146: mol_type = other DNA
atggccctacaggggatttcagttgtcgagctgtctggcctcgcacctggtcctttttgtgccatggtgctggctgacttcggggcccgcgtggtcagagtggaccgtcctggctctcggtatgatgtgagcaggttgggtcgaggaaaacggagtttagtgctagatctgaaacaaccccggggcgcagctgtactacgcagactatgcaagcggtctgacgtcctgctcgagccttttcggcgcggagtgatggagaagctgcaactgggccctgaaatcctacagagggagaatccacggctcatttatgcaagactgtccgggttcggccaaagtggctcattttgccggctagcagggcatgatattaactacctggccttgtctggtgtcctgtctaagatcgggcggagtggcgagaacccttacgcccctctaaatctactggcagatttcgctgggggtgggctgatgtgcgctctgggcattattatggcactgttcgacagaacacgaacagggaagggtcaggtcatagacgctaatatggttgaagggaccgcctacctctcaagcttcctgtggaagacacagaaactgtccctgtgggaggcacccaggggccagaatatgttagatggcggagccccattttatacaacatatcggacagctgacggggagttcatggccgtgggcgccattgagccccagttctatgagctgctgatcaaaggactcggacttaagtccgatgaactgccaaatcagatgagcatggacgactggcctgagatgaagaagaagtttgctgatgttttcgccgaaaagacaaaggccgagtggtgtcagatctttgacgggactgatgcttgtgtgacccccgtgctgactttcgaggaggtcgtgcaccacgatcacaacaaggagcggggttcctttatcacctcagaggagcaggacgtgagccccaggccagctcccctgctgctgaacactcctgccatccctagtttcaagagagatcccttcataggtgaacacactgaggagatacttgaggagttcggcttctctagggaggagatatatcagctgaactctgacaaaattattgagagtaataaagtgaaagcaagtcta

SEQ ID NO: 249428 - DNA, 1146 bp, synthetic construct
  misc_feature 1..1146: note = Description of Artificial Sequence: Synthetic coding sequence
  source 1..1146: mol_type = other DNA
atggcattgcagggcatatccgtggtggaattgtctggcctggcaccaggaccattttgcgcaatggtgcttgctgattttggagcccgggtggtgcgagtggatcgccccggatctagatacgacgttagcaggctgggcagaggaaaacgctctctggtgctcgatttgaaacaaccccgcggagcagcagtgctgcgccgactgtgcaagagatccgatgtcctcctcgagccctttcgcaggggcgttatggagaaactgcagctggggcccgagatcctgcagagagagaatccccgccttatatatgctcgtctgtccgggttcggccagagcggctccttctgcagactggctggccatgatatcaactaccttgctctctctggcgtgctgagcaaaattggaaggagtggagagaacccatatgcccccctgaacctgctggcagactttgccggaggggggttgatgtgtgctctcggaatcattatggctctttttgaccggactcgtactggaaaaggacaggttatcgacgctaatatggtcgaagggactgcatacctgtcatccttcctgtggaaaacacagaaactttcgctatgggaggcgccccgaggccagaatatgctggacgggggggccccgttttacactacataccgcacagcagacggagaatttatggccgtgggcgccatcgagcctcagttctatgagctgctcatcaagggcctggggttaaagtctgacgagctgccaaaccagatgtccatggacgattggccagagatgaagaagaagttcgctgacgtgtttgcagaaaaaacaaaggccgagtggtgccagatattcgatgggactgatgcctgtgtaacgccggtgctaaccttcgaggaagtggtgcatcatgaccataataaagagcgcgggtcttttattacaagcgaagagcaagacgtctctccaaggcccgcccccctcctgctgaatacaccagcaataccctcatttaaacgcgatcccttcatcggcgagcatacggaggagatcctcgaggagtttggatttagccgagaggagatctatcaactgaactctgataagatcatcgagtcaaataaagtgaaggcctcacta

SEQ ID NO: 249429 - DNA, 1146 bp, synthetic construct
  misc_feature 1..1146: note = Description of Artificial Sequence: Synthetic coding sequence
  source 1..1146: mol_type = other DNA
atggcgctgcaaggtataagcgtggtggagctctcgggactggcgccgggacccttttgcgcgatggtgctggcggacttcggcgcccgggtggttcgcgttgatcgtccaggaagcagatacgacgtgtcacgcctcgggcgcggtaagcgctcgctggtgctggatctgaaacaaccgcggggagccgcggtcctcaggagattgtgtaagcgctcagacgtgcttctggaaccgttccgcagaggcgtcatggaaaaactgcaactgggcccggaaatcctgcagcgcgagaaccctagactgatctacgcccggctttccggattcggacaatcgggatccttctgcagactcgcaggtcacgacatcaactacctggcgctttccggagtgctctccaagatcggccggtccggggagaacccttacgcgcccctcaacctcctggctgacttcgcaggaggagggctgatgtgcgcgctcggaataatcatggcgctctttgatcggacccgaactggaaagggccaagtcatcgatgctaacatggtggaaggcactgcttacttgagttcattcctgtggaaaacccagaagctgagcctgtgggaagctccacgcggacagaacatgctggatggcggggcgccgttctacaccacctacagaaccgccgacggagagttcatggctgtgggcgccatcgagcctcagttttacgaattgctcatcaagggattgggactgaagtcggacgagctgcccaaccagatgtcaatggatgattggcctgagatgaaaaagaagttcgccgatgtgttcgctgaaaagactaaggccgaatggtgtcagatttttgatggaactgatgcatgcgttaccccggtgctcactttcgaagaggtcgtccaccatgaccacaacaaagagcggggatcgttcatcacctcggaagagcaggacgtctccccaaggcccgcaccgttgctcctgaatactccagcgatcccttcgttcaaaagagatccgtttatcggagaacatacggaggaaatcctcgaggagttcgggtttagcagagaggagatctaccagcttaactcagacaagattattgagtcaaataaggtgaaggcaagcctg

SEQ ID NO: 249430 - DNA, 1146 bp, synthetic construct
  misc_feature 1..1146: note = Description of Artificial Sequence: Synthetic coding sequence
  source 1..1146: mol_type = other DNA
atggcacttcagggaatctcggtggtggagttgtccggcttggcgccgggacctttttgtgcaatggtgctggccgacttcggagctcgggtggtccgggtggacaggcccggatcccggtacgacgtgtcccggctggggcgcggcaaacgatcactggttttggaccttaagcagccgcggggggcagccgtgctccgccggctctgcaagcgctccgacgtgttgctggagccgtttaggagaggggtcatggagaagttgcagctgggaccggagatcttgcaaagagaaaatccgagattgatttatgcccgcctgagcggattcggccagagcgggtcgttctgcagacttgctggccacgatatcaactacctcgccctgtctggagtgctgagcaagatcggccgctcgggagagaatccttacgccccactcaatttgttggctgatttcgctggaggtggtctgatgtgcgccctcggcatcatcatggccctgtttgatcggactagaaccggtaaaggccaagtgatcgacgctaacatggtggaaggaaccgcatacctcagctcgttcctctggaaaacccaaaagttgtccctgtgggaggctccgagaggacagaacatgctggacggaggagccccgttctacaccacttaccggaccgcggacggcgaattcatggccgtcggggctatcgagccgcaattctacgaactgcttatcaaggggctgggactcaagtcagacgaactcccaaatcaaatgtcaatggacgattggccagaaatgaaaaagaagtttgcggacgtgttcgccgagaaaacgaaggctgaatggtgccagatctttgacggcaccgacgcatgcgtgaccccggtgctgacctttgaggaggtcgtccatcatgaccataacaaggaacgggggtcatttatcacttccgaggaacaggatgtgtcaccaagacccgcgccgcttctgctgaatactccggcgattccgagctttaagcgcgacccgttcatcggcgagcataccgaagaaattctggaggaattcggattctcgagggaggagatctatcaactgaattcagataagatcattgagagcaataaagtcaaggcgtctctg

SEQ ID NO: 249431 - DNA, 1146 bp, synthetic construct
  misc_feature 1..1146: note = Description of Artificial Sequence: Synthetic coding sequence
  source 1..1146: mol_type = other DNA
atggccctccagggtatctctgtggtggagctatcagggttggcccctggccccttctgcgcaatggtcctggcggattttggggctagggtggtaagagtggaccgtcccggttctcggtacgatgtgtctagattgggtaggggaaaacgcagtctggtgttggatttgaagcagccacggggggccgctgtgttgcggcggctgtgtaagcggtccgacgttctgctggagccttttcgcagaggggttatggagaaactacagttaggtcctgagatcctacagcgggagaacccacgcctgatctacgccaggctgtccgggtttggtcagtccgggagcttttgtcggctggctgggcatgacataaattacctagcgctctctggcgttctatcaaagataggccgatctggggagaacccatatgctcctctgaatttgctggcagattttgccgggggaggattgatgtgcgcactcggtattataatggctttattcgaccgcacaaggactggcaaggggcaggttatcgatgccaatatggttgagggcacggcctatctatctagttttttatggaaaactcagaagctgtctctgtgggaggctccacgtggacagaacatgctggacgggggggcacctttctacactacctaccgaaccgccgatggtgaatttatggccgttggcgcaattgagccgcaattctacgagctgcttataaaagggctgggactgaaatcagacgaactccccaaccagatgtcaatggacgactggcctgaaatgaagaaaaagtttgctgacgtgttcgcagaaaaaaccaaggcggaatggtgtcagattttcgacggtacagacgcgtgtgtcacgcctgttttgacattcgaagaagtcgtgcaccatgaccataacaaagaacgcgggtctttcattacgagtgaggaacaggacgtttcaccccggcctgccccgttgctccttaacactccggcaataccctctttcaagcgggatccgttcattggagagcatactgaggagatcttggaagagttcggatttagtcgggaagaaatataccaacttaattctgataaaatcattgagtcaaacaaggtgaaggcatctctg

SEQ ID NO: 249432 - DNA, 1146 bp, synthetic construct
  misc_feature 1..1146: note = Description of Artificial Sequence: Synthetic coding sequence
  source 1..1146: mol_type = other DNA
atggccctgcaggggatctcagtggtcgagctctccggtctggcccctggccctttttgcgcaatggtgctggctgattttggcgcaagagtcgtcagagtggaccggcccggctcacgctacgacgttagcaggctggggcggggaaaaagaagtttggtgctagacttaaaacagcctcggggagcggcagtgttgagacgcctgtgcaagcggagcgacgtcctcctcgagccgttcaggcggggcgtcatggaaaaactgcagcttggaccagaaatactccagcgtgaaaacccacgactcatctacgcgaggctcagcggatttgggcagtcggggagcttttgtaggttggccggtcacgatattaactatctggcactgtccggagtccttagtaagatcgggcggagtggggaaaacccctatgcccctctgaatctgttggccgatttcgccgggggtggcttaatgtgcgccctggggattatcatggccttgttcgaccggacccgcacgggtaaaggtcaagtgattgatgccaatatggtggagggcaccgcgtatctctcctcatttttgtggaaaacacagaagctgagtctctgggaggcaccgcgggggcaaaatatgctggatggaggagctccgttctacacgacctatcgcactgccgatggggagtttatggcggtgggcgctatcgagccccagttttatgagctgttgattaaggggctagggcttaagtctgatgaactgccgaatcaaatgtcaatggacgactggccagagatgaagaagaaatttgcagatgtgttcgcagaaaaaactaaggccgaatggtgccagatattcgatggaaccgatgcctgtgtcaccccagttctgactttcgaggaggtagtccatcacgaccacaataaggaacgtggatcttttatcacaagcgaggagcaagatgtgtcccctcggcccgccccattattgctgaacacgccagctatacctagttttaagagagacccctttatcggcgagcatacagaggagatcttggaggagtttggtttttcccgggaggagatttaccagctcaacagcgataagatcatcgaatcaaataaagtgaaggcctccctg

SEQ ID NO: 249433 - DNA, 1146 bp, synthetic construct
  misc_feature 1..1146: note = Description of Artificial Sequence: Synthetic coding sequence
  source 1..1146: mol_type = other DNA
atggcactccaggggatttccgtcgtggaactttccgggttggcccccgggcccttttgtgccatggtgctcgcagacttcggggctagagtggttcgggtagataggcccggatctcggtacgatgtgagtaggctcggaagagggaaaaggagtctggtgctagatctgaaacagccccgaggagcagctgtcctacgccggctgtgtaaaagatcagatgtacttctagaacccttcagaaggggggtgatggaaaaattacagttaggacccgagatcttgcagagggaaaatccaagactgatctatgcgcgactatctggattcgggcagtccgggtctttctgtaggttagcaggacatgatatcaattatctcgctctgtctggagtcctgtccaagatcggacggtcaggagaaaatccttatgcccccttaaatcttctagcggactttgcaggaggagggctcatgtgtgcccttggaatcatcatggctctctttgacaggacaaggactggaaaggggcaggtcatcgatgccaatatggtcgaaggaactgcttacctctcttcatttctttggaagacacagaagctatccctctgggaggcaccccgcgggcagaatatgcttgatggaggggcgccattctatacaacatatagaacagccgatggagaatttatggcagtcggagccatagagccccagttttacgagctcctaataaaagggctcgggctaaagtcagatgaacttcccaatcagatgtctatggatgactggccagaaatgaaaaagaaatttgccgatgtttttgctgaaaaaacgaaagctgagtggtgccagatctttgatgggactgacgcttgtgtgactcccgttcttacattcgaggaggttgtgcatcacgatcataataaagaacgcgggtcttttatcacgtctgaggagcaagatgtgtccccccggcccgcccccctccttcttaatactccagctataccctccttcaaacgcgatcctttcataggggaacacacagaagagatactcgaagaatttggattctccagggaagagatctaccagctgaactctgataaaattatcgaatctaataaagtgaaagcatcgctg

SEQ ID NO: 249434 - DNA, 1146 bp, synthetic construct
  misc_feature 1..1146: note = Description of Artificial Sequence: Synthetic coding sequence
  source 1..1146: mol_type = other DNA
atggccctgcaaggaatctcggtggtggagctctcgggactcgcaccgggaccgttctgcgcaatggtccttgctgattttggagcacgggtcgtgagagtggatcgacctggaagcaggtacgatgtgtcgagattgggacggggaaagcggtcactggtgctcgacctgaagcagccgcgcggcgctgctgtgctgcggagactgtgcaagagatccgacgtgcttcttgagccatttagacgtggggtgatggaaaaactgcagctgggtccagagatcttgcagagagagaacccacgcctgatctacgcgagactttccggctttggacagagcgggagcttctgtaggctggctggccacgatatcaactaccttgcgttgtcaggcgtcctgtcgaaaattggccggagcggagaaaacccttatgccccgctgaatttgctcgcagacttcgctggagggggcctgatgtgcgccctcggaatcattatggccctcttcgaccgcactcggaccggaaaggggcaggtcattgatgcgaacatggtggaaggcaccgcatacctctcttcgttcctctggaaaactcaaaagctctcgctctgggaagccccacgcgggcaaaacatgctggacggaggagccccattctacaccacctaccgaacggcggacggagagtttatggccgtgggagccatcgagccgcaattctacgagttgctgatcaaaggactcggtctgaagagcgacgaactgcctaaccagatgagcatggatgactggcctgaaatgaagaagaagttcgccgacgtgtttgctgagaaaaccaaggcggagtggtgtcagattttcgacggcaccgatgcgtgcgtgacccctgtcctgacgtttgaggaggtcgtgcaccatgatcacaataaggagcgcggctcatttatcacctcggaagagcaggatgtgtctccgcggccggcgcctctcctgctcaacacccctgcgatccctagcttcaagcgcgacccttttatcggggaacatactgaagagatcctggaagaatttgggttttcgcgggaagagatataccaactgaactcagacaaaatcatcgaaagcaacaaagtgaaggcgagcctg

SEQ ID NO: 249435 - DNA, 1146 bp, synthetic construct
  misc_feature 1..1146: note = Description of Artificial Sequence: Synthetic coding sequence
  source 1..1146: mol_type = other DNA
atggccttgcaaggaatctcggtcgtggaactttcaggtttggcaccggggccattttgtgccatggtgctggctgattttggcgcacgcgtggtcagggttgaccggccaggatcgcggtacgatgtgtccaggcttggaaggggaaagaggtcccttgtgctcgatctgaaacagcctaggggcgcagcagtgctgcggaggctctgtaagcggagcgatgtgctgttggaaccattcagacggggcgtgatggaaaagttgcagttgggtccggagattttgcaacgagagaaccctagactcatctatgcgcggctgagcgggtttgggcagtcgggttccttttgccggctggccggtcacgacatcaattacctggcattgtcgggtgtgctgtcgaaaattggacgaagcggtgagaacccttacgcaccactgaatctgctggcagattttgcgggaggtggtttgatgtgcgctctgggtattatcatggcacttttcgaccggacgcgcaccggaaagggacaagtgatagacgcaaacatggtggaagggaccgcctacctctcgtcctttctctggaaaacccagaaactctccctgtgggaagcacctagaggtcaaaacatgcttgatggaggagcacccttctacactacttaccgtaccgccgacggagagtttatggcagtgggagcgatagaacctcaattctacgaactgctcatcaagggcctgggccttaagagcgatgaactgccgaaccagatgtcgatggacgattggcctgagatgaagaaaaagttcgcagatgttttcgcggagaaaaccaaggcagagtggtgtcaaatctttgatggtactgacgcgtgtgtcactccagtgcttacttttgaggaggtcgtccaccacgatcataacaaggagagaggcagcttcattacttccgaggagcaggacgtatcaccaagaccagcaccactgctgcttaatacccctgctattcccagctttaagagggaccctttcattggtgagcataccgaagaaatccttgaagagtttggtttttcgcgggaagagatttaccaacttaattcggataagattattgaatcgaataaagtgaaggcatccctc

SEQ ID NO: 249436 - DNA, 1146 bp, synthetic construct
  misc_feature 1..1146: note = Description of Artificial Sequence: Synthetic coding sequence
  source 1..1146: mol_type = other DNA
atggccttgcaaggcatcagcgtggtggaactcagcgggctcgctcccggacccttctgcgcaatggtgctagcggattttggcgctcgtgtcgttcgggttgaccggccaggatcacggtacgacgtctctcggttgggccgggggaagagaagcctggtgctcgacctcaagcagcctaggggcgcagcagtgttgagacgcctgtgcaagaggtctgacgtgttactcgagccttttcggcggggggtgatggaaaagctgcagctcggaccggagatcctgcagcgcgaaaatccaaggctcatctacgctcgtctttcagggtttggccagtcaggctctttttgtcggctcgccggtcatgacatcaattatttagccctgtccggcgtactgtctaaaatcggccggtctggtgagaatccatatgcccccttaaaccttctggccgactttgcgggtggggggctcatgtgtgcactcggtatcattatggcgctgtttgataggacacggactgggaagggccaggttattgatgcaaacatggtggaaggcacagcctacttgtcttcttttttatggaaaacccaaaagctgtcactctgggaagccccaaggggacaaaacatgctcgatggcggagctcccttctataccacgtaccggactgccgatggagaatttatggctgtcggggccatcgaaccacagttctatgagttgctgatcaagggcctgggtctgaagtccgacgaactgcccaatcagatgtccatggacgactggccagaaatgaaaaagaagtttgctgatgtatttgccgagaagacgaaggctgagtggtgccaaatcttcgatgggactgatgcatgcgtgactccggttctgacattcgaagaagtcgttcaccacgatcacaacaaagaacggggttccttcatcacttctgaagaacaagatgttagcccacgcccagccccactcttattgaatacccctgctattccatcttttaagagagaccccttcatcggcgaacacaccgaggagatcctcgaagaattcgggttctctagagaggaaatctatcagctaaacagtgacaaaattatcgaaagcaataaggtaaaagccagtctg

SEQ ID NO: 249437 - DNA, 1146 bp, synthetic construct
  misc_feature 1..1146: note = Description of Artificial Sequence: Synthetic coding sequence
  source 1..1146: mol_type = other DNA
atggccttgcaaggaatcagcgtcgtggaactgtccggactcgccccgggtccgttttgtgccatggtcctcgccgatttcggagctcgggtcgtgcgggtggacaggcccggctcacggtacgatgtgagcaggctcggacgaggcaagcggagcctcgtgctggacctcaaacagccacgcggagcggcagtgctcagaaggctgtgtaagcgctccgacgtgcttctggaaccgtttaggcgcggggtcatggagaagctgcaactcggacctgaaatcctgcagcgcgagaacccaagactgatctacgcgcgcctgtcgggattcggccagtcgggctcattctgccgactggcgggacatgacatcaactatctggccctgagcggtgtcttgtccaagatcggtcggtcaggcgaaaacccatacgccccacttaacctcctggcagacttcgccgggggaggactgatgtgcgctctggggatcatcatggcgcttttcgaccggaccaggacggggaagggacaggtcatcgatgcgaatatggtggaaggcactgcctacctgagctcattcctttggaaaactcaaaagttgtcactttgggaagcacctcgcggacaaaacatgctcgatggcggagccccgttctacactacctaccggactgccgatggagagttcatggcagtgggagccatcgaaccacaattctacgaattgctgatcaaggggctgggattgaagtccgacgaacttccaaaccaaatgtcgatggacgactggccggaaatgaagaaaaagtttgcagatgtgttcgccgaaaagactaaggcggaatggtgccagatatttgatggcacggatgcttgcgtgactccggtgttgacgttcgaggaggtagtccaccacgatcataacaaggaacggggatcattcatcacctcggaggaacaagacgtgtcacctcgtccggctcctctgctcctcaacaccccggccattccatcgtttaagcgcgacccctttatcggcgagcacaccgaggaaatcctcgaagagttcggattctcgagggaggagatctaccaactgaattccgacaagataatcgagagcaacaaggtcaaagcatccctt

SEQ ID NO: 249438 - DNA, 1146 bp, synthetic construct
  misc_feature 1..1146: note = Description of Artificial Sequence: Synthetic coding sequence
  source 1..1146: mol_type = other DNA
atggcactccagggcatttctgttgtagaactctctggactcgcccctggacccttctgcgccatggttctagccgattttggcgctcgggtcgtgagggttgacaggccgggctctagatatgacgtgtccagacttggtcgtggtaagcgtagcttggttctcgacctgaaacagcctcgtggtgccgcagttctgcgccggctgtgtaagaggagcgatgtacttctcgaaccgtttcgccgaggtgtgatggaaaaactacagctcggcccggaaattctgcagagagagaatccacggttgatttacgcacgcctatcaggtttcggtcagagtgggtccttctgtaggcttgctggacacgacatcaattacctagcactttcgggggtgctgagcaagatcggaagatccggcgaaaacccatacgcccctctgaacctgcttgcagattttgcaggaggagggctgatgtgtgcactgggaatcattatggcactcttcgacagaaccagaaccgggaagggacaggtgattgacgctaatatggtcgaaggcaccgcatatctaagtagcttcttatggaagacacagaagctgtctctttgggaggccccacggggtcaaaacatgctcgacgggggagccccgttctacacgacttatcgaacggcagacggcgagttcatggccgtgggggctatagaaccccaattctacgagctattaatcaagggtttagggctgaaatctgacgaattgccgaaccagatgtcaatggacgattggcctgagatgaagaaaaagtttgctgacgtcttcgcggaaaagacgaaagctgagtggtgccagatcttcgacggaacggatgcatgtgtcaccccagtcctgacctttgaggaggtcgtgcaccatgatcataataaagagcgcggctcattcatcacctcagaggagcaagatgtgagcccccgcccagctcccctcttactgaataccccggcaattccatcctttaaacgggacccattcattggggagcatactgaggagatccttgaagagtttgggtttagcagggaggagatataccaactgaattctgacaaaatcatagagagcaataaagtaaaggcaagtctt

SEQ ID NO: 249439 - DNA, 1146 bp, synthetic construct
  misc_feature 1..1146: note = Description of Artificial Sequence: Synthetic coding sequence
  source 1..1146: mol_type = other DNA
atggcccttcagggcatcagtgtggttgagctttctggactggctcccgggcctttctgtgctatggtgctagccgattttggggcacgggtggtgagggttgatcgtcctggcagcagatatgatgtgagcagactggggcggggcaagcggtcattggtcttggatctgaagcagccgaggggagcagccgtacttcgcagactctgtaaacgatccgacgtgttacttgagccatttcgcagaggtgtgatggagaagctccagctggggcccgaaattcttcagcgcgaaaacccgcggctgatctacgcaagactttcagggttcggacagtccggctcattttgtagactggctgggcacgatatcaattacttggctctgtcaggagtgctttccaaaataggccgcagtggcgagaatccctatgctcctctgaacctgctggccgactttgccggtggcgggctgatgtgcgccctcggaattatcatggccctctttgacaggacaaggaccgggaaaggccaggtgatcgatgcaaacatggtggaggggaccgcctacctgtcttcatttttatggaaaactcagaaactgtctctgtgggaagcaccccgtgggcaaaacatgctggatggtggggctcctttctacaccacctaccggacggcagatggcgaattcatggctgttggagctatcgagccacagttttatgagcttctaattaagggcctggggctgaagtctgatgaactgcctaatcagatgtctatggacgactggcccgagatgaagaaaaagttcgcggacgtctttgcagaaaaaaccaaagcagagtggtgtcagatttttgatggaactgacgcatgcgtgacacctgtgctgactttcgaagaggttgtgcaccacgatcacaataaggagaggggaagcttcatcacttccgaagagcaagatgtaagcccgcgtccagcgccgcttcttcttaacactcccgcaattccgtctttcaaaagggatcccttcatcggtgagcatacagaagaaattctggaggagtttggcttcagccgggaagaaatctaccagctcaattcagacaaaatcatcgagagtaacaaggtgaaagcttccctg

SEQ ID NO: 249440 - DNA, 1146 bp, synthetic construct
  misc_feature 1..1146: note = Description of Artificial Sequence: Synthetic coding sequence
  source 1..1146: mol_type = other DNA
atggctctgcaaggtatctctgtggttgaactgagcggactcgcccccggccctttttgcgccatggtcctggccgattttggcgcccgagtggtgagggtggacaggccaggatcccgttatgacgtaagtaggctgggtagggggaaacgcagcctagtgcttgacttaaaacaaccccgtggcgccgccgtgctgcgaagactttgtaaacgctccgatgtgcttctcgaaccctttagaagaggtgtgatggagaagcttcagcttggccccgaaatcctgcagagggagaaccccagactcatctatgctaggctttctggcttcggccagagtggttccttctgtagattggccggacatgatatcaattacctcgctctgtctggagttttgagtaagattgggcgtagcggcgagaatccctacgctccactcaatctattggccgacttcgccgggggaggactgatgtgtgcgttgggcatcattatggcactcttcgacagaacacggaccggcaaaggacaggttattgatgcgaacatggtggaaggcacagcttatctgtctagtttcctctggaagacacagaagctgagcctgtgggaagcaccccggggccaaaatatgttagatggaggcgcccctttttacacgacttaccgaacggccgatggggaattcatggctgttggcgctattgagcctcagttttatgagctactgattaagggattgggacttaaatcggacgagctccccaatcagatgagcatggatgactggcctgaaatgaaaaagaaattcgcggatgtgtttgcagagaagacaaaggctgagtggtgtcaaatctttgacggcaccgatgcatgcgtgactccagtccttaccttcgaggaggttgttcaccacgatcacaacaaagagaggggttccttcatcacgtcggaggagcaagatgtgtccccaagaccagcgccgctgctgctcaatactcccgccataccgtcctttaagcgggatccctttataggggaacatacagaagaaatcctggaagagttcggcttctcaagggaggagatatatcagttgaacagcgacaagattatagagagcaacaaggttaaggctagcctg

SEQ ID NO: 249441 - DNA, 1146 bp, synthetic construct
  misc_feature 1..1146: note = Description of Artificial Sequence: Synthetic coding sequence
  source 1..1146: mol_type = other DNA
atggcgcttcagggtatctccgtggttgaattgtctggcctggctcctggtcccttctgtgccatggttctcgcggactttggagcccgagtggtccgggtggatcgaccgggatctcgctatgacgtctcccgcttggggagggggaagaggtctctggtgctggacttaaaacagcccagaggagcggccgtgctgcgtaggctttgcaaacggagtgacgtcctgctggagcctttcaggagaggggtgatggaaaaactgcagctgggccccgaaattctccagcgcgaaaatccgcgcttgatctatgccaggctgtccggttttggccagtctggttctttctgcaggcttgctggtcacgatatcaactatctcgccttaagtggggtgctcagcaagatcggccggtccggcgagaatccctatgcacccttgaacctgctagcagatttcgctggagggggactcatgtgtgcgctgggcattattatggcactatttgatcgtacccgcactgggaaaggccaggtaattgacgccaatatggtagagggcacagcctatcttagcagctttctttggaagacacagaagctgtcactttgggaggccccccgagggcagaatatgctggacggaggggccccattctatacaacatacaggaccgccgatggagaatttatggctgtgggcgccatcgaaccacagttctacgagttgctgataaaggggcttggtctgaagtcggacgaattgccaaatcagatgtctatggacgactggccagagatgaagaaaaagttcgcagatgtatttgccgagaagaccaaagccgagtggtgccaaatctttgacggcactgacgcctgtgtcacccccgtgttgacctttgaagaggtggtgcatcatgaccacaacaaagagcggggctctttcattacttctgaagaacaagacgtgagtccaaggcccgccccactcttattgaatacccctgccattcccagctttaaacgggacccattcatcggcgaacacactgaagagatattggaagagtttgggttcagccgggaggaaatctatcaattgaactcagacaagattatcgagtcgaataaggtcaaggcctcgcta

SEQ ID NO: 249442 - DNA, 1146 bp, synthetic construct
  misc_feature 1..1146: note = Description of Artificial Sequence: Synthetic coding sequence
  source 1..1146: mol_type = other DNA
atggctcttcaggggatatccgttgtcgagctgtctggccttgctccgggaccattttgtgctatggtgctggccgatttcggcgctagggtggtcagggtagaccggccaggttcccgctacgatgtcagtcgcctcgggcgaggcaaacggtctctcgtcctagacttgaagcaacctcgtggggcagcagtgcttagacgtttatgtaaacgtagcgatgtgttgctggagccattccgccggggtgttatggagaaactgcagctggggccggagatcctgcagcgagaaaatcccaggctaatctatgctcgccttagcggcttcggacagagcggatccttctgcagattagcgggtcatgacatcaactatctagctctgtcgggcgtcttatcaaagattggccgatcaggagagaatccatacgcacctcttaaccttctggccgacttcgccgggggcggcctcatgtgtgctctgggcatcattatggcattgttcgataggactcggacggggaagggccaagtcatcgacgcgaacatggtggaggggaccgcctatctgtcatcctttctgtggaaaacacaaaaattgtccctgtgggaggctccaaggggacagaacatgcttgatgggggggctcccttctacacaacttatcgtactgccgatggcgaatttatggcagtgggagccattgagccacaattctacgaactgctgataaagggcctcgggctgaagagcgatgagcttcccaatcaaatgtccatggacgactggccagagatgaagaagaagtttgccgatgtttttgccgagaagactaaggcagaatggtgccaaattttcgacggcaccgatgcgtgcgtcacccctgtactaacttttgaggaggtggttcatcatgatcataacaaggagcgagggtcctttatcacaagtgaggaacaagatgtcagcccccgcccagccccgcttctgctgaacacgcctgcaatccctagcttcaaacgggacccttttattggggagcataccgaggaaatacttgaggagttcggtttctctcgcgaggaaatctatcagctgaacagtgataagatcatcgaatccaacaaagtgaaggcatccctg

SEQ ID NO: 249443 - DNA, 1146 bp, synthetic construct
  misc_feature 1..1146: note = Description of Artificial Sequence: Synthetic coding sequence
  source 1..1146: mol_type = other DNA
atggcactacaggggattagcgtggtcgaactttccgggctggcccctggccctttctgcgccatggtgttagctgatttcggtgctcgtgttgtccgggttgaccgaccaggatcacggtatgacgtctcaaggctagggcgcgggaaacggtctcttgtgctagacctgaaacagcctcggggagccgccgttctccggcgactctgtaaaaggtcagacgtgctgctggaaccatttcggaggggcgtcatggaaaaactgcaattgggccccgagatccttcagagggaaaaccccaggctgatctacgcgagactcagtggttttggccagagcggatctttttgtcgcctggctggccatgatattaactatttggctctgtccggcgtgctgtctaagattggacgttctggtgagaacccatatgcaccacttaatttgctggctgacttcgcgggtggaggacttatgtgcgctttgggcattattatggctctgtttgatcgaaccagaacaggaaagggccaagtaatcgacgctaatatggtcgaaggcaccgcctacctttcatcatttctgtggaaaactcagaagctcagcctttgggaagccccgcgcggccagaacatgcttgacggtggcgctcccttctataccacataccgcaccgccgacggtgaattcatggctgtgggcgccatcgaaccccaattttacgagctgcttatcaaaggactggggctaaaatctgacgagctgccgaatcagatgtcaatggatgattggcccgagatgaaaaagaaattcgcggatgtgttcgcagagaagacaaaggcggaatggtgtcagatcttcgatggaactgatgcatgtgtgaccccagttcttaccttcgaagaggtggtgcatcacgatcacaataaggagcgcggcagcttcattacctctgaagagcaggacgtaagcccgaggcctgcccctctgctgttaaataccccggcaattccgtcgtttaagagggatccatttattggcgagcacaccgaagagattctcgaggaatttggcttttcgagggaagagatttaccagttgaactctgataaaattatcgagagcaataaagttaaagcgtcactg

SEQ ID NO: 249444 - DNA, 1146 bp, synthetic construct
  misc_feature 1..1146: note = Description of Artificial Sequence: Synthetic coding sequence
  source 1..1146: mol_type = other DNA
atggctctccagggcatctccgttgtggagcttagcggattggccccgggtccgttctgcgctatggtgctcgcagacttcggggctcgcgtggtgcgggtggacagaccgggaagcaggtacgacgtatctcggctggggcgcggcaaaagatcgctcgtgctcgaccttaagcagcccaggggagcggccgtccttagaaggctgtgtaagcggtcggatgtgcttctggagccgtttcggcgcggcgtgatggaaaagctgcaactgggcccggagattctgcagcgggaaaatccaagactgatttacgcccggttgtccgggttcggtcagtcgggatccttctgtaggttggctggccacgacatcaactacctggccctgtcgggagtgctctcaaagatcggaaggtcgggtgaaaacccgtacgccccgcttaacctgctggccgactttgcgggcgggggactgatgtgtgccctgggtattatcatggccctgttcgaccgcacccggactggaaagggacaggtgatcgacgcgaacatggtggaaggaactgcatacttgtcgagcttcctctggaaaacccagaaactgtccttgtgggaagccccacgcggccaaaacatgctggacggaggcgctccgttctacactacttacaggacggcagacggagaattcatggccgtcggcgcaatcgaaccgcagttctacgaactgctcatcaagggactcgggctgaagagcgatgaactgcccaatcaaatgagcatggacgactggcctgaaatgaaaaagaaattcgccgacgtgttcgcggaaaagaccaaggcggaatggtgccaaatctttgacggtaccgatgcctgcgtcactccggtgctgactttcgaagaagtggtccaccacgaccacaacaaggagcgcggctcctttatcacgtcggaggagcaagatgtctcgccacggcccgcgccattgctgctgaacaccccagcgatcccgtcctttaagcgcgacccgttcatcggcgaacacactgaggaaattctggaagagttcggattctcaagggaggagatttaccagcttaactcggataagatcatcgagtccaataaggtgaaggcctccctc

SEQ ID NO: 249445 - DNA, 1146 bp, synthetic construct
  misc_feature 1..1146: note = Description of Artificial Sequence: Synthetic coding sequence
  source 1..1146: mol_type = other DNA
atggctctccaaggtattagcgttgtggagctgagcggcctggcccctgggcctttttgcgccatggttttggccgatttcggggcccgcgtggtacgagtggatagacctggctcaaggtatgacgtaagtagactcggacgaggcaagcggagcctggtgcttgacttgaaacaacctaggggagctgcagtgctccggagactgtgtaagagatccgatgtgctcctcgagcctttcagaagaggagtgatggagaaactccagctgggacccgaaatactgcagagagaaaacccgagactgatctacgccaggctgagcggattcgggcagagcggttctttctgtagacttgctgggcacgacataaattacctggcattgagtggtgtgctttctaagatcgggcggtctggagaaaacccatacgcccctctgaacctgctggccgatttcgctgggggcggtctcatgtgtgcccttgggattatcatggccctgttcgatcgcacaagaacaggtaaggggcaggtgatcgatgccaatatggtggagggaactgcataccttagtagtttcctctggaagacacagaaactgtctctctgggaggccccaaggggtcaaaacatgctcgatgggggtgcaccattttatacaacctaccggacggccgacggtgagttcatggcagtgggcgctattgagccccagttctacgagttgctgattaagggactcggtctgaaatctgacgaactgccgaatcagatgagtatggacgattggccagagatgaaaaagaagttcgcagacgtgttcgcagagaagaccaaggcggagtggtgccaaattttcgatggcactgatgcctgtgtgacacctgttctgacttttgaggaggtggtgcaccatgaccacaacaaggagagggggtcatttatcacatcagaagaacaggatgtgtcccctaggcccgccccactgcttttgaacacgcccgccatcccatcatttaagagggatccttttattggcgagcacactgaagaaattctcgaggagtttggcttctctcgcgaagagatatatcagctgaattcagataagatcattgaatctaacaaggtgaaagcttccctg

SEQ ID NO: 249446 - DNA, 1146 bp, synthetic construct
  misc_feature 1..1146: note = Description of Artificial Sequence: Synthetic coding sequence
  source 1..1146: mol_type = other DNA
atggccctacagggtatctccgtggttgaattgtcggggttggctcccggcccgttctgcgctatggtgctggccgatttcggcgcccgggtggtaagagtggaccgccctggttctaggtatgacgtaagtagattgggacgaggcaagcgcagtctggtcctggatttgaaacagcccaggggtgccgcagtcctaaggcgattatgtaagcggagcgatgtactgctggagccctttcgacgaggagttatggagaagctgcagctcggtcctgagatcctgcagcgggaaaaccctaggttgatctatgcccgtttgtccggttttgggcagtccggctctttctgccgcctggccgggcacgacatcaactacctggccctgtctggggtgctgagtaagatcggccgttcgggtgaaaatccttacgcccccttaaacctgttggcagactttgccggcggcggactcatgtgcgcattaggaattataatggccctgttcgatcgcactcggacagggaagggacaggtgattgatgccaatatggtagagggcaccgcctacctgtcatcgttcctgtggaagactcagaagctgtccctatgggaggctcctcggggacagaacatgttagatggcggcgccccgttttacaccacctatagaaccgcagacggtgagtttatggcagttggggccatcgaaccacagttctatgagttgctcatcaaagggctcggattgaagtcagacgagttgccaaaccagatgagcatggatgattggccagaaatgaagaagaagtttgcagatgtattcgccgaaaagactaaagccgaatggtgccagatttttgatgggaccgatgcctgcgtaactcctgttctgaccttcgaagaagtcgtgcaccacgatcacaacaaagagcggggatcattcatcacatcggaagagcaggacgtgtcccccaggcctgcccccctgctcctgaatacaccagccattcctagttttaagagggatcccttcatcggcgagcacacagaagagattcttgaggagttcggcttctcacgagaagaaatataccagttaaactcggataagatcatcgaatctaacaaagtgaaagcgtcacta

SEQ ID NO: 249447 - DNA, 1146 bp, synthetic construct
  misc_feature 1..1146: note = Description of Artificial Sequence: Synthetic coding sequence
  source 1..1146: mol_type = other DNA
atggcgctccagggcatctcagttgtggaactgtcaggactcgcaccaggaccattctgcgcaatggttcttgccgattttggggctagggtcgtccgggtggataggcctggatctcgatacgatgtttcacgtttgggacgaggcaaacgaagtttggttctagatctcaaacaaccacgaggagcagctgttcttaggcggctttgcaagcggtctgacgtacttttggagccgttcagacgtggagttatggagaaacttcaattgggcccagaaattctacaacgggaaaatcctagattaatctatgctcgactttccgggtttggacaatccggaagtttctgccgtttggcagggcatgatattaactacttagcattatccggagtgttgagtaaaattggtagatcaggagagaatccatatgctccgctcaaccttctcgcagattttgcaggaggtggactcatgtgcgctcttggaattataatggctttgttcgaccgtactagaacgggaaaaggtcaagttatcgacgcaaacatggtagaaggtactgcttacttgtcgtcgttcttgtggaagacacagaagttgagtctatgggaagcgccgagaggtcaaaatatgttggatggaggcgctccattttacaccacataccgcactgcagatggggaattcatggcagttggagccattgaaccacaattttatgaacttctgattaaaggacttggtctcaagtctgatgaattgccaaatcaaatgagtatggacgattggccggaaatgaaaaaaaagttcgctgatgtcttcgcggaaaaaacaaaggccgaatggtgccagatcttcgacggaactgatgcttgtgttacaccggtgcttacttttgaagaggttgttcatcatgatcataacaaggaacgtgggtcgtttattacctctgaagaacaagatgttagtccgcgacccgctcctctcctcctcaatactccagctatcccaagcttcaagagagatccgttcatcggagaacacacggaggaaatcctggaagagttcggcttcagccgggaagagatctaccagcttaattctgacaagattatcgaatcgaataaggtgaaagcatctcta

SEQ ID NO: 249448 - DNA, 1146 bp, synthetic construct
  misc_feature 1..1146: note = Description of Artificial Sequence: Synthetic coding sequence
  source 1..1146: mol_type = other DNA
atggcgttgcagggaatctctgtagtggaactctctggcctggcacccggccccttctgtgctatggtgctggcagatttcggtgcaagggttgtacgggttgatagaccaggctcccgatacgacgtctcgcggttaggcaggggaaaacgctctctcgttctcgacctgaaacagccaaggggagcagctgtactgagacgcttgtgcaagcggtctgatgtgctcctggaacccttccgacggggggttatggagaaattacagctcggacctgagatcctgcaacgagagaatcctcgcctcatttacgcccgcctttccggattcggacagagtggctcattctgccgattggctggacacgacatcaactatcttgctctcagtggagtgctctccaagattgggcgcagcggcgagaacccttatgcccccctaaacctgctcgccgattttgctgggggggggctcatgtgcgctctcgggattatcatggcattgttcgacagaactaggacaggtaaggggcaggttattgatgcgaatatggttgagggaacggcctacctttcttccttcctctggaaaacacaaaaactgagcctctgggaggctcctcgcggccagaacatgctagatgggggggcaccgttctataccacatatcgcacggcggacggcgaattcatggccgtgggagccatcgagccccagttctacgagttattgatcaagggtttaggtctgaaatccgacgaactgcctaaccagatgagtatggatgattggcctgagatgaaaaaaaaatttgccgacgtctttgcggaaaaaacaaaagcagagtggtgtcaaatatttgatggcactgacgcttgtgtgacgccagtgctgacttttgaagaggtggtgcatcacgatcacaataaggagcgcggctctttcatcactagcgaagagcaggacgtgagtcccaggcccgccccattgctgctgaatactcccgccattccatcatttaaacgagaccctttcatcggagagcacacagaagagatcttggaagaattcggcttttctcgcgaagagatctaccagctgaattccgataaaattatagaaagcaacaaggtgaaggcctcactt

SEQ ID NO: 249449 - DNA, 1146 bp, synthetic construct
  misc_feature 1..1146: note = Description of Artificial Sequence: Synthetic coding sequence
  source 1..1146: mol_type = other DNA
atggccctgcagggaatttcggtggtggaactgagcgggttagcgcctgggccattctgtgctatggtgctagctgacttcggcgcgagggtggtgcgcgtggacaggcccggatccaggtacgacgtttctcgcctgggacgggggaagcggagccttgtgcttgacctgaaacaaccccgcggagccgctgttctaaggaggctgtgtaagcgctcagacgtattactggagccgttcagacgcggcgtgatggaaaagcttcagcttggcccggaaatcctccagagggagaatcctcgcctgatttacgcacggctttcgggatttggccagtctggttccttctgccgcctcgccggacatgatattaactatctggctctttcgggagtcttgtctaagatcggtaggtcaggtgagaacccctacgcacctttaaacctgttggcggacttcgctggaggcggccttatgtgcgcgctgggtattataatggctctcttcgatcgcactagaacaggaaaaggacaggtcatcgatgccaacatggtggagggcaccgcctacttgtccagcttcctgtggaagacacagaagctcagcctttgggaagcccctcggggccagaacatgctcgatggcggtgcccccttctacacaacctaccggaccgctgacggtgagtttatggcggtgggtgctatcgagccccagttctatgagctgttgattaagggattaggactcaaatctgatgagctgcccaaccagatgtcaatggatgactggcctgaaatgaagaaaaagtttgcggatgtatttgcagaaaagacaaaggccgagtggtgtcaaatcttcgacgggaccgatgcatgtgtcacccccgttctgactttcgaggaggtggttcatcacgatcacaacaaagaaagagggtccttcatcaccagcgaggaacaggacgtctctccacgccctgcccccctgctgctgaatactccagcaatcccatctttcaagcgggatcccttcatcggggagcacacagaggagattctcgaagaattcggtttctcgcgcgaagaaatttaccagctcaactccgataaaatcatcgaatcaaacaaggttaaggcatcactg

SEQ ID NO: 249450 - DNA, 1146 bp, synthetic construct
  misc_feature 1..1146: note = Description of Artificial Sequence: Synthetic coding sequence
  source 1..1146: mol_type = other DNA
atggcactgcagggaatttcggtggtggagctgagcggcctcgccccgggacctttctgtgccatggtgctggcggacttcggcgcccgcgtggtgcgggtcgacagaccgggatcgcgctacgacgtttctcggttgggaagaggaaaaagatcactggtccttgatctcaagcagccacggggtgccgcagtcctgagacgcctgtgtaaacgttctgatgtcctgctcgagccgttccggcgcggagtgatggaaaaactgcagctgggacccgaaatcctgcaacgcgaaaacccgcggctgatctacgctagactgtcgggcttcggccagtcggggtcgttctgcagactggcagggcacgatatcaattacctggccttgtctggcgtcctgtcaaagatcgggcggtcaggtgagaatccatacgcaccactcaacctgctcgccgacttcgctggtggggggcttatgtgcgcgctcggaattatcatggcactgtttgaccgcacgcgcactggtaaaggccaagttatcgatgcaaatatggtggagggaactgcctacctgtcgtccttcttgtggaaaacgcaaaagctctcgttgtgggaagctccaagaggccagaacatgctggacgggggcgctccgttctacacgacttaccgcaccgccgacggagaattcatggcagtgggggcgatcgagccacagttttatgaactcctgatcaagggactgggactgaagtccgatgagttgccgaatcaaatgtcgatggatgactggccagaaatgaagaagaagttcgccgacgtgttcgcggaaaagaccaaagcggagtggtgccagatcttcgatgggactgatgcctgtgtgacccctgtgctgactttcgaagaggttgtgcatcatgatcacaataaggaacgcgggagcttcatcaccagcgaagaacaggatgtctccccaaggccagcgccgctgctgttgaacactcccgcgatcccatccttcaagcgcgacccatttatcggagaacacactgaagagatcctcgaagagttcggatttagccgggaggagatctaccagttgaactcagacaagatcatcgaatcaaacaaagtgaaggcatcactg

SEQ ID NO: 249451 - DNA, 1146 bp, synthetic construct
  misc_feature 1..1146: note = Description of Artificial Sequence: Synthetic coding sequence
  source 1..1146: mol_type = other DNA
atggcgttacaaggtatatcggtagttgaactatcgggtttagcgccgggtccgttttgtgcgatggttctagcggattttggtgcgcgtgtagtacgtgtagatcgaccgggttcgcgatatgatgtttcgcgattaggtcgtggtaaacgttcgctagttctagatctaaaacaaccgcgtggtgcggcggttttacgacgactatgtaaacgttcggatgttctattagaaccgtttcgtcgtggtgttatggaaaaactacaattaggtccggaaatattacaacgtgaaaatccgcgtctaatatatgcgcgtctatcgggttttggtcaatcgggttcgttttgtcgactagcgggtcatgatataaattatttagcgttatcgggtgttttatcgaaaataggtcgatcgggtgaaaatccgtatgcgccgttaaatctattagcggattttgcgggtggtggtctaatgtgtgcgttaggtataataatggcgttatttgatcgaacgcgtacgggtaaaggtcaagtaatagatgcgaatatggttgaaggtacggcgtatctatcgtcgtttctatggaaaacgcaaaaactatcgctatgggaagcgccgcgtggtcaaaatatgctagatggtggtgcgccgttttatacgacgtatcgtacggcggatggtgaatttatggcggttggtgcgatagaaccgcaattttatgaactactaataaaaggtttaggtttaaaatcggatgaattaccgaatcaaatgtcgatggatgattggccggaaatgaaaaaaaaatttgcggatgtatttgcggaaaaaacgaaagcggaatggtgtcaaatatttgatggtacggatgcgtgtgtaacgccggttctaacgtttgaagaagttgtacatcatgatcataataaagaacgtggttcgtttataacgtcggaagaacaagatgtttcgccgcgtccggcgccgttattactaaatacgccggcgataccgtcgtttaaacgtgatccgtttataggtgaacatacggaagaaatattagaagaatttggtttttcgcgagaagaaatatatcaactaaattcggataaaataatagaatcgaataaagttaaagcgtcgtta

SEQ ID NO: 249452 - DNA, 1146 bp, synthetic construct
  misc_feature 1..1146: note = Description of Artificial Sequence: Synthetic coding sequence
  source 1..1146: mol_type = other DNA
atggcccttcagggtattagtgtggtcgaattgagtggcctcgcccctggccctttttgtgctatggtcctcgcagatttcggggcccgggtcgtgagagtggaccgccccggtagccggtatgacgtttcccggctcggcagagggaaacgaagtctcgtgctcgatctcaaacagccacgtggtgctgccgtgcttcgcagactttgcaagaggagcgatgtcctcctggagcccttccggcgcggcgtcatggaaaagctccagctgggtcctgagatactgcagcgcgagaatccgaggctgatctacgccagactgtccggatttgggcagagcggaagtttttgtcgactggccgggcacgatatcaattatctagccttaagcggggtcctgtctaagatagggcgctccggggagaacccatacgccccgttaaatctcctcgcggacttcgccggcggcggcctgatgtgcgcccttggtataattatggcccttttcgaccgaacaagaactggaaagggccaggttattgatgccaacatggtcgagggcaccgcatacctctctagctttctgtggaaaactcaaaaactctccctctgggaggcgccccgagggcagaacatgctcgacggaggcgccccattttacaccacatatcggacagccgacggggagttcatggcagtcggcgcaatcgaacctcaattctacgaattactaatcaagggcctcggcttgaaatccgacgaactgccaaaccaaatgagtatggacgattggccagaaatgaagaaaaagttcgccgacgtgttcgctgagaaaaccaaagccgaatggtgtcagattttcgatggcaccgatgcatgtgtgacccccgttttgacgtttgaagaggttgtccaccacgatcacaacaaggaacggggctcttttataacttccgaggagcaagatgtctccccacggcctgcgccattgctgctgaacaccccggcaatccctagcttcaagagggatccgttcattggcgaacacactgaagagattctggaggagtttggtttttctcgagaggagatataccagctcaactctgacaaaattatagaatcaaataaggtgaaggccagcctt

SEQ ID NO: 249453 - DNA, 1146 bp, synthetic construct
  misc_feature 1..1146: note = Description of Artificial Sequence: Synthetic coding sequence
  source 1..1146: mol_type = other DNA
atggcgttgcagggaatttcagtggttgaactgtccggactggcacctggcccgttttgtgctatggtgctcgccgactttggggcccgcgtggtgcgggtggatcgccctggatcgcggtacgacgtgtcgaggctgggccggggcaaaagatccctcgttctcgatctcaagcagccccgcggagccgcagtgctccggcggctctgcaagcggtcagatgtcctgttggaaccgttccggaggggtgtgatggagaaactgcaactgggtcctgagattctccagcgcgaaaatccgcggctcatctacgcgcggctctccggattcggacagagcggatccttctgccggctggcgggacacgatatcaactacctggcactctcgggggtgctgagcaagatcggtcggtcgggagaaaacccctacgccccccttaatctgctggctgatttcgcaggaggaggactgatgtgcgcgctgggaatcatcatggcgctcttcgatcggactagaactggaaagggccaggtcatcgatgccaatatggtggagggcaccgcctacctgtcatcgttcctgtggaaaactcagaagttgtccctgtgggaagcacctcggggacagaacatgttggatggtggagcgccgttctacactacgtaccgaacggccgatggcgaattcatggcggtgggcgcaatcgagccccaattctacgaattgctgatcaaggggctgggtttgaagtcggacgagctgcccaatcaaatgtccatggatgactggcctgaaatgaagaaaaagtttgctgacgtgttcgctgaaaaaactaaagccgagtggtgccagatcttcgatggtactgacgcttgcgtcaccccggtgctgaccttcgaggaggtcgtccaccacgaccacaacaaggaaagaggctcttttatcacctccgaagagcaagatgtgtcccctagaccagcccctttgcttctgaacaccccggcaatcccgtcctttaaacgcgacccgttcatcggggagcatactgaagaaatcctggaggagtttgggttctcacgggaagagatttatcaactgaattcagacaagattatcgaatcgaataaggttaaggcgtccctg

SEQ ID NO: 249454 - DNA, 1146 bp, synthetic construct
  misc_feature 1..1146: note = Description of Artificial Sequence: Synthetic coding sequence
  source 1..1146: mol_type = other DNA
atggcactgcagggtatcagtgtcgttgagctctccggtctcgcgcccgggccattttgcgcgatggttctggccgacttcggcgcaagagtcgtacgtgtagaccgtcccgggtctagatacgacgtctcgcgcctaggacgtggcaagagaagtctggtcctggatcttaaacagccaagaggagcggccgtcttgaggagattgtgtaagcgttctgatgtcctgctcgaaccatttaggcgaggagttatggaaaagctccagctaggtcctgaaattttgcaaagagaaaatcctcgcctcatttatgcgcgcctgtctggctttggtcaatcaggcagtttttgtcgactagcaggacatgatattaattatctggcactgtccggcgttctgtctaagatcggccgctcgggtgaaaatccttacgcgccattgaatctactggcggacttcgctggaggcgggcttatgtgcgcattgggcataatcatggccctattcgaccggacccgcactggtaagggccaggtgatcgacgccaacatggtggaaggcacagcttatctctcttctttcctttggaagacgcaaaaattgagtctctgggaggccccccgcggccaaaacatgctggatggaggggcgccgttttataccacgtatcgcacggcagacggtgagttcatggcggtaggtgctatcgaacctcagttttatgaattgctaatcaaaggcctgggcctgaagtcggatgagttgccaaatcagatgtcgatggacgactggcctgagatgaaaaagaagtttgcggacgtgtttgccgagaaaacgaaagctgagtggtgtcagatcttcgatggtactgacgcttgtgtcacccctgtgttgactttcgaggaagtggtgcaccacgatcacaacaaggagagggggtcgtttattacctctgaggaacaggatgtctcccctagacctgctcctctacttcttaacacccctgccataccttcttttaagagagaccctttcatcggtgagcacactgaggaaattctcgaggagtttgggttttcccgtgaggagatatatcaactgaatagcgacaagataatcgaaagcaataaagtcaaggctagcctg

SEQ ID NO: 249455 - DNA, 1146 bp, synthetic construct
  misc_feature 1..1146: note = Description of Artificial Sequence: Synthetic coding sequence
  source 1..1146: mol_type = other DNA
atggccctacagggcatttctgtggtcgagctttctggtctggccccgggccctttctgtgccatggtccttgctgacttcggcgcgcgggtcgtacgggttgacaggccaggctcgcgatacgatgtgtcccgactcggccggggtaagcggagtctggtactagatctcaagcaaccccgtggggcggctgtgctgaggaggctgtgtaagcgctctgacgtcctcttggagccattcagacgtggcgttatggaaaagctgcagctgggaccggagatcctgcagcgcgaaaatccgcgattgatctacgcgcgattgtcgggttttggtcaaagtggatccttctgtcgtcttgctggccacgatattaactatctagctctcagtggtgtgttgtcaaaaatcggacgaagtggtgaaaacccttacgcgccgctcaacttactcgcagatttcgcaggtgggggtctaatgtgtgccctcggcataatcatggccctctttgatcgaacccgcacagggaagggccaagtaatcgacgccaacatggtcgagggcaccgcctacctatcatcattcttgtggaagacccaaaagctgtcgctttgggaggcaccgcgcggtcagaatatgctcgacggtggcgcccccttttacactacatacagaacagccgacggtgaattcatggcggtcggcgcgatcgagccgcagttctacgaactcctgattaaaggcctcggtttaaagtctgatgaactgcccaatcaaatgtctatggacgattggcccgaaatgaagaaaaaattcgcggatgtttttgcagagaaaacgaaagccgaatggtgtcagatctttgacggcacggatgcctgcgttactccggtgctgacttttgaagaggttgttcaccacgatcataataaggaaagagggagctttatcacgagtgaggagcaggacgtaagcccgcgaccggccccgctcttactaaatactcccgctattccatcgttcaagagggaccccttcataggcgaacatactgaggagatcttggaggagttcgggttctccagagaagagatctaccagcttaattccgataaaattattgagtccaataaggtaaaggcatcgctc

SEQ ID NO: 249456 - DNA, 1146 bp, synthetic construct
  misc_feature 1..1146: note = Description of Artificial Sequence: Synthetic coding sequence
  source 1..1146: mol_type = other DNA
atggctctccagggcatctccgtggtcgagctgtccggcctggcccctggaccattttgcgccatggtccttgcagacttcggggcacgagtggttcgagtggaccgacctggcagtaggtacgatgtgagccgactcggaagaggtaagcgatcactggttcttgacctgaaacagccaagaggagccgcagtgctgcgcagactgtgtaaaagatctgatgtgttgcttgagccatttaggagaggggtgatggagaagttgcagcttgggccagagatattgcagagagaaaatccgaggctgatctacgctagactatcagggttcggacagtccggctccttctgtcgcttggccggacacgacatcaattaccttgctctgagcggagtcttgtcaaagatcggccgtagtggcgagaatccttacgcaccattaaacttgttagccgatttcgctggaggcggactgatgtgcgccctcggtattattatggcgttgttcgatagaacacgcaccggaaagggacaggtgattgatgctaatatggtggagggcacagcatacctgtcttctttcctttggaagactcagaaattgagtctatgggaggcgccccgcgggcagaacatgctggatggaggtgcgccattttacactacctacagaaccgccgacggggagtttatggccgtaggggccattgagccccagttctacgagttactcatcaaaggattgggtcttaagagtgacgagctgcccaatcagatgtccatggacgactggcctgaaatgaagaaaaaattcgctgatgtgttcgccgaaaaaactaaggctgaatggtgtcaaattttcgacggtaccgatgcttgcgtaaccccagttctcacctttgaagaggtggtgcatcatgaccacaacaaggagcgaggcagctttatcacgtctgaggagcaggatgtgagcccgaggcccgcgcctctgctgctcaatacacccgctataccaagctttaaacgagatccattcatcggggaacacaccgaagaaatcctggaagagttcggattttcccgcgaggagatctaccagctgaatagtgacaagattatcgagagcaataaggtgaaggcgagcttg

SEQ ID NO: 249457 - DNA, 1146 bp, synthetic construct
  misc_feature 1..1146: note = Description of Artificial Sequence: Synthetic coding sequence
  source 1..1146: mol_type = other DNA
atggccttacaagggatctccgtggtggaactttccggattagcgccaggaccgttttgtgcaatggtgctggctgactttggggctagggttgtgagagttgaccggcccggatctcggtacgacgtctcccgcctaggccgcggcaagcggtcacttgtcctggatctcaagcagcctcgaggcgcagctgtgttacgtcggctttgtaagcggtccgatgtgcttttggaaccattccgccggggcgttatggaaaagctgcagctggggcctgagatactgcagcgagagaacccccgtcttatatatgctagattaagcggattcgggcagtccggatccttttgccgccttgccggacacgacattaactacctggccctgtccggcgttctctccaaaatcgggcgttctggagagaacccctacgctccactgaacctgctcgctgattttgccggcggggggcttatgtgcgcactagggattatcatggctttatttgatcggacgcgcactggaaagggccaggtcatcgacgccaatatggtggagggtaccgcttacctgagctctttcctgtggaagacacagaagctatccctctgggaggctccaagaggacagaatatgctcgatggaggagctcctttctacaccacgtaccggacagccgatggcgaatttatggccgtgggggctatcgagccccaattttacgaattactgatcaagggtctggggcttaagtcagacgaacttcctaatcagatgagtatggatgactggcccgaaatgaagaagaaatttgcagatgtctttgctgaaaagacaaaggccgaatggtgtcagatattcgacggtacagacgcctgcgtcacacccgtgctgacttttgaggaggtggtccaccatgatcacaacaaagaacggggctcatttattacttccgaagaacaggacgtgtccccacgccctgctccgttgttgctgaatacccccgccattcccagtttcaagagagacccattcatcggggagcatacggaagagatcttagaagaattcggcttcagcagagaagagatctaccagctgaattcagacaagatcatcgagagtaacaaggttaaagcaagcctg

SEQ ID NO: 249458 - DNA, 1146 bp, synthetic construct
  misc_feature 1..1146: note = Description of Artificial Sequence: Synthetic coding sequence
  source 1..1146: mol_type = other DNA
atggcgttgcaaggaatctcagttgtggaattatctggtctcgccccaggtcctttctgcgcgatggtgttggcagacttcggagcccgagttgtcagggtcgaccgacccggaagtcgatacgatgtgtctcgattagggagaggaaaacggagtctggtcctggacttaaagcaaccccgaggggcagctgtgttgagaagactttgtaagcgctcagacgtcttgctggagccatttagaaggggagtgatggagaaactgcaactggggcccgagatactgcagcgcgagaatcctcggttgatctatgccaggttgtctggattcgggcagtccggatcattttgtcgtctcgcaggccatgatatcaattatctcgccctctccggggtcctgtccaagatcggccggtccggagagaacccctatgcaccattgaatctgctcgctgattttgctgggggcgggcttatgtgtgcactcggcataatcatggctctgttcgacagaacacgaacagggaaggggcaggtcatcgacgccaatatggtagaggggacggcctacctgagttccttcctgtggaaaacacagaaacttagtctgtgggaagccccgcgcggccagaacatgcttgatggtggcgcacccttctatactacttatagaacagctgatggagagttcatggcagtgggagctattgaaccccagttttacgagcttctaattaaaggtctcggacttaagagcgacgagctccctaaccaaatgagtatggatgactggccagaaatgaagaagaagttcgccgacgtgtttgcagaaaaaacgaaagccgaatggtgccagatcttcgatgggaccgacgcatgcgtaactccggtcctcactttcgaggaagtggtccatcacgatcacaataaggaacgaggctccttcataacttctgaagagcaagatgtgagtccacggcctgccccgttgttactgaacacgccagctatcccaagttttaaacgggatccctttatcggcgagcacacagaagaaattttggaagagttcggcttctcaagggaggagatttatcaactgaacagcgacaaaatcatagagtccaacaaggtgaaggcaagtctg

SEQ ID NO: 249459 - DNA, 1146 bp, synthetic construct
  misc_feature 1..1146: note = Description of Artificial Sequence: Synthetic coding sequence
  source 1..1146: mol_type = other DNA
atggcactccagggtatttcagttgtagagcttagtggactggcccctggacccttttgcgcgatggtattggccgacttcggagcaagagtcgtgagagtggacagaccagggagcagatatgacgtctccaggcttggtaggggaaagaggagcctagtcctggacctcaaacagccccggggcgccgcggtgctgcgtaggctttgtaagaggtccgacgtgttgctcgagccatttagaagaggtgtaatggagaaactgcagttgggacccgagattctgcagcgtgaaaatccacggctgatttacgccagactcagcggattcggacaaagcggttccttttgccgtttggctggtcatgacattaactacctggcactgagcggagtgttgagcaaaattggccggtccggcgaaaatccgtacgctccattgaacctgctcgcggatttcgccgggggcgggttaatgtgcgctctgggcatcatcatggctctgtttgatagaaccaggaccggaaagggtcaggtgatagatgcaaacatggtggaaggaaccgcgtacctgtcttccttcctgtggaaaacccagaagctgagtctttgggaggcaccccgcgggcagaacatgttggatggcggcgctccattctacactacctacagaaccgctgatggagagtttatggcagtgggcgcaattgagccacaattctatgagcttctgatcaaaggactgggcctgaagagcgatgagttgcccaatcagatgagcatggatgactggccagagatgaaaaaaaagttcgcagatgttttcgccgaaaagacaaaagcggagtggtgccaaattttcgatggcaccgacgcgtgtgtcacccctgtgctgacgtttgaagaagtcgtgcaccacgaccacaataaagagaggggcagctttatcacatcagaggagcaggacgtatcccctcgccctgctccgcttcttttgaacacccctgctattccttcctttaaaagggatccatttattggcgagcatactgaagaaatcttggaggagttcggtttctctcgcgaagagatctatcagctaaacagcgataaaattatcgagagcaacaaagtcaaggccagcctg

SEQ ID NO: 249460 - DNA, 1146 bp, synthetic construct
  misc_feature 1..1146: note = Description of Artificial Sequence: Synthetic coding sequence
  source 1..1146: mol_type = other DNA
atggccctccagggtataagcgtggttgagcttagtggtttggcaccaggtccattctgtgccatggtgctcgcagatttcggtgctagagttgtgcgcgtagaccgcccaggatctagatacgacgtttctcgtttgggcaggggtaagagaagcctggtgttggacctgaagcagccccgtggagccgccgttcttcgcagactgtgtaaaagatccgacgtcctgctggagccctttcgccgcggagtcatggagaaactccagttgggtcccgaaatcctgcaaagagagaacccccgcctgatttatgcaagattgtctggtttcggccagagtggttctttctgccgcttggcaggtcacgacataaactacttggctttgtcaggcgtccttagtaagatcggccgctccggcgaaaatccttatgctcctttgaatctgctggctgacttcgcaggcggaggattgatgtgcgcactgggtatcatcatggccctctttgaccgcacacgcaccggcaaaggccaggtaattgatgccaatatggtcgaaggcaccgcttacctgtcatcttttctctggaagacccagaagctctctctctgggaagcaccaaggggccagaacatgcttgatggcggtgcacccttttatacaacctatcgtacagccgatggtgaattcatggccgtcggtgctatcgagcctcagttttacgaactccttataaagggtcttggactgaagagtgatgagctgcccaaccagatgtctatggacgactggcctgagatgaaaaagaagttcgccgacgtctttgctgagaagaccaaagctgaatggtgccagattttcgatggtaccgacgcatgcgttacccccgtacttacctttgaagaagtggttcaccacgatcacaacaaggaacgcggcagtttcatcacatctgaggagcaggacgtgtctccccgccccgcaccactgctgctcaatacacctgccattccatcattcaagagggatccctttataggtgagcacactgaggagatacttgaagagtttggcttcagtagggaggaaatctatcagctgaactcagataagatcattgagagtaataaggtaaaagcatctctg

SEQ ID NO: 249461 - DNA, 1146 bp, synthetic construct
  misc_feature 1..1146: note = Description of Artificial Sequence: Synthetic coding sequence
  source 1..1146: mol_type = other DNA
atggcactacagggcatttccgtagtcgagctttctggcttagcgcctgggcccttttgcgctatggtgctggcagactttggagcaagagtggtacgcgtggacagaccaggtagcagatacgatgtgagtaggctaggacgtggaaagagatccctagtgctggatttgaaacagccaagaggggcagctgtgctccggcggttatgtaagagaagcgacgtgcttcttgaaccctttcgcagaggtgtcatggagaagttgcagctgggaccagaaattcttcagcgggagaacccaaggttgatttacgccaggttaagcgggttcggccaatcaggaagtttttgcagattggctgggcatgacattaattacctggctctgtctggagtgctctcaaaaatcggccggtcaggagaaaacccttatgcacccctcaacctgttagctgatttcgccggcggcggactgatgtgcgccttgggcatcatcatggcattgtttgataggactagaaccggaaaagggcaggtgatcgatgcgaatatggtcgagggaacagcatatctcagctcttttctgtggaaaacacaaaaattatcgctgtgggaggccccaaggggacagaatatgcttgacggaggagcacctttctatacgacctacaggactgcagatggcgaattcatggctgtgggtgcaatcgaaccccagttctacgaactgctgattaaggggctgggactgaaaagcgacgagctccctaatcagatgtcaatggatgactggccagagatgaagaagaaattcgctgatgtcttcgccgagaagactaaagccgaatggtgccagatcttcgatggcactgatgcttgcgtcacaccggtcctcaccttcgaagaggtcgtccaccacgatcataataaggaaagagggtccttcatcacttcagaagaacaagacgtgtccccaagaccagctcctctgctgctgaacactcccgctatcccttcctttaaacgggacccatttataggggagcacactgaggaaatcctagaagaattcggattctcaagagaggagatctaccaattgaactcagacaaaatcattgaaagcaataaagtaaaggcaagcttg

SEQ ID NO: 249462 - DNA, 1146 bp, synthetic construct
  misc_feature 1..1146: note = Description of Artificial Sequence: Synthetic coding sequence
  source 1..1146: mol_type = other DNA
atggcacttcaaggtatttccgtcgtggagctgagtggacttgcaccggggcctttttgtgcgatggtcctggcggactttggagctcgcgtggtgcgggtggatcggcctggatcaagatacgacgtctcgagactcggaagaggaaagcgaagcctcgtgttggatctcaagcagccaagaggcgcagcagtgctcaggaggttgtgtaagaggtctgatgtcctccttgagccattccgtagaggagtcatggaaaagttgcaactggggcctgagattctgcaaagagagaatcctaggcttatctatgcccggctgtccggtttcggacagtcaggtagcttctgccgacttgcaggacacgacattaactacctcgctctttcaggagtactttcgaaaatcggacgaagtggagagaacccttacgcgcctcttaacctgcttgcggacttcgcaggtggcggcctcatgtgcgcccttggtatcatcatggccctgtttgaccggaccagaactggtaagggacaagtcatcgatgcaaacatggtggaggggactgcatacctgtcctcatttctgtggaaaactcagaaactgtcgttgtgggaggcgccacgcgggcagaatatgctggatggtggtgcacccttctacacgacttaccgcactgcagatggggaattcatggctgtgggagcaatagaacctcagttttacgaactcctcattaaaggccttggtctgaagtcggacgaactcccaaaccaaatgagcatggatgattggccggaaatgaagaaaaagttcgcagatgtctttgccgaaaagaccaaggccgagtggtgtcagatctttgacggtaccgatgcctgtgtgactccggttctgacttttgaagaggtcgtgcatcatgatcataacaaagaacgtggtagcttcattacctccgaagagcaagacgtgtctccccgtccagcaccactcctccttaatacccccgccataccttcgtttaagcgtgatcctttcataggtgaacacactgaagaaatactcgaggagtttggtttttcacgcgaagaaatctaccaacttaacagcgacaagattatcgaatcaaataaggtgaaggcatcgctt

SEQ ID NO: 249463 - DNA, 1146 bp, synthetic construct
  misc_feature 1..1146: note = Description of Artificial Sequence: Synthetic coding sequence
  source 1..1146: mol_type = other DNA
atggcgctgcagggtatatcagtggtggaactaagcggtttggcaccaggtccgttttgcgctatggtcctggctgactttggtgctcgggtggtgcgcgtggacaggccgggaagccgttacgacgttagccgcctaggccgcggaaagcgttccctggttctggacctgaagcagccacgaggtgccgcggttcttcgccgcctgtgcaaacgcagtgatgttttgctggagcctttccgccgtggcgttatggaaaagctgcaacttgggccggagatattacagagagagaatcctcgcctgatctatgcccggttatcgggttttggccaatctggctcattctgcagactcgccggccatgatatcaactatctggcgctctccggggtgttaagcaagattggtaggagcggcgaaaacccatatgccccgctgaatctgcttgcggatttcgcaggcggtggcctgatgtgcgctctggggattattatggccctgtttgatcgaacccgcacgggaaagggccaggttattgacgctaacatggtggaaggtaccgcatatctgagctctttcctgtggaagacacaaaaactgtccctttgggaagcacctcggggccagaacatgctcgatggaggtgcgccgttttacactacctataggacggcggacggtgaattcatggcggttggcgcgattgaacctcagttctatgaactgctcattaaagggctgggcctaaaaagcgacgagctgccgaaccagatgagcatggatgactggccggagatgaaaaagaaattcgccgatgtgtttgcggaaaagaccaaggcggagtggtgccagatcttcgacggtaccgacgcctgcgtgacaccggtgctcacctttgaggaagtcgtccatcacgatcacaacaaggagaggggatcgtttattacatctgaagaacaggatgtctccccgcgtccagcacccctcctgctgaacactccagcgattccttcttttaaaagggacccttttattggcgagcacactgaagaaattctggaagagtttgggtttagccgggaggagatctaccaactgaatagcgataagatcattgaatcaaacaaagtgaaagcaagcctg

SEQ ID NO: 249464 - DNA, 1146 bp, synthetic construct
  misc_feature 1..1146: note = Description of Artificial Sequence: Synthetic coding sequence
  source 1..1146: mol_type = other DNA
atggcgctgcagggtatttcagtggtcgagctttccggcctcgcacctggaccattctgtgccatggtgctggcagactttggtgcgcgggtcgtcagggtggatcgcccgggatcgcgctacgatgtatcgaggctggggaggggaaagcgtagcctggtgctggatctgaagcaacctaggggcgcagccgtgctgcgcagactctgcaagcgatcggatgtcctccttgaacctttcagaaggggcgtgatggaaaaactgcagttgggaccagagattctgcaacgggaaaacccgcgtttgatttacgcaagactttctggattcggtcagtcgggctcgttttgtcgtctcgccggtcacgacattaactacctggcgctttcgggagtgctttcgaagataggtagatcgggggagaatccctatgcgccccttaacctgctggcggattttgccggaggcggacttatgtgcgccctgggcatcattatggcactctttgaccgtactaggaccggcaagggtcaagtgatagatgcgaatatggtggaaggtaccgcatacctttcatcgttcctttggaaaactcagaagttgtcactgtgggaggcgccacgcggtcagaatatgcttgatggaggggcacccttttacaccacttacagaaccgcagacggtgaattcatggcagtcggtgccatagaaccgcaattctacgagcttcttatcaaaggactgggactcaagtcggatgaacttcctaatcaaatgagcatggatgattggccagaaatgaagaagaagttcgccgatgtgtttgcggaaaagactaaagccgaatggtgccagattttcgacggtaccgacgcctgtgttactccagtgctgacctttgaagaagtggtgcatcatgatcataacaaggaacgcggatctttcattacttccgaggagcaggatgtcagcccccggccggcacctctccttctgaacaccccggctatcccatcctttaagcgtgacccatttatcggtgaacacaccgaggagattctggaggaattcgggttttcacgagaggagatataccagctgaacagcgataagattattgaaagcaacaaagtgaaagcatccctg

SEQ ID NO: 249465 - DNA, 1146 bp, synthetic construct
  misc_feature 1..1146: note = Description of Artificial Sequence: Synthetic coding sequence
  source 1..1146: mol_type = other DNA
atggctctccaggggatctcagtcgtcgaattgtccggtcttgcaccaggccctttttgtgcaatggtgcttgcagattttggtgcaagagtcgtgagagtggatagaccaggatcgagatacgatgtgtcgaggcttggaagaggcaaacgttcccttgtgctggatctgaagcagcccagaggtgcggcagtgctgcgcagactctgcaagcgcagcgacgtgcttttggaaccatttcgccgcggcgtcatggaaaagctgcagctcggcccagagattctccaacgggagaaccccagactgatctacgcaaggctttccgggtttggacaaagtgggagcttttgccggctggccggccatgacattaactacctggcacttagcggagtcctgagcaagattgggagatcaggcgaaaacccgtacgcaccactgaacctccttgcggattttgccgggggagggctcatgtgtgcactcggaattatcatggcactgttcgacagaacccgcactggtaagggtcaagtcatcgatgcaaacatggtggagggaaccgcctacctctcctcattcctttggaaaacccagaagctgagcctttgggaagcaccgagaggccagaatatgcttgatggcggagcacctttctacactacctaccggactgcagacggtgagtttatggcagtcggagcaatagaacctcagttttatgaactcctcattaagggcttgggacttaaatcggatgaactgcctaaccaaatgtcaatggatgactggccggaaatgaagaagaagtttgccgacgtgttcgcggagaaaactaaagcagagtggtgtcagatttttgatgggacggatgcatgtgttacccctgtgcttacgtttgaggaggtcgtgcatcacgatcataacaaagaaagaggatcgtttatcacctccgaagaacaagatgtctcgcctaggccagcacctctgctgcttaatactccggcaataccatccttcaagcgtgaccctttcatcggagaacataccgaagaaattctggaagaattcggcttctcacgggaggagatataccaactcaactcggataagataatcgaaagtaataaggtgaaggcaagcctt

SEQ ID NO: 249466 - DNA, 1146 bp, synthetic construct
  misc_feature 1..1146: note = Description of Artificial Sequence: Synthetic coding sequence
  source 1..1146: mol_type = other DNA
atggcactccagggaatcagcgttgttgagctgtcgggactagcccccggacctttctgcgctatggttctggctgattttggagctcgggtggtgagggtggatagacccgggtccaggtatgacgtgtcccggttggggcgcggcaagcgcagcttggtactcgatcttaaacagccacgaggagcagctgtccttcggaggctgtgtaagcgaagtgacgtgttgctggagccgtttagaaggggtgtcatggaaaaattgcagttgggaccagagatattgcagcgagaaaatccaaggctaatctacgcacgcctgagcggctttggtcagtctggttccttctgtcgcctcgccggccatgatattaattatctggcactatccggcgtgctttccaaaattggacgttctggtgagaatccctacgcgccactcaatttgctagccgactttgcaggggggggcctaatgtgcgcccttggcatcataatggccctatttgatcgtaccaggacaggtaagggccaggtcatcgacgccaacatggttgaaggaactgcctacctctcttccttcctatggaaaactcaaaagctgagtctctgggaggcaccacgcggccagaacatgcttgacggaggcgcccctttctatacaacctacagaaccgctgatggggaatttatggccgtgggggcgatcgagccccaattttacgagctcttaataaaggggttaggccttaagtccgatgaactgccaaaccagatgtctatggatgattggcccgagatgaaaaagaaattcgcagatgtctttgctgagaagacaaaggcagagtggtgccagatttttgatgggacggacgcctgtgtcacccctgttctcacctttgaagaggtggttcaccacgatcacaacaaggaaaggggttctttcatcacgagcgaagagcaggatgtgtcacccagacccgctccactcctgctgaatactcctgctatccccagcttcaaaagggacccattcattggggagcatacggaggagattcttgaagagtttggattctcccgggaggagatttaccaattgaatagcgataagatcatagagtctaacaaggtgaaagcatctctc

SEQ ID NO: 249467 - DNA, 1146 bp, synthetic construct
  misc_feature 1..1146: note = Description of Artificial Sequence: Synthetic coding sequence
  source 1..1146: mol_type = other DNA
atggccctacagggcataagcgttgtggaactcagcggcttggctcccgggccattttgtgccatggtgttggcggattttggcgctcgagtggtgagggtggacaggcctggttctcggtatgatgtctcccgcctgggccgcgggaagaggagccttgttctggacctgaagcagccaaggggcgctgccgtattgagacggctgtgcaagcgcagtgatgttctgctggagccctttcgaagaggggtcatggagaaactacagctgggccccgagattttgcagagggagaacccccgcctcatctacgctcgactgtctggattcggccagagcgggtccttttgtaggctggctggccatgacataaattatctcgcacttagcggagttcttagtaagatcggcaggtctggcgagaatccatatgcccccctgaatctcctggctgattttgccggcggaggcctgatgtgcgcactgggaatcatcatggccctatttgacaggacaaggaccgggaaggggcaggtgatcgatgctaatatggttgagggaactgcctatctgagctctttcctctggaagacccagaaactgtccctttgggaagctccacgagggcagaacatgcttgatggcggcgcacccttttataccacttatcgtaccgctgacggcgagtttatggcagttggcgctatcgagccccagttctatgagctattgatcaagggattgggactcaaaagcgatgaactccctaaccagatgagcatggatgattggccagagatgaagaaaaagttcgcagatgtctttgccgagaagacaaaggcagagtggtgccagattttcgacggaaccgatgcttgtgtaactcccgtgctgacattcgaggaggtcgtccaccatgatcataataaagaacggggttctttcattacttcagaggagcaggatgtaagccctcggccggctcctctgttactgaatactcccgcaattccatctttcaagcgtgacccgtttattggcgaacacaccgaagaaatcctggaggaatttggtttcagccgggaggagatatatcagctgaactctgacaaaattattgagtcaaataaggtgaaagcaagcctc

SEQ ID NO: 249468 - DNA, 1146 bp, synthetic construct
  misc_feature 1..1146: note = Description of Artificial Sequence: Synthetic coding sequence
  source 1..1146: mol_type = other DNA
atggcgttgcaaggcatttcagtggtagaactgagtggtctggcaccagggccgttttgtgccatggtcttagcggattttggggctcgcgttgtgcgtgtggatcgcccaggctctaggtatgacgtctcgcggttgggacgtgggaagcgcagtcttgtactggatctcaaacagcccaggggagcagcggtgctgcgccggttgtgtaaacgctcagacgtgcttctggaaccgttccggcgaggtgttatggaaaagctgcaactgggaccagagattcttcaaagagaaaatccaagattaatttacgcgcggttgagcggctttggtcagtcaggcagtttttgccgtcttgcaggtcatgatatcaattaccttgcgttgagcggcgtactttccaaaataggccgaagtggggagaatccgtatgcaccgcttaatttactggctgattttgccggagggggtttgatgtgcgctcttggcattatcatggcactattcgatcggacaaggactggcaagggacaggtcattgatgccaacatggtagaaggcactgcgtatctgagttcttttttatggaaaacgcaaaaattatcattatgggaagccccgcgtggtcaaaacatgcttgatggaggcgcgcctttttatacgacttatcggactgccgatggcgaatttatggcagtcggtgcgatcgagcctcagttttacgaattgttaattaaaggccttggacttaaatctgacgagctccctaatcagatgagcatggatgattggccggaaatgaagaaaaaatttgcagatgtgtttgcagaaaaaacgaaagcagagtggtgccagatttttgatggcacggatgcctgtgtaacgccggtgctgacgttcgaggaagtcgtacatcatgatcataataaagaacgtggtagttttatcacgagtgaagaacaagacgtatcaccccgaccggctccactactgcttaacacgcctgcgatcccgtcctttaaacgggatccgttcataggagagcatacggaagagattcttgaagaatttggcttttcacgtgaagaaatttaccaattaaattcagacaaaattattgagtcaaacaaagtaaaggcgagtctg

SEQ ID NO: 249469 - DNA, 1146 bp, synthetic construct
  misc_feature 1..1146: note = Description of Artificial Sequence: Synthetic coding sequence
  source 1..1146: mol_type = other DNA
atggcgcttcagggtatttcagttgtggaattaagcggcctagcccctggtcctttttgtgccatggtacttgcggattttggagctcgagtggtgagagtagatcgacccggttctcgctacgacgtgtcacggttaggccggggcaaacgtagcttagtcttggatctgaagcagccaagaggcgcagctgtccttcgacggttatgtaaacgcagcgatgtactgctggaaccttttcgtaggggagtgatggaaaaacttcagcttggtcctgaaattttgcaaagagagaatccgcgcttaatttatgctaggttgtctggttttggacagtcaggcagcttttgcagacttgccggacatgacatcaattatctggcgttgtctggagttcttagtaaaatcggccggtctggcgaaaatccgtacgctccgttaaatctcctggccgatttcgcggggggtggattgatgtgtgcgctgggcatcattatggcgttgtttgaccgtacaagaacgggtaaaggccaggtgattgacgcgaatatggttgagggaacagcttatctgtcttcatttctttggaaaacgcaaaaattgtctctgtgggaagcgccgagaggccaaaatatgcttgatggtggggctcccttttacacgacatatcgtacagcggacggcgaatttatggcggtgggcgcgattgaaccgcagttttacgagcttcttattaaaggactgggccttaaatcagatgaactgccgaatcagatgtccatggacgattggcctgaaatgaagaagaaatttgcggatgtttttgccgaaaaaacaaaggcagaatggtgccaaatctttgacggaaccgatgcatgcgtcacgccggttcttacctttgaggaagtagtacaccacgaccataacaaggaacgcggttcttttatcacgtctgaagagcaggatgttagcccgcgtccggctccccttctattgaatacaccggccataccgtcattcaaacgcgaccccttcatcggggaacatacggaagaaattttggaagaatttggattttcaagggaagaaatctatcaattgaattcagacaaaatcattgaatcgaataaagtgaaagcaagctta

SEQ ID NO: 249470 - DNA, 1146 bp, synthetic construct; identical to SEQ ID NO: 249458
  misc_feature 1..1146: note = Description of Artificial Sequence: Synthetic coding sequence
  source 1..1146: mol_type = other DNA

SEQ ID NO: 249471 - DNA, 1146 bp, synthetic construct
  misc_feature 1..1146: note = Description of Artificial Sequence: Synthetic coding sequence
  source 1..1146: mol_type = other DNA
atggctctgcaggggatctctgttgttgaactgtccggactggcccctggtccattttgcgccatggttctcgctgattttggcgcccgagtggtgagagtcgatagaccagggagtaggtatgacgtgtctcgcctgggcagagggaagcgttccctcgtgctagatttgaagcagcctaggggcgctgccgtgctgaggcgactgtgcaagaggtctgacgtactgctggaacccttcagacgcggcgtcatggaaaagttgcagctcggccctgagattctccaacgggagaaccccagactaatatatgcccggctaagcggattcggccaatctggttccttctgccgactggccggtcatgatataaattatttagctctgtctggagttctgtccaaaatcggcagatctggcgagaacccttatgccccactcaacctgctggctgactttgctggcggcgggttaatgtgcgcattaggcatcatcatggctctgtttgatcgtaccaggactggcaaaggtcaggtgattgacgccaacatggtcgaggggaccgcctacctatctagctttctgtggaagacacagaaactatccctctgggaagctccaaggggtcaaaacatgctggacggtggggctcctttttacaccacataccggaccgccgacggagaattcatggcagtgggcgccatcgaacctcagttttatgaattactaataaagggcttaggtctgaagtccgatgagctacccaatcaaatgtccatggatgactggcccgagatgaagaagaaattcgctgatgtgtttgctgaaaagacaaaagccgagtggtgccaaatctttgatggtaccgatgcctgcgtgactcctgtccttaccttcgaagaggtagtgcaccatgatcacaacaaggagaggggctcctttataacttcagaagaacaagacgtgtctcccaggccagcccctctgctgctgaacactccagccatccccagcttcaaacgtgacccattcatcggggagcacactgaagagattctagaggagttcggctttagtagagaggagatataccaactgaactcagataagataattgaatccaacaaggtgaaggcctccctg

SEQ ID NO: 249472 - DNA, 1146 bp, synthetic construct
  misc_feature 1..1146: note = Description of Artificial Sequence: Synthetic coding sequence
  source 1..1146: mol_type = other DNA
atggcgcttcaaggaatatccgtcgtcgagctttcaggactggcacctggtcctttttgtgcaatggtccttgcggatttcggggcaagagtggtgcgggtcgatcggcctggctccagatacgatgtgtcgcgtctcgggcgtggcaaaagatccttggtgctggacctgaagcaaccgcggggggcagcggtgcttagacgcctgtgtaaacggtcagatgtccttctggagccatttcggcggggtgtgatggaaaagctccaactgggacctgaaattctgcagagagaaaacccacgcctgatctacgcgcgcctttccggtttcggacaaagcggtagcttctgtcgactggcaggccacgatatcaattaccttgcactgtcaggagtgcttagcaaaattggccgatcgggagagaacccctacgcccctcttaaccttctggcagattttgccggtggaggactgatgtgcgccctcggcatcattatggctctttttgatagaaccaggacggggaagggccaagtgattgacgcaaatatggtggaaggcaccgcatacctttcttcctttctctggaaaacccagaaactcagcctgtgggaagcaccacgcggacagaacatgcttgatggaggtgccccattttacaccacttaccggactgcagacggagaattcatggctgtgggcgccattgagccccaattctacgaactgttgatcaagggactgggtcttaagagcgatgaactgcccaaccaaatgtccatggatgattggcctgaaatgaagaagaaatttgcagatgtctttgcagaaaagactaaagccgagtggtgtcagatttttgatggtacggatgcatgcgtgactcctgtcctgaccttcgaggaggtggtccaccacgaccataacaaggaacgggggagcttcattacctccgaagaacaagacgtctccccccgacccgccccccttctgctgaacactcctgccataccatcgtttaaacgtgatccgtttataggtgaacataccgaagaaattctggaagaatttggcttctccagggaagagatttatcagttgaactcggataagattatagaatcaaacaaggtgaaggccagcttg

SEQ ID NO: 249473 - DNA, 1146 bp, synthetic construct
  misc_feature 1..1146: note = Description of Artificial Sequence: Synthetic coding sequence
  source 1..1146: mol_type = other DNA
atggccctgcagggaatctcagtcgtggagttgtccggtctcgcccccggtccattttgcgccatggtactggctgatttcggtgctcgcgtggtcagggtagatagacctggaagccgctatgacgtatctcgattgggcaggggtaagcggagcctcgtgctggacctcaagcaaccgcgaggtgctgcggtgctcagacggttgtgcaaaaggagcgatgtgttgcttgagccatttcggcgcggtgtgatggagaagctccagcttggcccagaaatcctgcagagggaaaatccgaggctgatttatgctcgactgagtggatttggccagtctgggtctttctgtcggttggcaggtcatgacattaattatctcgcactgtctggagtactcagtaaaatagggcggtctggagagaacccttatgcacccctgaatcttctggcggatttcgccggaggagggttgatgtgtgccttgggaatcataatggccctgtttgacaggacccggacaggaaagggccaagtcatagatgctaacatggtcgagggcaccgcctacctctcctcttttttgtggaaaacccagaaactctcactgtgggaagccccacgcggccaaaacatgctcgatgggggagcaccgttttataccacttacaggactgccgatggagaattcatggcagtgggtgcaatcgagccacaattttatgaattgctcatcaaaggcctcggcctgaagtcagatgagctgccgaatcagatgagcatggacgattggccagagatgaagaaaaagttcgctgacgttttcgctgagaagactaaggccgaatggtgtcagatattcgacggcaccgacgcttgcgttacccccgtgctcacattcgaggaggtagtgcaccatgaccataacaaggaaagaggctcctttatcacctccgaggagcaagatgtcagccctcgccctgcaccgcttctgcttaacactcctgcaatccccagctttaaaagggacccctttatcggtgagcacactgaggagattctggaggagtttggattcagccgcgaagagatctaccagctgaactcagacaagattattgaaagcaataaggtgaaagcaagcctc

SEQ ID NO: 249474 - DNA, 1146 bp, synthetic construct
  misc_feature 1..1146: note = Description of Artificial Sequence: Synthetic coding sequence
  source 1..1146: mol_type = other DNA
atggccttgcaggggatatctgtggtggagctctccggtctggcgcccgggccgttctgcgcgatggtcctggctgactttggggctagggtggtgcgggtcgataggccgggctctcggtatgacgtttctcgactgggcagggggaagcgatccttggtgctagacctgaagcaaccccggggggcagctgtactgcgcagactgtgcaagcgcagcgatgtgctgcttgagccattccggcgtggggtcatggaaaagctgcagctgggacccgaaatactccagagggagaacccccgattgatctacgctagattgagcggattcggacagagcgggtctttctgccgcttggccggacacgacatcaattatctggctctctcaggcgtcctgtccaagattgggagatccggtgagaacccttacgctcccttgaatctgttagccgatttcgccggcggcgggctgatgtgcgctttgggtatcatcatggctctgttcgacagaacacgcaccgggaaggggcaggttattgacgctaatatggtggagggaacagcctacctcagttcctttttgtggaaaacccagaagcttagtctgtgggaagccccccgaggccagaatatgctggatggcggggcacccttttacaccacctaccgcaccgccgatggagagtttatggccgtcggagcaatagaaccccagttttatgagttgctcattaaggggctgggactgaagtccgacgagctgcctaatcaaatgtctatggatgactggccagaaatgaaaaaaaagttcgctgacgtctttgctgaaaagacaaaggccgagtggtgccagattttcgatggcacagacgcgtgtgttacgcccgtcctgacgttcgaggaagtagtgcaccatgaccataataaggagcgcggttcctttataacgagcgaggagcaggacgtgagcccaagaccggcaccactcctgctgaataccccagccatcccgtcatttaagcgcgatccatttataggagaacatactgaagagattctcgaggagtttggcttttcacgagaagagatataccagctgaatagtgacaagatcattgaatccaacaaagtcaaagcctcgctg

SEQ ID NO: 249475 - DNA, 1146 bp, synthetic construct
  misc_feature 1..1146: note = Description of Artificial Sequence: Synthetic coding sequence
  source 1..1146: mol_type = other DNA
atggctttgcaaggtatcagcgtcgtggaactttcgggactggctccgggacccttctgtgctatggtacttgcggacttcggcgcgagggtggtgcgcgtcgaccgtcccggttcccggtacgatgtgagcagactgggacgaggaaagagaagcttggttttggacttgaaacagccgcgtggtgctgctgtgttacgacggttgtgtaaacgttcagacgtcctgctggagcccttccgccggggcgtcatggaaaagctccagctgggtccggaaatcctgcagcgcgagaacccgcgtctgatctatgcccgactgtcaggattcggccaatccggatctttctgccgcttggccgggcatgatataaactacctggcgctttcgggtgtgctgagcaaaatcggtcgctccggagaaaacccctacgcgccgctaaatctgctggccgatttcgccggtggcgggctgatgtgcgctttagggatcattatggcgctattcgatcgcacccggacgggaaagggccaagtcatcgatgcaaacatggtggagggcacggcctatctgagctccttcctctggaagacacaaaagctctctctatgggaggctccacgcggtcagaatatgcttgacggaggcgccccgttctatactacgtatcgaacggcggatggcgagttcatggccgtgggcgccattgaaccgcaattttacgagctgctgataaagggtttgggattgaagtccgatgagttgcccaaccagatgagcatggatgattggcccgagatgaagaagaagtttgcagatgtgttcgcagagaagactaaggcagagtggtgccagatcttcgatggcactgatgcctgcgtgacgccggtgttgacctttgaggaagtagttcaccacgatcacaacaaagagcgaggatccttcattaccagtgaggagcaggatgtgtccccacgccctgcacctctgctgctgaacacaccagctattccctcgttcaaacgtgatccatttatcggagagcacacggaagagatactggaagagtttgggttctcgcgtgaggagatctaccagctgaactcggacaagataatcgaatcgaacaaggttaaggcttcgctg

SEQ ID NO: 249476 - DNA, 1146 bp, synthetic construct
  misc_feature 1..1146: note = Description of Artificial Sequence: Synthetic coding sequence
  source 1..1146: mol_type = other DNA
atggccctgcagggtatcagcgtggtggaactgtcaggtttagccccaggccccttctgtgcaatggttctagccgacttcggggcccgcgttgtgcgtgtagaccggcccgggagccgctacgatgtatcccgactagggcgcggaaaaaggagccttgtgcttgacctcaagcagccccggggcgcagctgtgttaagacgcctctgcaagaggtctgatgtgctgttagagccattccgccggggggtgatggagaaactgcagcttggcccagaaattctgcaacgagagaacccacgcctcatatacgctcggctgtcaggctttgggcagtccggttcattctgccggttagctgggcatgacatcaattacctggcactctccggcgtgctctctaagattggacgcagcggagagaacccgtatgcaccccttaatctattggcagacttcgctgggggcggcctcatgtgtgcactggggatcatcatggcactcttcgatagaacgcgcacaggcaagggccaggtcattgacgcaaatatggtcgaaggcaccgcctacttaagttccttcctttggaaaacacagaagctttctctgtgggaagccccccgtggccagaatatgttagacggaggtgcaccgttctataccacctaccggactgctgatggggaatttatggccgtgggggctatcgaacctcagttttatgagttactgattaaagggttgggactgaagagcgacgagttgcccaatcagatgtctatggacgattggcccgaaatgaaaaagaagttcgctgacgtgtttgctgaaaaaactaaagccgagtggtgtcaaatcttcgatgggaccgacgcctgtgtgacgcctgtgctgaccttcgaggaagtcgtgcaccatgaccataataaggagaggggatcctttatcacgtcagaagagcaggacgtctcaccacgccccgcaccccttcttcttaatacgccagctatcccctcattcaaaagggatccctttatcggagagcataccgaggaaatactcgaagagtttggtttttcgcgtgaggaaatctaccagctgaatagtgacaaaattattgagtctaataaagtgaaggcttcacta

SEQ ID NO: 249477 - DNA, 1146 bp, synthetic construct
  misc_feature 1..1146: note = Description of Artificial Sequence: Synthetic coding sequence
  source 1..1146: mol_type = other DNA
atggccttgcaaggaatctccgtggtggagctgtcgggtctggcgccgggacctttctgtgcgatggtcctggcagacttcggagccagagtggtcagggtcgatcgcccgggcagcagatacgacgtcagccgcttgggtagaggcaagagatcccttgtgcttgatctgaagcagccacgcggggcggcagtgctgcggcggctgtgcaagaggtccgatgttctgctggagcctttccgccggggagtcatggagaaactgcagttgggaccggagatccttcagagagaaaatccgcggttgatctacgcacggctctcagggttcggtcagtcgggcagcttctgtcggctcgctggccatgatatcaactacctggccctgtccggcgtgctctcgaaaatcggccgctcaggcgagaatccgtacgcgccacttaacctgctggcggattttgcgggaggcggactgatgtgcgccctgggcatcatcatggccctgtttgatcggacccggactggaaagggacaggtgatcgacgcgaatatggttgaaggaaccgcctacctgtcgtcctttctctggaaaactcagaagctctcactctgggaggcaccccgcggacaaaacatgcttgatggaggagcgcctttctacactacttaccgcaccgccgacggcgaattcatggccgtgggggctatcgagccacaattctatgagttgcttatcaagggactcgggcttaaatccgacgagctgccaaatcagatgtcaatggacgattggccggagatgaagaaaaagttcgctgatgtgttcgccgagaaaactaaggccgaatggtgtcagatcttcgacgggactgatgcgtgtgtcaccccagtgttgacgtttgaagaggtggtgcatcacgaccacaacaaggaaagaggtagcttcattaccagcgaagaacaggacgtctcgccgcgcccggcgcctctgctgctgaataccccagcgatcccatcattcaagcgggatccctttatcggagaacacaccgaggagatcctcgaggaattcggattctcccgggaggaaatctaccaactgaacagcgacaagattatcgaatccaacaaggtgaaggccagcctg

SEQ ID NO: 249478 - DNA, 1146 bp, synthetic construct
  misc_feature 1..1146: note = Description of Artificial Sequence: Synthetic coding sequence
  source 1..1146: mol_type = other DNA
atggctttgcaaggcatttctgttgtcgaactctctggcttagctccaggcccattctgcgcaatggtactcgccgatttcggtgctcgtgttgtcagagtggatagacctggttccaggtatgatgtgagtaggttgggaagaggaaaaagatccttagttttggacttaaagcaaccacgaggagctgctgttttgcggagattatgtaagagatctgatgtccttctagagccctttagaaggggtgttatggagaagttgcaacttggccctgaaatcttgcagagggaaaacccacgtttaatttatgccaggctttctggttttggtcagtctggttccttctgtaggcttgctggtcacgacattaattacctggccttatcgggcgttttgtcaaagattggtagatcgggtgagaacccatacgcacctcttaatctcctcgctgacttcgccggagggggacttatgtgtgctcttggcatcatcatggctttgttcgataggactcggacaggaaagggacaggttatcgacgccaacatggtagagggtactgcttacctatcgtcttttctatggaaaacccagaagctgtctctatgggaggctcctaggggtcagaatatgttagacgggggggcgcctttctatacaacctaccgaactgctgatggtgaattcatggcggtcggcgctatagagcctcagttctacgaattgctcataaaaggacttggccttaaatccgatgagcttccgaatcaaatgagtatggatgattggccggaaatgaagaagaaatttgcagatgttttcgctgaaaagacgaaggcagaatggtgccagatattcgatgggacggatgcttgtgtgacgcctgttcttactttcgaggaggtggttcatcacgatcacaataaggagagaggatcctttatcacctctgaggaacaagacgtatctccacggccggcacctttgttgttaaacaccccagctatccctagctttaaacgtgatcctttcattggagaacatactgaggagatcctggaagaatttggtttctcaagagaagaaatctaccagctaaattctgataaaattatagaatctaataaggtcaaggctagcttg

SEQ ID NO: 249479 - DNA, 1146 bp, synthetic construct
  misc_feature 1..1146: note = Description of Artificial Sequence: Synthetic coding sequence
  source 1..1146: mol_type = other DNA
atggcccttcagggtatttcagtagtcgaactgtccggactggcacctggtccattttgcgcaatggtgctcgcggactttggagcgcgggtggtgagagtcgaccgcccaggatcgagatacgatgtgtcgagacttgggagaggaaagagaagcctggtccttgatctgaagcaaccgcgcggcgcagcagtgcttagaaggctgtgtaagcgctcagatgtcctcctggaaccatttagaaggggagttatggagaaactccagttggggccagaaatcctccagagggagaacccgcgactcatatatgcacggctctctggttttggacagagcggatccttttgtcggcttgcagggcatgacatcaactacctggcgctgtcgggtgtcctttcgaagatcggacgctccggcgaaaacccatacgcgcctcttaaccttctcgctgattttgcagggggaggacttatgtgtgcactggggattatcatggcactgtttgatcgcacccgaaccggaaaagggcaggtgatcgatgccaatatggtggagggaactgcatacctcagcagctttctctggaaaactcagaagctgagcctttgggaagctccccgggggcagaacatgcttgatggtggcgcgccattctacaccacttaccgtaccgccgatggagaattcatggcagtgggtgcaattgaacctcaattctacgagctgctcataaaaggtctgggactcaaatcagacgaattgccaaatcaaatgtccatggacgactggcctgaaatgaaaaagaagttcgccgatgtgtttgcagagaaaactaaagcagaatggtgccagatctttgatggcacggatgcatgtgtgactcctgtgctcacttttgaagaagtggtccatcacgatcataacaaagaacgcggttcgttcataacctccgaggaacaggacgtgagccctagacccgcccccttgctgctgaacactcccgccattccttcctttaaacgagatccttttatcggtgaacacaccgaggaaatactggaagaatttgggttctcgagggaagagatctaccagctcaactccgacaaaatcattgaatcaaacaaagtgaaagcctcgctt

SEQ ID NO: 249480 - DNA, 1146 bp, synthetic construct
  misc_feature 1..1146: note = Description of Artificial Sequence: Synthetic coding sequence
  source 1..1146: mol_type = other DNA
atggctttgcaaggcatctctgttgtggagctttcgggcctggctccgggtcccttctgcgcgatggtcctagccgatttcggtgcgcgcgttgtacgcgtcgaccggccaggcagccgctacgacgtgtcacgcttgggcagaggcaaacggtcgctagtgctggacctgaagcaaccgcgcggagcagctgtattgcgcagactctgcaagcgctccgatgtgctgctcgaaccgtttcgtcgaggtgtcatggagaagttgcaacttggccctgagattctgcagcgcgagaatccgcgtctgatttatgctcgcctatcggggtttggtcaatccggatccttttgtcgattagccggtcacgatattaattatctggccctttccggggtgctatcgaaaatcggacgaagcggagaaaacccgtacgcgccgttgaatctgctcgccgacttcgcgggtggtggactgatgtgcgcgctgggcatcatcatggcactgttcgaccggacgaggacaggtaaaggccaggtgatcgatgcgaacatggtggagggcacggcatatctgtcctccttcctgtggaagacccaaaagctaagtctgtgggaggccccgcgaggacagaacatgttggacggcggtgcccccttctacactacttataggacagcggatggtgagtttatggccgtcggcgccattgaaccacaattctacgagttgctaattaaaggcctcggtctcaagtcggatgagctgccaaaccagatgagcatggatgactggcccgagatgaagaagaagttcgccgacgttttcgccgagaagaccaaggccgagtggtgccaaatatttgatggcacagacgcctgcgttacaccagtactgacatttgaggaagtggtgcaccatgaccacaataaggagagaggttctttcatcacttccgaggagcaggatgtgtccccccgccctgctcctcttctgttgaacacccccgcaatcccctcgtttaaacgggacccatttataggggagcacaccgaagagatactcgaggagttcggcttctcgcgtgaggagatctatcaactgaattctgacaaaatcatagagagtaataaggtgaaggcctcctta

SEQ ID NO: 249481 - DNA, 1146 bp, synthetic construct
  misc_feature 1..1146: note = Description of Artificial Sequence: Synthetic coding sequence
  source 1..1146: mol_type = other DNA
atggcgttgcagggtatttccgtagttgagctgtccggtctggctcccggaccgttttgcgcgatggtgctcgccgacttcggtgcccgggtggtgcgcgtggaccggcctggcagtcgctacgacgtttcccgtctcggacgtggtaagaggtcccttgtgttggacttaaaacaaccgagaggcgctgctgtgctgcgccggctctgcaagcgctccgatgtcctgttggaaccgttccggcggggggtgatggagaagctccagctaggccccgagatcctgcagcgcgagaaccccagacttatctacgctcgcttgtcgggcttcggtcagtccggtagcttctgccgtctcgccggtcacgacattaactatctcgcgcttagcggcgtgctgtcgaagatcggtaggtcgggtgagaatccctacgcccctctcaatttgttggcggacttcgcgggtggaggcttaatgtgcgccctcggcatcattatggcactgttcgatcgtacacgcaccggtaagggtcaggtcattgatgccaacatggtggagggaaccgcctacctgtcttctttcctctggaagacccagaagcttagcctatgggaggccccgcgcggccagaatatgcttgacggtggtgctcccttctacactacctaccgcaccgccgacggagagttcatggcggtaggcgccattgagccgcaattctacgaactgctaataaagggcctcggcctgaagtcggatgagctccccaaccagatgagtatggacgattggcctgagatgaagaagaagttcgccgatgtgttcgctgagaagacgaaggccgagtggtgccaaatcttcgacggtaccgacgcatgcgtcactcccgtgttgacattcgaagaggtggtccatcatgatcacaacaaggagaggggctccttcattacctcagaagagcaagacgtcagtccgaggccagctccccttctgctgaacactcctgcaatcccttcctttaaacgcgacccgttcattggtgagcatactgaagagatcctggaggagttcggctttagcagggaagaaatataccagctgaacagtgataagattatcgagtccaacaaggtgaaggcctcgctg

SEQ ID NO: 249482 - DNA, 1146 bp, synthetic construct
  misc_feature 1..1146: note = Description of Artificial Sequence: Synthetic coding sequence
  source 1..1146: mol_type = other DNA
atggctctgcagggaatcagtgtagtggaattatccgggctggcgccaggtcccttctgcgcaatggtgctggcggatttcggcgcgagggttgtgcgggtcgatcgaccggggtctcgctacgacgtgtcgagactgggcagaggcaaacgctccctggtgctggatttgaagcagccaaggggggctgccgtcctgaggagactgtgtaagcgctccgacgtcctcctcgagccctttagacgcggagtcatggaaaagttacagctcgggcctgaaatactccagcgggagaatccgagactgatttacgctaggttatccgggttcggccagtcaggtagtttttgccgcctggccggccacgacatcaactacctcgctctgtccggcgtgctatcaaaaatcggaagatccggtgagaacccctacgcccccctgaacctcctggccgattttgctggaggagggctaatgtgtgccctgggtatcattatggctctgttcgacagaacccgcacagggaaaggccaggtgatcgatgccaatatggtggagggaacagcctacctgagttcttttctgtggaagacccagaaactgtctctgtgggaggctcccaggggccagaatatgcttgacggcggagcgccgttctacaccacttacagaacagcagacggggagtttatggccgtcggagccatagaaccccagttctacgagctgctgatcaaggggctcggacttaagtcagatgagctacctaatcagatgagcatggatgactggcccgaaatgaagaagaaattcgcagatgtcttcgctgaaaagaccaaagccgagtggtgccagatattcgatggcacggatgcttgtgttaccccagtactgacgtttgaggaagtggtccaccacgatcacaataaagaacgggggagctttatcacttcagaggaacaggacgtctccccaagacccgcccccctcctgcttaataccccagccattccctcttttaaacgcgatcccttcatcggcgagcacacagaagagatactggaagagttcggattctcaagagaggagatttatcaactgaatagtgacaaaataatcgagagcaacaaagtcaaagccagcctc

SEQ ID NO: 249483 - DNA, 1146 bp, synthetic construct
  misc_feature 1..1146: note = Description of Artificial Sequence: Synthetic coding sequence
  source 1..1146: mol_type = other DNA
atggccctccaggggatcagtgttgtcgagctgtccggtctggccccaggcccgttctgtgcaatggtattggccgatttcggagcaagagtcgtgcgtgttgatcggcctggaagccgctacgacgtgagccgcctcggcagagggaagcgttccctcgttttggacctcaaacagcctagaggcgccgctgtcctgcggcggctgtgcaaacggtcagacgtcttgctcgagccttttcggcgaggggtgatggagaagctccagctgggccccgagattctgcagcgagaaaaccctagactcatatacgccaggctgagcgggttcggccaatctgggtcattttgtaggctggcgggacatgatattaactatcttgcactctccggcgtgttgagcaagatcgggcggagcggcgagaatccttatgccccactcaacctgttggctgattttgctggcggaggcttgatgtgcgccctcgggatcatcatggctctgttcgaccggacaaggaccggcaaaggccaggtcatagacgcgaacatggtcgaaggcaccgcgtatctgtcatccttcctgtggaaaacccaaaaactgagcctgtgggaggccccaagagggcagaacatgctggatggcggagctcccttctacaccacttaccggacagcagacggtgagttcatggctgtgggcgccatcgaaccgcaattctatgaattgctgatcaagggcctgggcctgaaatcagatgaattgcctaaccagatgagtatggacgattggcctgagatgaagaagaagtttgccgatgtcttcgccgagaagaccaaagctgagtggtgtcagatcttcgacggaactgacgcttgtgtaacccctgtactgacttttgaagaagtcgtgcatcatgatcataataaagaaagaggttccttcattaccagtgaggagcaggatgtgtccccccgacctgcaccactcctcctgaatacccccgcaatcccatcattcaagagagatccatttatcggcgagcatactgaggaaattctggaagagttcggattttctagagaggagatataccaactcaattcagataaaatcatcgaatccaataaggtgaaggcctcattg

SEQ ID NO: 249484 - DNA, 1146 bp, synthetic construct
  misc_feature 1..1146: note = Description of Artificial Sequence: Synthetic coding sequence
  source 1..1146: mol_type = other DNA
atggctctccaggggatcagcgtggttgagttgagcggtttggcccctggaccattctgcgccatggtactggcagatttcggagccagggtcgtgcgggtcgatagacctggatctcgctacgatgtgtccaggctggggcgcgggaagaggtcgctggtgctggatctcaagcaaccaagaggagccgcggtgctcagacggctttgcaagcgctccgatgtcctgctggaaccgtttaggcgcggcgtcatggaaaagctccaactgggcccggaaatcctgcaacgcgaaaatccccggctgatttacgcccggctctccggattcggacagtcaggaagtttctgcagattggcgggacatgacattaactacctcgctctttcgggagtcctcagtaagatcggtcgaagtggggagaacccttacgctcctctgaatctgctggccgactttgcgggaggaggcctcatgtgcgcactcggcattatcatggcactgtttgacaggaccaggaccggcaaagggcaagtgatcgacgctaacatggtggagggcaccgcatatttgtcctcctttctgtggaaaactcagaagctctccctgtgggaggcaccgcgcgggcagaacatgttggacggaggagcgccgttctacactacgtaccgcactgcggacggcgagtttatggccgtgggcgccatcgaaccgcagttctacgagctcttgattaagggtttgggacttaaatcggacgaactgccgaaccaaatgagcatggatgattggccagagatgaagaagaagttcgcagacgtctttgctgaaaagaccaaagcggaatggtgtcagatcttcgatggcacggacgcctgtgttaccccagtgctgactttcgaggaagtggttcatcacgaccataacaaggaacgggggagcttcattacttcggaggaacaggacgtgtcgccgcggcccgccccactgctgttgaacactcccgcgatcccttcgttcaagcgcgacccattcatcggagagcatactgaagaaatcctggaggaattcggattcagccgggaagagatctaccagcttaatagcgacaaaatcatcgaatcgaataaagtgaaagcaagcctg

SEQ ID NO: 249485 - DNA, 1146 bp, synthetic construct
  misc_feature 1..1146: note = Description of Artificial Sequence: Synthetic coding sequence
  source 1..1146: mol_type = other DNA
atggccctacagggaatctcagtggtcgaactgtctggtctggcccctggaccattctgcgctatggtgctcgcggactttggcgcacgcgtggtacgggtggatcgccctgggtctagatacgacgtgtcaaggctgggaaggggcaaaaggagtctggtgctggacttgaaacaaccgcggggcgctgcggtcctccgtcgtctgtgcaagagatccgacgttttgctggagccattccgtagaggagttatggaaaagctccagttaggaccagaaatcctgcagagggagaacccgaggctcatctatgctcgcctatccggattcggacaatcaggtagtttctgccgactggctgggcacgatattaactatctggccctgagcggcgtattgagtaaaatcgggcggtcaggcgaaaacccatatgccccactgaatttgctggctgacttcgctggcggcggcctgatgtgtgcgctcggaataattatggccctgtttgacaggacacgtacaggtaaaggacaggtgatcgacgctaatatggtcgaagggactgcgtatctgtcttctttcctatggaaaacacagaaactgagtctctgggaggcccctaggggccagaacatgttggacggcggcgcccctttctacaccacctatagaacagcagacggagagttcatggcagtgggcgctatcgagccccagttttacgagcttctaatcaaagggctgggcctgaagagcgacgagttaccaaaccaaatgagtatggacgactggccggaaatgaaaaagaagttcgcagatgtgtttgctgaaaagaccaaggcggagtggtgtcaaattttcgacggcaccgatgcatgcgttacccccgtgctcaccttcgaagaagtggtgcatcacgaccacaacaaggagcgcggcagctttatcacctcagaggagcaggacgtttctcctcggcctgctcctcttctgttgaatactcccgctatccctagtttcaagagagacccgttcattggcgagcacactgaggaaattcttgaggagttcggtttcagtagggaggagatctaccagcttaactcagataagatcatcgagtccaataaagttaaggccagttta

SEQ ID NO: 249486 - DNA, 1146 bp, synthetic construct
  misc_feature 1..1146: note = Description of Artificial Sequence: Synthetic coding sequence
  source 1..1146: mol_type = other DNA
atggcccttcagggaataagtgttgttgaactttctggactggcgcccggcccattttgtgcaatggtgctggcagactttggggccagagtagtgcgagtcgataggcccggatctcgctatgatgtcagtcgtctgggcaggggaaaaagatccctggtactggacctgaagcagccccggggagcggcggtcctccgcaggctgtgcaagcggtctgatgtcctgctagaacctttccgacggggtgttatggagaaattgcagctagggccagaaatcctccaacgagagaatccccgcctgatttacgctaggcttagtggattcggacagagcggttctttctgtcgtctcgccggacatgatatcaattatttagctctgtctggcgtgctgagcaagatcggacgatctggggagaatccttatgctccgttgaacctgttggcggatttcgccggcggcgggctgatgtgtgcactagggattattatggcactgttcgacaggacacgcactggaaagggccaggtgatcgatgcaaacatggtagagggtacagcctacctctcaagctttctatggaaaacccagaagctttccctttgggaggctccacgagggcaaaatatgctcgatggcggggctccattctatactacataccggacagctgacggtgaatttatggccgtgggcgccatcgagcctcaattctatgaactactgatcaagggactcgggctgaaaagcgatgaactgcctaatcagatgtccatggacgattggcctgaaatgaaaaaaaagttcgccgacgtgtttgccgagaaaacaaaggccgaatggtgtcagatttttgatgggactgatgcctgcgtcacgcctgtccttacctttgaagaagtggtgcatcacgatcacaacaaggaaagaggttctttcatcacctccgaggagcaggacgtctccccccgaccagcaccacttctgttaaatacccccgctatccctagttttaaacgagatccattcatcggggaacatacagaggagatcttggaggaatttgggttttctagggaggagatttaccaacttaactccgataagattattgaatcgaacaaggtaaaggcgtctctg

SEQ ID NO: 249487 - DNA, 1146 bp, synthetic construct
  misc_feature 1..1146: note = Description of Artificial Sequence: Synthetic coding sequence
  source 1..1146: mol_type = other DNA
atggcgctgcagggcatctccgtcgtcgaattgtcggggctggctcccggcccgttctgcgcaatggtgctcgctgattttggcgccagagtggtgcgcgtggaccgcccgggttcccgctacgacgtgtcgaggcttggacgaggtaagcggtccctcgtcttggacctcaaacagcccagaggagctgcggtgctgcgccggctctgcaagcggtccgatgtgctcctcgaaccgttccgccgcggagtcatggagaaactgcaactgggccctgaaatccttcaacgggaaaatccacgcttgatctacgcaaggctctccggatttggtcagtcgggtagcttttgtcgacttgccggacacgacatcaattacctcgcacttagcggagtgctgagcaagatcggaagatcgggagagaatccatacgcccctctgaacttgctggccgatttcgctggcggtggactgatgtgcgcgctcggaatcatcatggcgctgtttgaccggactaggactggaaagggccaggtcattgacgccaacatggtggaaggcactgcctacttgtcgtcctttctgtggaaaacgcaaaagctgtccttgtgggaagccccgaggggacaaaacatgttggacggcggagcaccattttacaccacctaccggactgccgacggggaattcatggcagtcggcgcaatcgagccacagttctacgagcttctcattaagggactgggcctcaagtcagacgaactcccgaatcaaatgtcgatggatgattggccggagatgaagaagaagttcgcagacgtgttcgccgagaaaaccaaggctgagtggtgtcagatcttcgacggaacggacgcctgcgtcactccggtgctgactttcgaagaagtggtgcatcacgaccacaacaaggagcggggatcattcatcacctccgaagaacaggatgtgtcaccgcgccctgccccactcctgctgaacaccccagcgataccgtcattcaagagggatccctttatcggagagcatacggaggaaatcctcgaggagttcggtttcagcagagaggagatttaccaacttaattccgacaagattatcgagtcgaataaggtcaaggcctcgctc

SEQ ID NO: 249488 - DNA, 1146 bp, synthetic construct
  misc_feature 1..1146: note = Description of Artificial Sequence: Synthetic coding sequence
  source 1..1146: mol_type = other DNA
atggcactacagggaatttccgtagtggaactcagtgggctcgcgcctgggccattttgcgcgatggtgctggccgatttcggggccagggtggtaagggttgatcgccccggatctcggtatgatgtctctcgactggggagaggaaaaaggtcccttgttttggatcttaaacagcccaggggggccgctgttctgcggagactatgcaagcggagtgatgttctcctagaacccttcaggcgaggagtgatggaaaaactccagctcggacccgaaattctccagcgcgagaacccccggcttatatatgctcgactttccggatttggacagtccgggtccttctgccggttagccgggcatgacatcaactacctcgccctgagtggagtgctgagtaaaatcggaaggtctggggaaaacccttatgcccctctgaatctattggctgatttcgctggaggagggttaatgtgcgctctggggatcataatggccctttttgatagaactcggacagggaaagggcaggtaatcgatgccaatatggttgaggggactgcttacctttcaagttttctctggaaaactcagaaactttccttatgggaggctccgcgaggacagaatatgctcgacgggggggctcccttttatactacatatcgaacagctgacggggaattcatggccgtgggggctatcgagcctcagttttatgaactcctcataaaaggactgggacttaaatcagatgagttgccgaatcagatgtccatggatgattggccagaaatgaaaaaaaaatttgccgatgtttttgccgagaagacaaaagctgaatggtgtcagatctttgatggaactgacgcctgcgtaactcccgtacttacttttgaggaagtggtgcatcatgatcataacaaagaaagggggtcatttatcacatccgaagaacaggacgtctccccaaggcctgccccccttcttctaaacactcctgccataccttcatttaaacgagatccattcattggagaacatactgaagaaatcctcgaagagttcggattctcaagagaggaaatataccagctaaattccgacaaaattatagaatcgaacaaggttaaagcctctctt

SEQ ID NO: 249489 - DNA, 1146 bp, synthetic construct
  misc_feature 1..1146: note = Description of Artificial Sequence: Synthetic coding sequence
  source 1..1146: mol_type = other DNA
atggcccttcagggaattagtgttgtggaactgtccggtcttgcccccggaccattctgcgccatggtgttagccgatttcggggctcgcgtggtgagagtggatcgacctgggagcagatatgatgtgagcagattggggcggggcaagcgaagcctggttcttgatctcaaacaaccgcgaggtgctgccgttctcagaagactctgcaaacggagtgatgttctcctggagccgttccgaaggggagtgatggaaaagctgcagttgggccctgaaatactacagcgcgagaaccccagactgatatatgcacgtctgtcaggctttggccagagcggtagcttctgtaggctagcagggcacgacatcaactaccttgcgctgagcggtgtcctatccaagattggtcggagtggcgaaaatccctatgccccactgaacctattagctgattttgccggcggcggcctgatgtgcgcgctgggaattattatggctttgttcgatcgaacccgtaccggaaaaggacaggtaattgacgctaatatggtggagggaaccgcatatctaagttcctttctttggaaaacacagaagctcagcctttgggaggcccctagaggccagaatatgttggacgggggcgctccattctatacgacctataggaccgcagacggcgagttcatggcggtgggcgccatcgaaccccagttttatgaactgctgattaaagggctcggattgaagtccgacgagctgcctaatcagatgagcatggatgattggcctgagatgaagaaaaaatttgctgacgttttcgctgagaaaactaaggcagaatggtgccaaatctttgatggtacagacgcatgtgtgacccctgtcctgacttttgaggaggtggtccatcacgaccacaataaagagagaggcagtttcataaccagcgaggagcaggacgtaagcccgcgacccgctcctctgttgctaaatacccccgccatcccttctttcaaacgggatcccttcatcggggagcatacagaggaaatccttgaggaatttggtttcagtcgtgaggagatataccagctcaactcagacaagatcatcgagtccaataaagttaaggcgtccctc

SEQ ID NO: 249490 - DNA, 1146 bp, synthetic construct
  misc_feature 1..1146: note = Description of Artificial Sequence: Synthetic coding sequence
  source 1..1146: mol_type = other DNA
atggcgctgcagggcattagcgtggtagaactttctggtcttgcccccggtccgttttgcgccatggtgctcgctgactttggagctagagtggtcagggtggatcgcccaggctccagatatgacgtgtctagactcggaaggggcaagcgctctctggtcctggatcttaagcaacctaggggtgctgctgttctgagacgcctctgcaaaaggtccgacgttctcctcgagccttttcgcaggggcgtgatggaaaagctgcaacttggcccggaaatcttgcagagagaaaaccctagactgatatatgccaggttgtccggattcggacagtccggctccttctgccgcctcgccggccacgacatcaattacctggccctcagtggtgtactttcaaaaatcggtaggtctggtgagaatccctatgccccactgaacctgcttgcggacttcgccggaggaggattgatgtgtgccctcggcataattatggctttgttcgatagaacaaggactggaaaaggccaggtcatagacgctaacatggtcgagggtaccgcttacctgtcatcctttctctggaagacacagaaactctctctttgggaagccccaagaggacagaacatgttggacggtggagctcccttctataccacataccgcacggcggacggcgagttcatggccgtgggtgcaattgaacctcaattctacgagcttctgattaagggccttggactcaaatccgatgaactcccgaaccaaatgtccatggatgactggcctgagatgaagaagaagttcgccgatgtgtttgccgaaaaaactaaagcagaatggtgccagatttttgacggaacggatgcatgtgtgactcccgtcctcacgtttgaggaagtcgttcaccatgaccacaacaaggagcgcggaagcttcatcacttctgaggagcaggacgtgagtccccgcccggctcctctgctcctcaatacccccgccatcccttccttcaaaagggatccctttatcggagagcatacagaagaaatactggaagagtttggttttagcagagaggaaatctatcaactcaatagcgataaaatcatcgagtcaaacaaggtgaaagctagcctc

SEQ ID NO: 249491 - DNA, 1146 bp, synthetic construct
  misc_feature 1..1146: note = Description of Artificial Sequence: Synthetic coding sequence
  source 1..1146: mol_type = other DNA
atggccctgcagggtatatccgtagtcgagctctccgggctggcaccgggccctttttgtgccatggtactcgcagacttcggcgcaagggtcgtgcgagtcgaccggccgggcagccggtatgatgtgtcacgcctggggagaggaaagagatccctggtcctcgacttaaagcagccccggggcgccgccgtcctccgcaggctttgcaagcgcagtgacgtgttactggaacctttcaggcgaggagtgatggaaaaactgcagttaggccccgagatcttgcaaagagaaaaccccaggctgatttatgcccggcttagtggttttggtcagagtggaagcttttgtagactggccgggcacgacattaattacctcgccctctcgggcgtgcttagcaaaattggcaggtctggagaaaacccatatgcccccctaaatctcctcgctgactttgctggcggagggctgatgtgcgccctcggaatcatcatggccttgttcgaccgcacccggaccggcaaagggcaggtcattgacgccaatatggtagagggaaccgcttacctgtcgtctttcctgtggaaaactcaaaagctctccctgtgggaggctccacgcggacagaacatgctggacgggggggcgccattttatacaacatacaggaccgcagacggcgaatttatggctgtgggtgctattgaaccccagttctatgaacttctgatcaagggtctgggcctgaaaagcgacgaactccccaaccagatgagcatggacgattggccagagatgaaaaaaaaattcgccgacgtattcgccgaaaaaacaaaggcagagtggtgccagatttttgacgggaccgatgcgtgcgtaacacccgtgctcacatttgaggaagtggtgcaccacgaccataataaggagagagggtctttcattacctcagaggagcaggatgtgtcccctcgcccagcacctctgttacttaatactcccgccattccgtcgttcaagagggaccctttcatcggtgagcacactgaggagattctagaggaatttggattctcccgcgaggaaatctaccagctcaactctgacaaaatcatcgagtctaacaaagtcaaagcaagtttg

SEQ ID NO: 249492 - DNA, 1146 bp, synthetic construct
  misc_feature 1..1146: note = Description of Artificial Sequence: Synthetic coding sequence
  source 1..1146: mol_type = other DNA
atggccctccagggtatatctgtcgtcgagctttctggtctcgcacctggacccttttgtgccatggttcttgctgatttcggtgcaagggtcgtacgcgtggatcgccccgggtccagatacgatgtctcacggctgggccgcggaaaacggtcactcgttttggacctgaagcagccccgaggtgccgccgttctccgccgcctgtgtaaacggtccgatgtgctgctggagccatttcgacggggggtaatggagaaacttcagcttggacctgaaatcctccagagagaaaacccaaggctgatatacgcacggttgtccggattcggacaatcaggatccttttgccgactggcaggacacgacatcaactatttggcactcagtggcgtgctgtccaagattgggcgctcaggcgagaacccctatgcacccttgaatctgctggctgatttcgctggcggaggactgatgtgcgctctgggtatcatcatggctttgtttgatagaaccagaactgggaagggccaagtgattgacgccaatatggtagaaggcaccgcctacctctcctctttcttgtggaaaacccaaaagctttccctgtgggaggcccctcgcggacagaacatgctcgacgggggagcccccttttacactacatacaggaccgcagacggggaattcatggctgtcggggcgatcgaacctcagttctacgaactgcttattaaaggactgggcttgaaaagtgacgagctgcccaaccagatgagtatggatgactggccagaaatgaagaagaagttcgcagacgtcttcgctgagaaaaccaaggccgagtggtgtcagatcttcgatggcactgatgcgtgcgttaccccagtgctgactttcgaggaagtggtgcaccacgaccacaacaaggagcgaggctcatttatcacatcagaagagcaggatgtgagtcctaggcccgccccacttcttctgaacacaccggccattccctcctttaagcgcgacccatttatcggcgagcatactgaggaaatactcgaggagtttggcttctcacgagaggagatttaccagctcaactccgataaaatcattgaaagtaataaagttaaagcgtccctg

SEQ ID NO: 249493 - DNA, 1146 bp, synthetic construct
  misc_feature 1..1146: note = Description of Artificial Sequence: Synthetic coding sequence
  source 1..1146: mol_type = other DNA
atggcccttcaaggtatcagcgtcgtggagctgtcgggactcgcgcccggacctttctgcgctatggtgctggcagacttcggagccagagtggtccgggtggatagacctggatctcgctacgacgtttcgcgcctgggaaggggtaagaggtcgttggtgctggaccttaagcagccgagaggagccgccgtgctccgacggctgtgcaagcgctcggacgtgctgctggaacctttccggcggggagtgatggagaagctgcaactgggtcccgaaatcctgcaacgcgaaaacccgcggctgatttacgcccgcttgtcaggattcgggcaaagcggatcattctgtagactcgccgggcatgatatcaactacctggcactgtccggggtcctctccaagatcggtaggtccggagagaacccgtacgcccccctcaatctcctggcggacttcgctggcggcggcctgatgtgtgcgctgggcattatcatggccttgtttgatcggacccgcactggtaagggccaggtcatcgacgcgaacatggtcgagggcactgcctatctgtcatcctttctttggaaaacgcagaaactgtcactctgggaagctccgcgtggccagaatatgctcgatggaggcgccccgttttacaccacctaccgcactgcagacggagaatttatggcagtgggagcaatcgaacctcagttctacgagctccttattaaggggctggggttgaagagcgacgagctcccaaaccagatgtcgatggacgattggccggaaatgaaaaagaaatttgcggatgtgttcgcggaaaaaaccaaggctgagtggtgccagatcttcgatggaaccgacgcgtgcgtgactccggtgcttaccttcgaggaagtggtccaccatgaccacaacaaggagcggggcagcttcatcacttcggaggagcaagatgtgtcgccacgcccggctccattgctgctcaacaccccagccatcccgtccttcaagcgcgacccattcatcggagaacacacggaggaaattctcgaagagtttggattctcaagagaagaaatctaccagctgaatagtgacaagatcatcgaatccaataaggtcaaagcaagcctg

SEQ ID NO: 249494 - DNA, 1146 bp, synthetic construct
  misc_feature 1..1146: note = Description of Artificial Sequence: Synthetic coding sequence
  source 1..1146: mol_type = other DNA
atggcgctacaaggtatatcggtagttgaactatcgggtttagcgccgggtccgttttgtgcgatggtattagcggattttggtgcgcgagttgttcgtgtagatcgtccgggttcgcgttatgatgtatcgcgtttaggtcgtggtaaacgttcgttagtattagatttaaaacaaccgcgaggtgcggcggttttacgacgtctatgtaaacgatcggatgttttactagaaccgtttcgtcgtggtgttatggaaaaattacaactaggtccggaaatactacaacgtgaaaatccgcgactaatatatgcgcgtctatcgggttttggtcaatcgggttcgttttgtcgactagcgggtcatgatataaattatttagcgttatcgggtgtactatcgaaaataggtcgttcgggtgaaaatccgtatgcgccgttaaatttactagcggattttgcgggtggtggtctaatgtgtgcgttaggtataataatggcgttatttgatcgaacgcgaacgggtaaaggtcaagtaatagatgcgaatatggtagaaggtacggcgtatctatcgtcgtttctatggaaaacgcaaaaattatcgttatgggaagcgccgcgtggtcaaaatatgttagatggtggtgcgccgttttatacgacgtatcgtacggcggatggtgaatttatggcggtaggtgcgatagaaccgcaattttatgaattactaataaaaggtttaggtttaaaatcggatgaattaccgaatcaaatgtcgatggatgattggccggaaatgaaaaaaaaatttgcggatgtatttgcggaaaaaacgaaagcggaatggtgtcaaatatttgatggtacggatgcgtgtgttacgccggtactaacgtttgaagaagtagttcatcatgatcataataaagaacgaggttcgtttataacgtcggaagaacaagatgtttcgccgcgtccggcgccgttactattaaatacgccggcgataccgtcgtttaaacgagatccgtttataggtgaacatacggaagaaatattagaagaatttggtttttcgcgtgaagaaatatatcaattaaattcggataaaataatagaatcgaataaagtaaaagcgtcgtta

SEQ ID NO: 249495 - DNA, 1146 bp, synthetic construct
  misc_feature 1..1146: note = Description of Artificial Sequence: Synthetic coding sequence
  source 1..1146: mol_type = other DNA
atggcactccagggcatatccgtggtagagcttagtgggctggcccctggacctttttgtgccatggtcctcgccgattttggagctagggttgtaagggtggatcgtcctggttcaaggtacgacgtgtcccggttaggaagaggaaaacggtccctggtccttgatttgaagcaacccaggggggccgcagtgctcaggaggctttgtaaacgtagcgacgttcttcttgaaccatttcggcggggagtcatggagaaactacagctcgggcccgagatcctgcagcgcgagaacccccgactcatttatgcaagactgtccggattcggccagtcggggagtttttgtcgtttagctgggcacgatataaactatttggcgctatccggcgtgctatcgaagattggacgcagcggagagaatccctatgctcccctcaatttgctggctgacttcgccggaggtggcttgatgtgcgccctgggtatcattatggccttgtttgaccgcacgcgcacaggaaaaggacaggtcatcgacgcaaacatggtggaggggacagcctatctgagcagcttcttatggaaaacccagaaactctctctttgggaagccccccgcgggcagaacatgctggatgggggcgcaccgttctacaccacataccgcaccgcggatggggagtttatggcagtgggagccatcgagcctcagttttatgagctattgatcaagggccttggcttgaagagcgatgaacttcccaaccagatgtccatggatgactggcctgagatgaagaagaaattcgctgacgtgttcgccgagaaaaccaaagctgagtggtgccagattttcgatggcacagatgcctgcgtaacacctgttctgacttttgaagaggtggtccaccatgaccacaacaaggaaaggggctcttttattactagcgaggaacaggacgttagccctcgcccagcaccgttgttactgaatacgcctgcgatcccctccttcaaacgggacccctttatcggagaacatacagaggagatcctcgaggagtttgggttctcacgggaggagatctatcagctgaacagcgacaaaattatcgaaagcaataaggtgaaggcttccttg

SEQ ID NO: 249496 - DNA, 1146 bp, synthetic construct
  misc_feature 1..1146: note = Description of Artificial Sequence: Synthetic coding sequence
  source 1..1146: mol_type = other DNA
atggctcttcaggggatcagcgtggtggaactcagtgggcttgcccccggacccttttgcgccatggtcttagcagattttggagccagagtggtacgagtcgaccgtcctgggagcaggtacgatgtgagcaggctgggccgggggaagaggagcctcgtcctggatcttaagcaaccccggggagccgccgtattgcgccggctttgtaaaagatctgacgtgttgcttgagccttttaggaggggagtaatggaaaaactgcaactcggccctgagattctccagcgcgagaacccccggttaatctacgccaggctgtctggattcggccaatctggcagcttctgccgtctggccggccacgacatcaactatctggccctgtccggagtgctgtcgaaaatcggcagaagtggagagaacccgtatgcgccattgaatcttctggctgacttcgccgggggcggattaatgtgcgctctggggattataatggctctcttcgataggacgcgaactggtaaagggcaggtgattgacgccaatatggtcgaaggaactgcctacctctcttcattcctttggaagacacagaaactatccctgtgggaggccccccgagggcaaaacatgctggatggcggcgcaccattttacacgacataccgtaccgccgacggtgagtttatggcagttggcgccattgagccacaattctacgaactccttataaaaggacttggcctgaaatctgacgagctgccaaaccagatgagcatggacgactggccagaaatgaagaagaagttcgctgacgtcttcgccgaaaagacaaaggcagagtggtgtcagatatttgatggaactgacgcttgtgtaactcccgtcttgacgttcgaagaggttgtgcatcatgaccataataaagaacgaggctcttttatcacgagcgaggaacaggacgtgagcccaagaccagctccactgttactcaatactccggcgatccccagctttaaacgcgatcccttcattggagaacacactgaggagatcctggaagagttcgggttctccagggaagagatctaccagctgaactctgataagatcatagaaagcaacaaagtcaaggcttctctg

SEQ ID NO: 249497 - DNA, 1146 bp, synthetic construct
  misc_feature 1..1146: note = Description of Artificial Sequence: Synthetic coding sequence
  source 1..1146: mol_type = other DNA
atggctttacagggcatctccgtggttgagctgtccggtctggcccccggtcccttttgtgcgatggtgttagccgacttcggcgcaagagtagttcgggtggatcgcccaggatcacgctatgacgttagccgtctggggcgaggaaaaaggtcactagttctggatctgaaacagccaaggggggcagccgtgttacggcggctctgtaagcgaagtgacgtcctcctggagccctttcgcaggggtgtgatggaaaaactccagctagggccagaaatcctccagagagaaaaccctcgcctgatctatgccagactgtctggatttgggcagagcggatcattttgtcggctggcggggcatgatatcaactatctggcactgtctggcgtattaagcaagatcggccgtagcggagagaatccgtatgcccctttaaacctactcgccgacttcgccggagggggcctcatgtgcgccttgggcattatcatggccctgttcgaccgcaccagaaccggcaagggccaggtcatcgacgccaatatggtggaaggcacagcttaccttagtagttttctttggaaaactcagaagctctcactttgggaagcccccagaggccagaacatgctggacggcggcgctcctttttataccacgtatcgtaccgccgacggcgagtttatggcagtgggcgccattgagccacagttttatgaattgctaatcaaggggctgggtctgaagtcagatgagctgccgaaccaaatgagtatggatgactggcctgagatgaaaaagaaatttgcagatgtgttcgcggagaaaactaaagccgagtggtgccaaatctttgatggtacggatgcatgcgtgacccccgtactgacttttgaggaggtcgtgcatcatgatcataataaagagcgcggttcgttcatcacgagcgaggagcaggatgtgtcaccgcgtcctgcaccactcctgctgaatacccctgctatccccagctttaagcgagacccttttataggtgagcacaccgaggaaatccttgaagagtttggtttctctcgggaggaaatttatcagctcaattccgataaaattattgagtctaataaagttaaagcttctctg

SEQ ID NO: 249498 - DNA, 1146 bp, synthetic construct
  misc_feature 1..1146: note = Description of Artificial Sequence: Synthetic coding sequence
  source 1..1146: mol_type = other DNA
atggcactccagggtatctcggtggtcgaactgtcaggccttgcgccgggacccttctgcgcaatggtgctcgcggacttcggagcacgcgtggtgagagtggaccgccctggctcgcgctacgacgtttcccgactgggcagggggaaacgcagccttgtgctggacctgaagcagccgagaggcgctgcagttctgagacggctgtgcaagcggtcagacgtgcttctcgagcccttccgccgcggagttatggaaaaactgcaactgggtcccgagatcctgcaacgggaaaacccgcggctcatctacgcgcgactgtcgggattcggacagtccggatcgttctgccgattggctggacatgacatcaattacttggccctgtccggcgtgctgtcaaagatcggaagatccggtgaaaatccgtacgcgccactcaatctcctcgccgactttgcgggaggcggactcatgtgtgccctgggaatcatcatggcgctttttgacagaacgcgcacgggcaagggacaggtgatcgacgcaaacatggtggaaggcaccgcatacctgtcatccttcctgtggaaaacccaaaaacttagcctctgggaagcgccgcgcggtcagaacatgcttgacggaggtgctcccttttacaccacttacagaactgccgacggagaatttatggctgtgggggctattgagccgcagttctacgaactgctcattaagggactcggtctgaagtcagatgagctccctaaccagatgagcatggatgactggcccgaaatgaagaaaaagttcgcggacgtgtttgcggagaaaaccaaggccgaatggtgccaaattttcgacgggactgacgcgtgtgtcacgccggtgctgacctttgaggaggtggtgcatcacgatcacaataaggaacggggctcgttcatcacgtcagaagagcaagacgtgtcccctcgcccggctccactgcttttgaacaccccagccatcccatccttcaaaagggaccctttcatcggcgaacacacggaagagatcctcgaggaattcggattctctagggaggagatttatcagcttaattcggataagatcatcgagagcaacaaggtgaaggcctccttg

SEQ ID NO: 249499 - DNA, 1146 bp, synthetic construct
  misc_feature 1..1146: note = Description of Artificial Sequence: Synthetic coding sequence
  source 1..1146: mol_type = other DNA
atggctttgcaaggaatttccgtcgtggaactgtcgggccttgcacctggaccattttgtgctatggtgctggcagacttcggagccagggttgttcgagtggatagaccggggtctagatatgacgtgagccgcctgggacggggtaaacgcagcttagtgctcgacctgaaacagccgcgaggggcagccgtactccgcagactctgcaagagaagcgatgtgttactagagcctttccgcaggggcgttatggagaagcttcagctcggacccgagatactccagcgtgaaaatcctcgcctgatctacgcccggctttcaggattcggccagtctggctccttttgtcgtcttgccggccatgacataaattatctggccttatctggagtgttgtctaaaatcggtcgaagcggagaaaacccttatgcgccactgaacttacttgccgattttgcaggcggcgggctgatgtgtgcactgggcataatcatggcgctctttgaccggacccggaccggaaaaggacaggttatcgatgccaatatggtggagggcaccgcttacctgtcctctttcctgtggaaaacacagaagttaagtttgtgggaagcccctcgcggccagaatatgttggacggcggtgcccctttctacacaacatatagaacagccgatggggagtttatggctgtcggagccatagagccccagttctatgagcttcttatcaaggggctgggccttaagagcgacgagctgcctaatcagatgagcatggacgactggccggaaatgaagaagaagttcgcggatgtgtttgccgagaaaacaaaagctgaatggtgccaaattttcgacgggaccgacgcatgtgtgaccccagttctgacttttgaggaggtcgtgcatcacgaccacaacaaagaacgaggaagcttcattaccagcgaagagcaggatgtgagcccacggcctgcaccgctgcttctaaatacacctgccatcccatcgtttaaacgggaccccttcattggcgaacacaccgaagagatcctagaagaatttgggttcagcagggaggagatataccaactgaattccgataagattatcgagtcaaataaggtgaaagccagcctg

SEQ ID NO: 249500 - DNA, 1146 bp, synthetic construct; identical to SEQ ID NO: 249466
  misc_feature 1..1146: note = Description of Artificial Sequence: Synthetic coding sequence
  source 1..1146: mol_type = other DNA

SEQ ID NO: 249501 - DNA, 1146 bp, synthetic construct
  misc_feature 1..1146: note = Description of Artificial Sequence: Synthetic coding sequence
  source 1..1146: mol_type = other DNA
atggcactgcaggggattagcgtcgtagagctctccgggctcgcacctggtcccttctgtgcaatggtgctcgcagacttcggcgctcgggtggtgcgggtcgaccgccccggttcaagatacgacgtcagccgcctcggtcgcggaaagcggtcacttgtgttggatctgaagcagccaagaggggcggctgtgctgcgaagattgtgtaagcggtcggatgtccttctggagccttttcgtcgaggagtcatggaaaaacttcagttgggacccgaaattctgcaaagggaaaacccgaggctcatctatgcacgcctttccggtttcggacagtcagggtcattttgtagacttgccggacatgacatcaactacctcgccctctccggcgtcttgtcgaaaatcggccgaagcggcgagaatccttacgcaccgctcaacctgctcgccgatttcgcaggcggaggacttatgtgtgcattggggatcataatggcactgtttgacaggacgcgcaccggcaagggacaagtgattgatgccaacatggtggaaggcactgcgtacttgagcagctttctctggaaaactcaaaaactctcattgtgggaagccccaagaggacaaaacatgctggatggcggagcacccttttacactacctacagaactgccgacggtgaattcatggctgtgggcgcaatcgagcctcagttttacgaactgctcataaagggtctggggctgaagtcggacgaactgcctaatcagatgtcaatggacgattggccggaaatgaagaagaagttcgcagacgtgtttgcggagaaaaccaaggctgaatggtgtcaaatcttcgatggaaccgacgcatgcgtgactcctgtccttactttcgaagaagtcgtgcaccacgatcataacaaggaacgcggttcgtttatcacctcggaggaacaggacgtgagcccacgtcctgctcctcttcttctcaacactcctgcaatacccagcttcaaacgtgacccatttatcggagaacacaccgaggagattcttgaagagttcggattttcccgggaggagatctaccagctgaatagcgataagattattgaaagcaacaaagtcaaggcatcactg

SEQ ID NO: 249502 - DNA, 1146 bp, synthetic construct
  misc_feature 1..1146: note = Description of Artificial Sequence: Synthetic coding sequence
  source 1..1146: mol_type = other DNA
atggcacttcaggggatatccgtcgttgagctgtcaggacttgctccagggccattttgtgcaatggtccttgctgattttggcgcgagggtcgtccgcgtcgatcgacccggttcacggtacgacgtgtctcgcctcggccggggaaaacgaagccttgttctggatttgaaacagccccgcggtgcggctgtgctgaggagattgtgcaaaagaagtgacgtcctcctggagcctttcaggagaggagtaatggagaagcttcagctgggacctgagatccttcagcgggagaaccccaggttgatatacgcacgcctctccggttttggtcagagcggctcattctgccggctcgctggccatgacattaactatttggctctgagtggggtgctgagcaaaattgggcggtccggagagaacccttacgcacctcttaacctgctggcagatttcgctggcgggggtctgatgtgcgcactgggaatcataatggcactgttcgacaggacgaggaccggcaaaggccaagtgatcgatgccaatatggtggagggcaccgcgtacctcagtagttttctgtggaagacccagaaattgagtctgtgggaggccccaaggggccagaatatgttggacggtggagcccctttctacactacttatcgcaccgctgacggggagtttatggcagttggggccattgagccacagttctatgagctgctgatcaaggggttgggactgaaaagtgatgagctccccaaccagatgtccatggacgactggccagagatgaagaaaaagtttgcagatgtgttcgctgaaaagacgaaagctgagtggtgtcagatttttgacggcaccgacgcctgtgtgactcctgtgctgactttcgaagaggttgtgcatcacgatcacaataaggagagaggatctttcattacatcagaggaacaggatgtaagtcctaggccggctccgttgttgctgaacaccccagcgatcccttctttcaagcgcgacccgttcatcggcgaacacacagaggagattctggaggaattcggattctccagggaggagatctatcagcttaattctgacaagataatcgagtcaaacaaggtgaaggccagtctg

SEQ ID NO: 249503 - DNA, 1146 bp, synthetic construct
  misc_feature 1..1146: note = Description of Artificial Sequence: Synthetic coding sequence
  source 1..1146: mol_type = other DNA
atggcgctacagggaataagtgtcgtggagctctcggggctagcccccggccccttctgcgctatggtgctggcagactttggcgccagagtggtgagggtggacagaccaggaagcaggtacgacgtctcccgcttagggcgcggaaaacgctctctggtgctagatctaaagcagccccgaggagcggcggtgcttaggcgcttgtgtaaacgctccgatgtgctgcttgaaccattccgcagaggtgtgatggagaagctgcagctaggaccagagatcctgcaacgggagaacccacgactcatctacgccaggctgtctggttttgggcaatcggggtccttctgccggttggccgggcacgacatcaattacctcgccctgtccggggtgctgtctaagattggcaggagcggcgagaacccatatgcaccgcttaatttgctggccgattttgctggcggggggttaatgtgcgctttggggattatcatggccctgttcgaccggacccgaactggtaaaggccaagtaattgatgcgaacatggtcgaaggcacagcttacttgtcatcatttttgtggaagactcagaagttgagtctgtgggaggcgcccaggggccagaatatgctggacggcggcgctcccttttacacaacctatcggacggcagatggcgagtttatggcagtgggagctattgaaccgcagttttacgagctcctgatcaaggggcttggcctgaagagcgatgagttgcccaatcagatgtccatggacgattggcctgaaatgaaaaaaaaatttgctgatgtgttcgccgagaaaaccaaggcagagtggtgtcagatctttgatggaactgacgcatgtgtcacaccagtcctgacctttgaagaggtggttcaccacgaccataataaggaaagggggtcgttcatcaccagcgaagaacaagacgtgagcccccggcctgcccctctcttactgaacacccccgcgatcccatccttcaagagagacccattcattggcgagcataccgaggaaatcctcgaagaattcggcttcagccgcgaggaaatttaccagctgaattcagataaaataatcgagagcaataaggtcaaggcttccctg

SEQ ID NO: 249504 - DNA, 1146 bp, synthetic construct
  misc_feature 1..1146: note = Description of Artificial Sequence: Synthetic coding sequence
  source 1..1146: mol_type = other DNA
atggcgctgcagggaatttcagttgtggagctcagtggacttgcccctggacctttctgtgcaatggttctcgctgatttcggagcgcgggtagttcgtgtggacagaccggggtccaggtatgatgtgagcaggttgggcagggggaaaagatcactggtgctggaccttaagcagccgcgcggcgctgctgtgcttagaagactgtgtaagagatcagacgtattgctggagccattccggagaggcgtgatggaaaagctccagctcggccctgagatactccaacgggagaatccccgccttatttacgcccggttgagtggatttggccagagcggcagcttttgtcgccttgcaggacatgatattaattacctagctttgagcggagtgttgagcaagataggaagaagtggagagaatccttatgccccactgaatctgcttgcagattttgctggcggcggcctgatgtgcgcgctggggattattatggcacttttcgataggacacggacaggtaagggccaagtgatagacgccaatatggtggaagggactgcatacttgagctccttcttatggaaaacccagaaattgtcactgtgggaggcccccagaggtcaaaacatgctggacgggggcgctcccttctacacaacctatcgtactgcagacggggagttcatggccgtcggcgctatagagcctcaattctatgagctgctaatcaagggtctgggccttaaatccgacgagctccctaaccagatgagcatggacgattggccagaaatgaagaagaagttcgccgatgtcttcgcagagaagaccaaggccgagtggtgtcagatatttgacggaactgatgcatgtgtcacacccgtattgacatttgaggaggttgtgcaccatgatcacaataaagagagaggcagtttcatcaccagcgaagagcaagatgtttctccgaggccagcacccctgctgctgaatacccctgcaatccctagttttaagagggacccattcatcggagaacacaccgaggaaattttggaagagttcggattctctcgggaagaaatctatcagttgaacagcgataaaatcatagagagcaataaagtgaaggcctcgctt

SEQ ID NO: 249505 - DNA, 1146 bp, synthetic construct
  misc_feature 1..1146: note = Description of Artificial Sequence: Synthetic coding sequence
  source 1..1146: mol_type = other DNA
atggccctgcagggtatttctgtggtggaactttcaggacttgctccaggcccattttgcgcaatggttttggcagattttggggcccgcgtagtccgggtggatcggcctggatcgagatacgacgtgagccgcctcggaagaggcaagcgctccttggtgctggacctgaagcagcccagaggcgcagcagtgcttagacgtctgtgtaagagatcggatgtgttgttggagcctttcaggaggggggtcatggaaaaactgcagctgggaccagagatccttcaaagagaaaaccccagactgatctatgccagactctcgggattcggacaatcaggatccttttgtagactggcgggacatgacataaactacctggcacttagcggcgtgttgagcaagatcgggcgctcaggtgagaatccttacgcacccctgaaccttctggcagacttcgcaggtggggggttgatgtgtgcgcttggtatcataatggcactgttcgataggactaggaccggaaagggtcaagtgattgacgcaaatatggtggagggtaccgcctacctgtcatcgtttctctggaaaacgcaaaagttgtcactttgggaggcaccgcgaggtcagaacatgcttgatggaggagcacctttctacaccacttaccggaccgccgatggagagttcatggcagtgggcgcaattgagcctcagttttacgaactgttgatcaagggtcttggcctcaagtcggatgaacttcctaaccagatgtcaatggatgactggccagagatgaagaaaaagttcgcggacgtttttgctgagaaaactaaggccgagtggtgtcagattttcgatggaaccgatgcgtgtgtgacgcctgtccttacctttgaagaagtcgtccatcatgatcacaacaaggaaagaggatcgttcattacttcggaagaacaggatgtctcacctcggcctgcacctcttctgctgaatactccggcgattccctccttcaagcgtgatcccttcattggagaacacacggaagaaatcctggaagagttcgggttttcacgagaagaaatctatcagctgaactcggacaaaatcatcgagtcgaataaggtgaaggcatcactc

SEQ ID NO: 249506 - DNA, 1146 bp, synthetic construct
  misc_feature 1..1146: note = Description of Artificial Sequence: Synthetic coding sequence
  source 1..1146: mol_type = other DNA
atggcccttcaaggaataagcgtggtagaactgtctgggctagccccggggcctttctgcgccatggtattagccgatttcggagctagagtcgtgagggtggaccgcccaggttccagatacgacgtttctagattggggcggggaaaaagaagcctcgtgctcgatttgaagcaaccaagaggggctgctgttttgcggagactgtgtaagcgatctgacgtcctccttgagccatttcgcagaggtgttatggagaagctacagctggggccagaaattctgcaacgcgaaaatcctcgacttatttacgctaggctttctgggtttggacagagtgggtcattttgtaggctcgcaggacatgacattaactatctggccctgagcggcgtgctcagtaaaatcggaagaagcggagaaaacccctacgcgcctcttaatcttcttgcagatttcgctggaggtgggttgatgtgcgcactgggcataatcatggcacttttcgatcggacaagaacaggaaagggacaggtgatcgacgcgaatatggtggagggcaccgcatacctgtcatcatttctgtggaagactcagaaactctcactgtgggaggctcctagaggtcagaacatgttggatggaggagccccattttacaccacctacagaaccgccgacggtgagtttatggcagtaggggcaattgagcctcagttttatgagctgttgatcaagggcctgggcttaaagagcgatgagctgcctaaccagatgtctatggatgattggcccgagatgaagaagaaatttgcagacgtgttcgctgaaaaaacaaaggcggagtggtgccagattttcgatggaaccgacgcatgcgttacccccgtgctgacatttgaagaagtggtccaccacgatcacaacaaagaaaggggatcatttatcacctctgaggagcaggatgtgtcacctaggccggcccctctgctgcttaacacacctgcaataccttcctttaagagagatccatttatcggggaacataccgaagagatcttggaagagtttgggttctcaagagaggagatataccagctgaatagtgacaaaatcatcgaatcaaacaaggtgaaggctagccta

SEQ ID NO: 249507 - DNA, 1146 bp, synthetic construct
  misc_feature 1..1146: note = Description of Artificial Sequence: Synthetic coding sequence
  source 1..1146: mol_type = other DNA
atggctcttcaaggcatctccgtggtggagctgagcggcctcgcgcccggcccgttctgtgccatggtgctggcggacttcggcgctagggtggtgcgggtggacaggccgggatcacgctacgatgtgtcgagactgggacgggggaagcgaagcctcgtgctggacctgaagcaaccacggggagccgcagtgcttcgccggctttgtaagagatctgatgtcctgcttgagccattccgccggggcgtcatggaaaaactgcagctgggcccggaaattctgcagcgagagaatccgcgcctgatctacgcacgcctgtcgggtttcggccaatcggggagcttctgcagacttgccggccacgacatcaattacctggctctgtccggggtgctgagcaaaatcggacggagcggggagaacccgtacgcccccctgaatctcctggctgattttgccggtggcggactgatgtgtgccctggggatcattatggcgctgttcgaccgcaccagaactggaaagggacaagtcatcgatgcgaacatggtggaaggaaccgcctaccttagctcattcctgtggaaaactcagaaactcagcctgtgggaagcgccgcgggggcagaacatgcttgatggcggggcccctttttacaccacctaccgcaccgcggatggagagttcatggctgtgggtgctatcgaaccccagttctacgaactgctcatcaagggacttggcctgaagtcggacgagctgccgaaccagatgtcaatggatgattggcctgagatgaagaagaagttcgccgacgtgtttgccgagaaaaccaaggcggagtggtgccagatattcgatgggaccgacgcatgcgtgaccccagtcttgaccttcgaagaggtagtccaccatgaccataacaaagagcggggctccttcattacctcggaagagcaggacgtctcgccgaggccggcgccgctgctcttgaacaccccggccatccctagcttcaagcgcgaccccttcatcggtgaacacactgaagaaatcctggaagaatttggattctcccgcgaagaaatctaccaactgaattcagacaaaatcatcgaatcgaacaaggtgaaggcctcgctc

SEQ ID NO: 249508 - DNA, 1146 bp, synthetic construct
  misc_feature 1..1146: note = Description of Artificial Sequence: Synthetic coding sequence
  source 1..1146: mol_type = other DNA
atggcactgcagggaatctcagtggtcgaactgtccggtctggctccgggaccattctgtgccatggtgttagcagacttcggggcgagagtggtccgcgtggatcggcccggctcacgctatgacgtcagcagacttggccgcggtaaacgcagtctggtgctggatcttaaacagcctagaggcgccgccgtgctgagaaggctgtgcaagagatccgatgttctgttggaacctttccgtaggggagtaatggaaaagctacagctgggacctgagatcttgcaaagggaaaatccaaggctgatatatgcacggctctcaggcttcgggcagagcggctctttctgcaggctggctgggcatgatattaactacttagctctgtcaggggttttaagtaagattggccgttctggagagaacccttacgcgcccctgaatctgcttgcggacttcgcagggggagggctgatgtgtgctctcggtatcattatggcgctgttcgatcggactcggactgggaaaggacaggtcattgacgcaaacatggtcgagggaacggcctacctgtcttccttcctttggaagacacagaaacttagcctctgggaggcaccacggggacagaacatgttggacgggggggctccattctacactacttatcgcactgctgacggcgagtttatggctgtaggtgcaatcgagccgcagttttacgagctgctgatcaagggcctgggcctcaagtccgatgaattgcctaaccaaatgagcatggatgattggcccgagatgaaaaagaagtttgctgatgtgtttgcagagaagacaaaagccgagtggtgccaaatcttcgacgggaccgatgcctgtgtaacacctgtgctcacatttgaggaagtggtgcaccacgaccataataaggaacgcgggagctttataacctccgaagagcaggatgtgagtccgaggccagctcccctgcttttaaatacccccgctatcccgtccttcaaacgtgacccctttattggggagcacacagaggagatactggaagagttcggtttttccagggaggaaatctaccagctgaacagtgacaagatcattgagtctaacaaagtgaaggccagcctc

SEQ ID NO: 249509 - DNA, 1146 bp, synthetic construct
  misc_feature 1..1146: note = Description of Artificial Sequence: Synthetic coding sequence
  source 1..1146: mol_type = other DNA
atggcacttcaaggcatttccgttgtggagctctctggcttggcgccgggcccgttctgtgccatggtgctggcggacttcggtgcccgtgtcgttcgcgttgatcggcccggttcgcggtatgacgtatcgcgtctgggccgcgggaagcgctctctcgtgctagatctaaagcaaccccgtggagctgctgtcttgcgccgcctctgcaagcgctccgacgtacttctggagcccttccgccgcggcgtcatggaaaagttacaactcggtccagagatcctccaacgtgagaaccctcgccttatttatgcaagactgtccggcttcggccagtcaggaagcttctgtcgcctggctggtcatgacatcaactaccttgccctctccggtgtcctcagcaagatcggtcgttctggggagaatccctacgcccccctgaacctgctcgccgattttgccggcggtggcttgatgtgcgcgcttggtattattatggccctgtttgacaggacccgaaccggcaaaggtcaggttattgatgccaacatggttgagggtaccgcctatttgagtagctttctctggaagacccaaaagctcagcctttgggaagctccccgcggccaaaacatgcttgacggaggcgctcccttctacacaacgtatcggacggctgatggagagttcatggctgtcggcgctatagagccccaattctatgagttattgatcaagggtctaggacttaagagcgatgaacttccaaaccaaatgtcgatggacgattggcccgaaatgaaaaaaaagttcgctgatgttttcgccgagaagactaaggccgagtggtgtcaaatcttcgatggcaccgatgcttgtgtcacccctgttttgactttcgaggaagtagtgcaccacgaccacaacaaggaacgcggctcattcattacatccgaggagcaggatgtctcccccagacccgcgcctctactattgaacacgccagccataccgtccttcaaaagagatccctttatcggcgagcacacggaggagatcctggaagagttcggtttcagtcgagaggagatctaccagctcaacagtgacaagatcatcgagagtaacaaagtcaaggctagcctg

SEQ ID NO: 249510 - DNA, 1146 bp, synthetic construct
  misc_feature 1..1146: note = Description of Artificial Sequence: Synthetic coding sequence
  source 1..1146: mol_type = other DNA
atggccctgcagggaatttccgtggtggaactttccggactcgccccaggaccgttctgtgcgatggtgctggccgacttcggcgcgcgcgtggtcagagtggatagaccgggttcacgctacgacgtgtccaggctgggacgcggaaagcggtccttggtgctggatctgaaacaaccacggggagcggccgtgctgcgccgcctgtgcaagcgctccgacgttttgctggagccgttccgaagaggtgtgatggaaaaactgcaactgggcccagagatattgcagcgggagaaccctcgcttgatctatgccagactgagcggttttggtcagtcaggctccttctgcaggctggctggccacgacattaactacctggcgctctccggggtgctgtccaaaatcggacggagcggggagaacccctacgctccactgaacctcctggcagatttcgcaggaggaggactgatgtgcgcactcggtattatcatggcactttttgatagaacccgcacgggcaagggacaggtcatcgatgcgaacatggtggaggggactgcataccttagctcgttcctgtggaaaacgcagaagctcagcctttgggaagccccgcgcggtcagaatatgcttgatggtggggccccgttttacactacctaccgcactgccgatggtgagtttatggccgtcggcgcgatcgagccgcagttctacgaactgcttatcaaggggctcgggctgaaatcggacgaactcccaaatcagatgtccatggacgactggccggaaatgaaaaagaaattcgccgacgtgttcgcggaaaaaaccaaggccgaatggtgccagatcttcgacggcactgatgcgtgcgtcacgccggtcctgacctttgaggaggtcgtccaccatgaccataacaaggaaagggggtcgttcatcacttcggaggagcaggacgtgtcgccacgacctgctccgctgctgctcaacactccggccatcccgtccttcaagcgggacccattcattggagaacacaccgaagaaatcttggaggagttcggattttcccgcgaggagatctaccaactgaatagcgacaagatcatagaatccaacaaagtgaaagctagcctc

SEQ ID NO: 249511 - DNA, 1146 bp, synthetic construct
  misc_feature 1..1146: note = Description of Artificial Sequence: Synthetic coding sequence
  source 1..1146: mol_type = other DNA
atggcacttcaaggaatttcagttgtagaactttcaggacttgctccaggaccattctgtgctatggttttagcagactttggagcacgagttgtacgtgttgataggccaggatcaagatatgatgtatcaagactcggaagaggaaaaagatcgcttgttttagacttaaaacaaccaagaggtgctgcagttcttagacgattatgtaagagatcagatgtgttattagaaccatttcgtagaggtgttatggaaaaacttcaattaggaccagaaattctacagagagaaaatccaagactaatatatgcaagactttcagggtttggtcaatctggatcattttgtagacttgcaggtcatgatattaattatcttgcactttcaggagttctttcaaaaattggaagatctggagaaaatccatatgcaccattaaatcttttggctgattttgctggaggtggattaatgtgtgctcttggaattatcatggccctttttgatagaacacgtacaggaaaaggtcaagttatagatgctaatatggttgaaggaacagcttatctttcgtccttcttatggaagacacaaaaactttctctttgggaagctcctagaggtcaaaacatgcttgacggtggagcaccattttatactacttaccgaactgctgatggagaattcatggctgttggagctattgaaccacaattctacgaattactaattaaaggattaggattaaagtcagatgagcttccaaatcaaatgagtatggatgattggccagaaatgaagaaaaaatttgctgatgttttcgcagaaaaaacaaaagctgaatggtgtcaaatattcgatggtactgatgcatgtgtgacacctgttttaacttttgaagaagttgtacatcatgatcataataaagaaagaggatcatttataactagtgaagaacaagatgtctcaccaagaccagctcctttattattgaacactccagcaattccatcatttaaaagagatccatttattggagaacatacggaagaaattttagaagagttcggattcagtcgagaagaaatttatcaattaaatagtgataaaataattgaatccaacaaagttaaagcatcattg

SEQ ID NO: 249512 - DNA, 1146 bp, synthetic construct
  misc_feature 1..1146: note = Description of Artificial Sequence: Synthetic coding sequence
  source 1..1146: mol_type = other DNA
atggccctccagggcatctcagttgtggagctgagtggcctggccccgggacccttttgcgctatggtcctggctgatttcggggctcgcgtcgtgagggtggatcgcccaggttctcgttacgatgtatcacgactcggacgggggaagcgcagtcttgtgctggatctcaagcaacctaggggcgccgccgtcctgcgcaggctctgcaagaggagcgacgtcctcctggaacctttcagacgcggcgttatggagaaactccagctcggccctgagatcctccaaagggagaacccccgcctgatttacgccagattatccggctttggtcagtctgggagtttctgtagactagcgggccacgacattaactacctggctctgtcaggagtgctgtctaagattggccggtctggtgagaacccctatgccccactcaatctactcgccgatttcgccggcggtggcttaatgtgcgctctcggtatcatcatggccctgtttgatcgtacccgaacgggcaagggccaggtgatagacgccaacatggtggaggggactgcatatctaagcagcttcctgtggaagacacaaaaattgtctctgtgggaagcccccagagggcagaacatgctcgatggaggcgctccattctatacgacttaccgcaccgccgacggagagttcatggctgtgggtgcaattgaaccccaattttatgaattgctgataaagggtctgggattgaaaagcgacgaactgccaaaccaaatgagcatggacgactggcccgagatgaagaaaaagttcgcggatgtgttcgctgaaaaaactaaggccgaatggtgtcagatctttgatggcaccgacgcgtgtgtgacccctgtgctcacatttgaggaggttgtacatcacgatcacaacaaagagcgcggctctttcatcaccagcgaggaacaggacgtgtctcctcgtcccgcccccctgctccttaacactcctgctatcccttccttcaagagagacccattcatcggcgagcataccgaggaaatcttggaggagtttggcttctcccgcgaggagatctatcagcttaatagtgataaaatcatcgaatctaacaaagtgaaggcaagtcta

SEQ ID NO: 249513 - DNA, 1146 bp, synthetic construct
  misc_feature 1..1146: note = Description of Artificial Sequence: Synthetic coding sequence
  source 1..1146: mol_type = other DNA
atggcgttgcaaggtattagcgttgttgagctgagcggtctggccccgggcccattctgtgctatggtactagcggactttggcgcgcgcgtggttagagtggaccggccgggctctcgctatgacgtgagccgcctgggtcgcggtaagagaagcctggtcctcgatcttaaacagccaaggggagccgctgtccttcgccggctgtgcaaacgctctgacgtgttgcttgaacctttccgaaggggtgtcatggagaaattgcaactcggacctgaaattttgcaacgcgaaaatcctcgcctgatttatgcgcgcctctccggttttggtcaaagcggcagcttctgtcgcctggcgggccacgatataaactacctggcactgtccggcgttctcagcaaaatcggccgctctggggaaaatccttacgctcctttgaatctgctggccgacttcgcaggaggcggtttgatgtgtgctctgggcatcatcatggcgctgttcgaccggacgcgcacgggtaaaggtcaggtgatagatgccaatatggtagaaggtaccgcttacctgtcttcatttctttggaagactcagaagctgtcgctgtgggaagcgcctcgtggtcagaacatgctggatggcggtgccccgttttatactacttaccgtaccgcggacggtgagttcatggcggtcggggccatcgagccccagttctacgagctgttgatcaagggcctcgggcttaagtccgatgagctaccgaatcaaatgagcatggacgactggccagagatgaagaaaaaatttgctgacgtatttgccgagaaaacgaaagccgagtggtgccagatcttcgatgggactgatgcgtgcgtgacgccggttctgaccttcgaagaggttgtgcaccatgaccataacaaggagcgcggttccttcataaccagtgaagaacaagacgtcagccctcggccggcgccgctgctgcttaacaccccagcaattcccagcttcaaacgcgacccatttatcggagagcacaccgaggaaatcctggaagagtttggcttcagcagagaggaaatttatcaactgaacagcgataaaatcatcgagtcaaataaggtgaaggccagcctg

SEQ ID NO: 249514 - DNA, 1146 bp, synthetic construct
  misc_feature 1..1146: note = Description of Artificial Sequence: Synthetic coding sequence
  source 1..1146: mol_type = other DNA
atggcgttgcagggaatctccgtcgtggagctgtctgggctggcgcctggacctttctgcgcgatggtgctggccgactttggagcccgagtggtgagggtggacaggccgggatcgcgctacgatgtgtcgagactgggaaggggtaaacgcagcctcgtgctggatctgaagcaaccgcgcggagcggctgtgctccgtagactctgtaagcggtcggacgtgctgcttgaaccattccggcgcggagtgatggaaaaactgcagttgggaccggaaattctccaacgcgaaaacccgcggctgatctacgcccgcttgtcaggtttcggacagtccgggtccttctgccgcctcgccggccatgacatcaactacctggcactgagcggcgtcctctccaagatcggacggtcgggagaaaatccctacgcgcctttgaatttgctggcggatttcgcgggcggggggctcatgtgtgcacttgggattatcatggcacttttcgaccgcacgcggaccggcaagggacaggtcatcgacgcaaacatggtggaaggaaccgcatacttgtcatcgtttctgtggaaaactcagaagttgagcctctgggaggccccgagaggtcagaacatgcttgacggcggcgccccgttctacactacttatcgcaccgctgacggcgagtttatggctgttggagccatcgagccacaattctacgaactgctgatcaagggtttgggccttaaaagcgatgagctccccaaccaaatgtctatggatgactggccagagatgaagaagaagttcgcggacgtctttgccgagaaaaccaaagccgaatggtgccagatttttgacggaactgatgcctgcgtcaccccagtcctcacgttcgaggaagtggtgcatcacgaccacaataaggaaaggggctcattcataacctccgaagaacaagacgtctccccacgtccggctccgctgctcctgaataccccagcgatcccgtcgttcaagcgagatccctttataggtgagcacactgaagaaatactggaggagttcggattctcgcgcgaggaaatctaccagttgaactccgataagatcatcgagtcaaacaaggtgaaggctagcctg

SEQ ID NO: 249515 - DNA, 1146 bp, synthetic construct
  misc_feature 1..1146: note = Description of Artificial Sequence: Synthetic coding sequence
  source 1..1146: mol_type = other DNA
atggccctgcagggtatcagtgttgttgaactctctgggttagctccgggtcctttctgcgcaatggtacttgcagacttcggcgcaagggtggtgcgggtggatcgacctgggagtagatacgacgtgtcccgcctgggccggggcaagcggtctctggtgctcgatctcaagcagccgagaggagccgccgtgctgagaaggctatgcaaaaggtccgacgttctgctggagccattccggaggggcgttatggagaaactacagctcgggccagagattctgcaaagagagaacccccgcctgatttatgctagactgagcggatttggccagagcggatccttttgcaggctggctggtcacgatatcaactatcttgcactctcaggcgtgctgtcaaaaattggccgctccggcgaaaacccatacgcaccactgaatctgcttgccgattttgccggggggggactaatgtgtgctctcgggatcattatggccctcttcgataggaccagaactggtaagggtcaggtaatagacgccaacatggtggagggcacggcctacctgagttccttcctgtggaaaacccagaaactgagcctgtgggaagcacccagagggcagaatatgcttgatggtggagcacccttttacacaacctaccgcacagccgacggggaattcatggccgtgggtgcgattgagccgcaattctacgagctcctgattaaaggcttgggtctgaaaagcgatgaattgcccaatcagatgagcatggacgattggcccgaaatgaaaaagaagttcgcagatgttttcgccgaaaagactaaagcagagtggtgtcagatcttcgatggaactgacgcttgtgtgactcccgtattaaccttcgaggaagtagtccaccacgatcacaataaagaacgaggcagctttatcaccagcgaggagcaggatgtcagcccccggcctgcgccccttctgttaaatactcctgccatacctagcttcaagcgcgatccgttcattggagagcacaccgaggagatcttagaagagttcggatttagtcgtgaggaaatctaccagctgaacagcgacaagataattgagtctaacaaggtgaaagctagtctg

SEQ ID NO: 249516 - DNA, 1146 bp, synthetic construct
  misc_feature 1..1146: note = Description of Artificial Sequence: Synthetic coding sequence
  source 1..1146: mol_type = other DNA
atggcccttcaaggtatttcagtggtcgagctctccggtctggcaccaggtcctttttgcgccatggtgctggcagatttcggcgccagagtggtgcgtgtggacagaccaggctcacgctacgatgtctcaaggctgggacgagggaagagatcactggtgctggatctcaagcaacctagaggtgccgcagtgcttagacgtctgtgtaagcggtccgacgtgctgcttgaacctttccgcagaggagtgatggaaaagctgcagttgggtccagagattttgcagcgtgagaatcctcgactgatatatgcacgactttcaggtttcggccaatccggttcattctgtcggctggccggtcatgatatcaactaccttgcactgtccggggtgctttccaagattggacgctccggagaaaatccatacgcaccactgaacctgctggcggatttcgccggtggcggactcatgtgcgcactgggcatcattatggcgcttttcgaccgcactcggactggaaagggacaggtcatcgatgcaaacatggtcgaaggaacggcatatctctcctcgtttctgtggaaaacccagaagctgagtctgtgggaagcacctcgaggtcagaacatgctggatggtggcgcacctttttacactacttaccgtactgcagacggtgagtttatggcggtgggtgctatagaaccccagttctacgaactgcttatcaaggggctcggcctgaaatccgatgaactcccaaaccaaatgtcaatggatgattggcctgagatgaagaaaaagttcgccgatgtctttgcggaaaaaacgaaagccgaatggtgtcagattttcgatggaaccgatgcgtgtgtcaccccagtcctgacttttgaagaagttgtccatcacgaccataacaaggagaggggttcgttcataacctcggaagaacaagacgtgtcgccaaggcctgcccctcttctcctgaatactccagctattccgtcgtttaaacgcgacccttttatcggagagcacaccgaagaaattctggaagagtttggattcagccgggaagagatttaccaactcaattccgataagatcattgaatcaaataaggtcaaggcaagcctg

SEQ ID NO: 249517 - DNA, 1146 bp, synthetic construct
  misc_feature 1..1146: note = Description of Artificial Sequence: Synthetic coding sequence
  source 1..1146: mol_type = other DNA
atggcacttcagggcatatccgtggtcgaactgtccggcctggcaccaggacctttctgcgccatggtccttgcagatttcggagcaagggttgtcagagtggatcgcccaggatcaagatacgacgtaagcaggttgggaagaggtaaacggtcacttgtgctcgatcttaagcaaccgaggggtgcagccgtcctgcggcgcctttgtaagagaagcgatgtgcttcttgaaccatttcgaaggggcgtgatggaaaaacttcaacttgggcccgaaattcttcaacgtgagaatccaagactcatctacgcgagactttcagggtttggacagagcggttccttttgcaggctcgcaggccatgacattaactacttggcactttcaggcgtgctgtccaagatcggacgatcaggagaaaatccttacgcacctcttaacctgctcgcagattttgcaggaggaggactcatgtgtgccctcggaatcattatggccctgtttgatagaaccagaaccggcaagggacaggttatagatgccaacatggtggagggcaccgcctaccttagttcgtttctgtggaaaactcaaaaactttccctctgggaagctcctcgtggacagaacatgcttgacgggggcgcacccttctatacgacgtaccgtaccgcagatggggagtttatggccgtcggggcgattgagcctcagttttacgagttgctcataaaaggcttgggtcttaagtcagacgaactgccgaatcaaatgtcgatggatgattggccagaaatgaagaagaagttcgcggatgtctttgcagagaaaactaaagcagaatggtgtcagattttcgacggtactgacgcatgtgtaaccccagtgctgacctttgaggaagtggtgcaccatgatcataacaaggaacgaggatcctttatcaccagcgaggaacaggacgtgtcgcctagaccggcacctttgctgcttaatacccccgcaatcccgtcatttaagcgcgatccttttatcggagaacacactgaagagattctggaggaattcggattctcgcgcgaagagatttaccaactgaactcggacaaaatcattgagtcgaacaaggtcaaagcctctttg

SEQ ID NO: 249518 - DNA, 1146 bp, synthetic construct
  misc_feature 1..1146: note = Description of Artificial Sequence: Synthetic coding sequence
  source 1..1146: mol_type = other DNA
atggctctccagggaatttccgtggttgaactttccggcctggctcccgggcctttctgtgctatggtgttagcggacttcggggcccgtgtggtccgcgtggatcgaccaggatcaagatacgacgtgtcccggctcggtcgcgggaaacgctcgctcgtcctagacctgaagcagccgaggggtgctgccgtcctccggcgactctgcaaacgctcagacgtgcttttggagccgttccgacggggagtgatggagaaactgcagcttggtcccgagatcctccaacgagaaaacccgcgcttgatttacgcacggctctccggattcggacagtcaggctctttctgtagactggcgggacacgacattaactatttagccctcagcggtgtgttatccaaaataggccggagcggcgagaatccatacgcacctctgaaccttcttgcggatttcgctgggggcggtctgatgtgcgcactaggaatcatcatggctctcttcgacaggactcgaaccggaaagggtcaggtgatcgatgcgaacatggtcgagggcacagcctatcttagtagcttcctgtggaagactcagaaactgagtttgtgggaagcccccagaggacagaacatgttggacggcggagcccctttctataccacctacaggacagcggacggagagtttatggcagtcggggcaatagagccgcagttctatgagctgctgattaaaggtctgggacttaaatctgacgagctgcccaaccagatgagcatggacgattggccagagatgaagaaaaagtttgccgacgtgttcgcagaaaaaactaaggctgaatggtgccagatattcgacggcacagacgcatgcgtgacgcccgtgctgacattcgaagaagttgtccaccatgaccacaacaaggagcgaggaagttttattacctcagaggagcaggacgtctcccctcgccccgcccctcttctgcttaatacccctgccatcccaagttttaaaagagacccctttatcggagagcacactgaggagattctggaggaatttggcttttcccgcgaggaaatataccaactgaacagcgataagatcatcgaatccaataaggtgaaggctagtcta

SEQ ID NO: 249519 - DNA, 1146 bp, synthetic construct
  misc_feature 1..1146: note = Description of Artificial Sequence: Synthetic coding sequence
  source 1..1146: mol_type = other DNA
atggcgttgcaggggattagcgtcgtcgagctttctggactggcacctggtccattttgcgcgatggtgttagctgactttggtgctagggtagttcgcgttgaccgtcctggctcccgctatgacgtttcaaggcttggtaggggaaagcgtagtctcgttcttgatcttaaacaaccaaggggagcagcagtgttgcgacgcctgtgtaagcgctccgatgttcttttggagccattccgtcggggagtgatggaaaaacttcagctgggacctgagattcttcaacgagagaatcccaggcttatttatgccagactttccggatttgggcagagtggatctttctgtaggttagcaggccatgacataaactatctggctctttcaggggtcctgtccaagatcggtaggtccggtgaaaatccatatgctccacttaatcttctcgcagacttcgctgggggaggtcttatgtgtgcacttggcattatcatggctttatttgatcgaactagaaccggtaagggtcaagttattgacgcaaatatggttgagggaacggcttatctctcaagtttcttatggaagacccagaaattatccctatgggaagcgccaagggggcaaaatatgctcgatggtggggctccgttctataccacatatagaaccgctgatggggaatttatggcagtcggggctatagaaccacagttctatgagctcctgatcaagggactaggtcttaaatctgatgaattgcccaatcaaatgtcaatggatgattggccagagatgaaaaaaaaatttgccgatgtgtttgcagagaaaaccaaagctgagtggtgtcagatattcgatggtacggatgcttgtgtcacccccgtcctgacgttcgaggaagtagtccatcatgatcataataaggaacgtggttcatttattacctcagaggaacaagatgtgtcccccagacctgcccccctcctgcttaatacacccgcaattccctccttcaagcgagatccctttatcggagaacatacagaagagattctcgaagaatttggattcagcagagaagagatctatcagctcaactctgacaagatcattgagtccaataaggttaaggcttcactg

SEQ ID NO: 249520 - DNA, 1146 bp, synthetic construct
  misc_feature 1..1146: note = Description of Artificial Sequence: Synthetic coding sequence
  source 1..1146: mol_type = other DNA
atggcattgcaaggaatatcagtggtggagctcagtggcctcgcccctggacctttttgcgccatggttcttgctgacttcggagctagggtggttcgagtcgatcgtcctggatctcgctatgacgtcagtagactgggtcggggcaagcggagcctggtgctggacctgaaacagcctcgcggggctgctgtccttaggcgcttgtgcaaaagaagcgatgtgctgcttgaacccttccgccgcggcgtgatggaaaaactgcagctggggcctgagattttgcagagagagaacccccggctcatctacgctagactcagcgggtttggccaatccggctccttttgccggttggccggccacgatatcaactacctcgcacttagcggagttttgtctaagattggaagaagtggcgagaacccttacgcccctttgaacctgctggctgatttcgctggcggaggattgatgtgcgctctgggcatcatcatggctcttttcgatagaaccagaaccggaaaaggtcaggtcatagacgctaacatggtcgaagggaccgcctacctctcatcttttctgtggaagacacaaaaactttcgctctgggaagcccctagaggccagaacatgctcgatggcggagcccccttctatactacctatagaactgcggacggggagttcatggcagtgggagccatcgaacctcagttctatgagctgctgataaaaggcctcggcctcaagtccgacgagttacctaaccagatgagtatggacgattggcccgagatgaagaaaaaatttgcagatgtgttcgcagaaaaaacaaaagcagagtggtgtcaaattttcgacggaacagatgcctgcgtcacccctgtgttgactttcgaagaagttgtccatcatgatcacaacaaggagcgaggctctttcatcacctccgaagaacaggatgtgtcacctaggccagctcccctgttgttaaacactccggctatcccaagcttcaagcgggatcccttcatcggagaacacacagaagaaatcctggaggagttcggctttagccgcgaagagatttaccaactgaacagcgacaagattatcgagagcaacaaggtgaaggcaagtctt

SEQ ID NO: 249521 - DNA, 1335 bp, synthetic construct
  misc_feature 1..1335: note = Description of Artificial Sequence: Synthetic coding sequence
  source 1..1335: mol_type = other DNA
atggctgtcgcaattgctgctgcgcgcgtgtggcggctgaatcgggggctatcccaggcggccctgttgctcctcaggcagcccggtgcacgcgggcttgcaagatcgcatccaccccgccagcagcaacagtttagcagccttgatgataagccgcagtttcctggggccagcgccgaattcattgacaaactggagttcattcagcctaacgttatctctggtattcctatctaccgcgtgatggaccgtcaaggccagatcattaatccaagtgaggacccccaccttcctaaggagaaggtgctgaagctgtataaatccatgactttgttgaacacaatggatcggatcctctatgaaagccagcgccagggacgaatcagcttttacatgaccaactacggcgaggaagggacacatgtgggaagcgccgccgccctggacaatacagacctggtgttcggacagtatagagaggccggagtgctcatgtatagagactatccgttagagctttttatggcccagtgttacggaaatatttccgacctgggtaagggtcggcaaatgcctgtgcactacgggtgtaaagaaaggcatttcgtgacaattagcagcccactcgcaacccagattccgcaagccgtgggcgccgcatatgcagctaagagggccaacgcaaacagagtagtcatctgctatttcggtgaaggcgccgcgtcagaaggcgacgcacacgccggattcaacttcgctgccacactcgagtgtccaattattttcttctgtaggaataacggctacgctataagtactcccacctctgaacagtatcgcggcgatgggattgcggcaaggggccctggttatgggataatgtcaattcgtgtagacggaaatgacgtctttgccgtgtacaatgcaaccaaggaggccaggagacgagcagtggccgagaaccagcccttcctgattgaagccatgacatataggattggccaccattcaacaagcgatgactcatctgcctatagatctgtggacgaggtaaattattgggataagcaggaccatccaataagtagactccgccactatctcttatcacagggatggtgggacgaagagcaggagaaggcctggcgcaagcagtctaggcggaaggtgatggaagcgttcgaacaggccgagcgcaagcccaaacccaatccgaatctcttgtttagtgatgtatatcaggagatgcctgcacagctccggaagcagcaggaaagcttggccagacacttgcagacctacggcgagcactatcccctagatcacttcgataaa

SEQ ID NO: 249522 - DNA, 1335 bp, synthetic construct
  misc_feature 1..1335: note = Description of Artificial Sequence: Synthetic coding sequence
  source 1..1335: mol_type = other DNA
atggcagtggctatcgctgcagcccgggtgtggcgcctgaaccgcggactgagccaagctgcactgctgctgctgcggcagcccggagcgcgggggctggcaagatcccacccaccccgccagcaacaacagttttcgtccctcgatgataagccgcagttcccgggggcgtcggccgagttcattgacaagttggagttcatccagccgaacgtgatctcaggaatcccaatatacagggtgatggacagacagggtcagatcatcaacccttcagaagatccgcacctgccaaaagagaaggtgctgaaattgtacaagtccatgactctgctcaatacgatggatcggatcctgtacgagagtcagcggcagggccgaatctcgttctacatgaccaactacggagaggaggggactcacgtgggctccgcggcagctctcgacaatacggacctcgtgttcggtcagtatcgggaagcgggagtgctgatgtaccgcgactacccactggaactcttcatggcccagtgctacggaaacatctccgacctcggcaaaggacggcagatgcctgtgcattacggatgtaaggaacggcactttgtgaccatttccagcccattggccacccagatcccgcaagcagtcggcgcagcctacgccgccaaacgcgcaaatgctaatcgcgtggtgatctgttacttcggagagggagctgcgtcagaaggagatgctcatgccgggttcaatttcgctgcgactttggaatgccctattatctttttctgccggaataacggatacgctatcagcactccgacgagtgagcaatacagaggtgatggcatcgcggcacgggggcctggatacggtatcatgtcgatcagagtggacggcaatgacgtgttcgcggtgtacaacgccaccaaggaagcgcggcgcagagctgtggccgaaaatcaaccgttcctgatcgaagcaatgacctatagaatcggacaccatagcacttccgatgatagctcagcctacagatctgttgacgaagtgaactactgggacaagcaggaccacccaatctcgcgcctgcgccactacctcctgagccagggatggtgggatgaggagcaagaaaaggcgtggcgcaagcagagcagacgaaaggtgatggaggcgtttgaacaggcggagcggaaaccgaagccaaaccctaacctccttttcagcgacgtgtaccaagaaatgcccgcgcagctgagaaaacaacaagagtcactcgctagacacctgcaaacctacggagaacactacccgctggaccacttcgacaag

SEQ ID NO: 249523 - DNA, 1335 bp, synthetic construct
  misc_feature 1..1335: note = Description of Artificial Sequence: Synthetic coding sequence
  source 1..1335: mol_type = other DNA
atggccgtcgctatcgcagcggcgcgtgtgtggcggttgaacaggggtctgtcacaggcagccctcctcctgctgagacagcccggagctcgcggtctggcccggtcgcatccgccacggcagcagcagcagttcagctcactggacgataagccacaattcccgggtgcttctgcagaattcatcgataaacttgagttcatccagccgaatgtcattagcggaatccccatctaccgtgtcatggatcgccaggggcagatcattaatccaagcgaggaccctcatcttcctaaggagaaggtgctcaagctctataagtcaatgacccttctgaacaccatggacaggattttgtacgagtcgcaacgccagggaaggatctcattttacatgacgaactatggcgaagaaggaacccacgttgggtcggcagctgccttggacaacaccgatctggtgttcggccagtaccgcgaggcgggggtcctcatgtaccgcgactaccctctggagctcttcatggcgcaatgttacggtaatatctccgacctgggaaagggacgccaaatgccagtccattacggatgcaaagaacggcactttgtgactatctcctcaccgctcgccacccagatccctcaggccgttggcgccgcatacgcggccaagcgtgctaacgcgaatagggtcgtgatatgctacttcggagagggcgcagcgtccgaaggggacgctcacgccggattcaatttcgcagcaacgctggaatgcccaatcattttcttctgcaggaacaatggatatgccatcagcacgccgacttccgaacagtaccgcggggacggaatcgccgctcgcggcccgggatatggcataatgtcgatccgggtggatggtaacgacgtctttgcggtgtacaacgctactaaggaagcgagacgacgtgccgtggccgagaatcaaccctttctgatcgaggccatgacctaccggatcggccatcactcgacgagcgacgattcgtcagcctacagatccgtggacgaggtgaactactgggacaagcaggatcaccctatctcacggctgcggcattaccttctctcgcaaggatggtgggatgaggaacaggagaaagcctggcgcaaacagtcgcggcggaaagtgatggaggcctttgaacaagccgagcggaagccaaaaccaaacccgaacctgttgttttccgatgtgtaccaggaaatgccagcgcaactccggaaacagcaggaatcactcgccagacacctgcaaacctatggggaacattacccgctcgaccacttcgacaag

SEQ ID NO: 249524 - DNA, 1335 bp, synthetic construct
  misc_feature 1..1335: note = Description of Artificial Sequence: Synthetic coding sequence
  source 1..1335: mol_type = other DNA
atggcagtggcaattgcggccgcccgagtctggcggctgaatagagggctctcccaggcagccctcctgcttctacggcagccaggggcgaggggactggccaggtctcatcctcctcggcagcaacagcagttttccagtttagacgataagccccaatttccaggcgcgagcgcagagttcattgataagctagagttcatccagcccaacgtgatctccgggattcccatttacagagtaatggatcgccaggggcagatcattaacccatcggaggacccccacctcccgaaggagaaagtgctgaagctgtataagtcaatgacgttgctgaacactatggatcgtatcctgtacgagtcacagaggcaaggccgcataagcttttacatgaccaattatggggaagaaggcacacacgtgggatccgccgctgctctggataacactgacctcgtcttcggacagtaccgggaagcaggagtgctgatgtaccgggattacccccttgaactgttcatggcacagtgttatggaaacatttcagacctcggaaagggcaggcagatgccagttcactatgggtgtaaagagagacattttgtgaccatcagtagccctctggcaacccagatcccccaagcagtgggggccgcctatgctgccaagagggccaatgctaatagagtggtaatttgctatttcggagaaggtgcagcgtcagagggcgacgctcatgccggctttaattttgcagccacgttagagtgtcccattatttttttctgccgcaataatgggtatgccatcagtactcccactagcgaacagtatcggggcgatggcattgcagctcgcggaccggggtatgggatcatgtccatcagggtcgatggcaatgatgtattcgcagtctataatgcaaccaaggaagctcggcgccgcgccgtggcagagaaccagccctttctgattgaagctatgacctaccggattggtcatcattccacatcagacgatagctccgcttaccggtcggtcgatgaagtcaattattgggacaaacaggaccaccctattagccgcctccgccactacctgctatcccaaggttggtgggacgaggagcaggagaaagcctggcggaagcaaagcaggaggaaggtcatggaggcttttgaacaagcagagcgcaaaccgaagccaaacccgaacctcctgttctccgatgtctatcaggagatgccggcacagttgaggaagcaacaggagtcactggcccggcacctccagacatacggtgagcattacccacttgatcatttcgacaag

SEQ ID NO: 249525 - DNA, 1335 bp, synthetic construct
  misc_feature 1..1335: note = Description of Artificial Sequence: Synthetic coding sequence
  source 1..1335: mol_type = other DNA
atggccgttgcgatcgctgctgctagagtgtggagactcaacagagggctctctcaagcggccctgctgctgctgcggcagccaggtgcccgcggactggcccgctctcatcccccccggcagcagcagcagttttcctctctcgacgacaaacctcagtttcctggcgctagtgctgagtttatcgacaaattagaattcatacagcctaatgtaatctctggcatccctatctacagggtcatggaccgtcagggccaaatcattaatcccagcgaggacccccatctgccaaaagagaaggtgttaaagctgtataagagcatgaccctgctcaacactatggatcggatactgtacgagagccagcggcagggacggatttctttttacatgaccaactacggcgaggaagggacccacgtggggagcgccgcagctctggacaacactgatctggtctttggccagtacagagaggccggcgtgctgatgtacagggactatccgctggagctgtttatggcacaatgttacggaaatatatctgatctagggaagggccgccagatgcccgttcattacgggtgcaaggagagacattttgttacaataagcagcccactggccacccaaatcccacaggccgtgggagccgcttatgcagccaagcgtgcaaacgccaatcgcgtggttatatgctatttcggggagggagcagctagcgaaggagacgcacacgcaggattcaactttgccgctaccttggaatgtcccatcatcttcttttgccgaaacaacgggtacgccatttccacccctacctctgagcagtacaggggtgacggaattgcggcccgcggtccaggctatgggattatgtccatcagagttgacggtaacgacgtctttgccgtctacaacgccactaaggaagctcgccggcgagcagtggctgaaaaccagcccttcctgatcgaagctatgacttacagaatcggccaccacagcacaagcgatgacagtagtgcctaccgaagcgtggatgaggtaaattattgggacaaacaggaccaccctatttcgaggctgcgccactatttgctgtctcaggggtggtgggatgaagagcaggaaaaggcctggagaaagcaatcccgccggaaggtcatggaggccttcgaacaggccgagagaaagcccaaacctaatcccaatctgctgttctcagacgtgtaccaagaaatgcctgctcagctgaggaaacagcaggaaagcctggcccgccacctgcagacgtatggcgaacactaccccctggatcattttgataag

SEQ ID NO: 249526 - DNA, 1335 bp, synthetic construct
  misc_feature 1..1335: note = Description of Artificial Sequence: Synthetic coding sequence
  source 1..1335: mol_type = other DNA
atggcagtggctatcgccgctgctagagtctggagactgaataggggtttgagtcaggccgccctcctcctactgcggcagcctggcgcacgaggtctggctcgatctcaccctcccaggcagcagcaacagttttctagcctcgacgacaaacctcagttccctggtgcatccgccgagtttatagacaagctggagtttatccaacccaatgtgatatctgggattccaatctatcgagtgatggatcggcagggccagatcatcaaccccagtgaagatccccacttgcccaaagagaaggtcctcaagctttacaaaagtatgacacttctgaacaccatggataggatcctgtacgaaagccagcgtcagggccgaattagtttctacatgaccaactatggcgaggagggcactcatgtgggcagtgccgcagcgctggataacacggacctcgtttttggtcaatatcgagaggctggagtgctcatgtaccgggattatccgctggagttattcatggcgcaatgctatggcaatatcagtgatctgggaaaaggacggcagatgcctgttcactacggttgcaaggagcggcatttcgtgacaatttccagcccactcgccactcagatcccccaggcagtgggcgccgcatacgccgccaaacgggctaacgctaaccgggtcgtgatttgttactttggcgaaggcgcagcttctgagggggacgcccacgccggcttcaacttcgcagccactcttgaatgccccattatctttttttgtaggaacaacggttatgccatcagtacacctacttccgagcagtaccggggtgacggcatcgctgcacggggacctggttacggaattatgagtatccgagtggacggaaatgatgtgttcgcagtgtacaatgcaacaaaagaagccaggaggagggcagttgctgaaaaccagccttttcttattgaagcaatgacataccgtatagggcatcattcgacctcagacgactcatctgcatacagatcagtagacgaagttaactactgggataaacaagatcaccccataagtagactgcggcattacttgctatcgcagggatggtgggacgaagaacaggagaaagcatggcggaagcagtcaaggcgcaaggtaatggaggcgttcgagcaggccgaacgaaaacccaagccaaatcccaatttgctcttctctgatgtatatcaagaaatgcctgcccagctgagaaaacagcaggagtccctcgcacgccacttgcagacatacggagaacactatccactggatcatttcgataaa

SEQ ID NO: 249527 - DNA, 1335 bp, synthetic construct
  misc_feature 1..1335: note = Description of Artificial Sequence: Synthetic coding sequence
  source 1..1335: mol_type = other DNA
atggccgtcgcgatcgcggctgcccgggtgtggagactaaaccgcgggctcagccaggccgcattgctgctgctgcggcagcctggtgctaggggcttagcccgctctcatccgccaaggcaacagcaacagtttagcagcctggatgataaaccccagttcccaggggcctcggcggagtttatcgataagttagagttcatccaaccgaacgttattagcggcattcctatatacagagtcatggataggcaagggcagatcatcaacccttcggaagaccctcatcttcctaaagagaaagtgctaaagctgtataaaagcatgacactgctcaatactatggataggattctctacgagtcccaacgtcagggccgaatcagtttctatatgacgaactatggggaggagggtacccacgtggggtctgcagccgccctcgacaacactgatctggtgttcgggcagtatcgtgaggccggggtgctgatgtatagagactaccccctagagctatttatggcccagtgttatggtaatattagcgatctgggtaaggggagacaaatgccagtgcactatggctgtaaggagcgtcacttcgtgacaatttccagcccccttgctacccaaataccccaggctgtgggtgctgcttatgcagcgaagcgcgctaacgctaatagagtcgttatatgctatttcggggaaggtgctgcctctgaaggcgatgctcatgccgggtttaatttcgccgccacactcgaatgcccaatcattttcttctgccggaacaatgggtacgcaataagcacgccgaccagcgagcagtataggggggacggaatagctgcacggggacctggctacggcatcatgtccatcagagtggacggtaatgacgtgtttgcggtatataacgccactaaggaagcaaggcggagggcggtcgcagaaaatcagcccttccttatcgaggctatgacatacaggattggccatcactccacctccgacgactcctccgcctaccgatcagtggatgaggttaactactgggataaacaagaccatccgatctcccgactccggcactatctcctgtcccagggatggtgggacgaggagcaggagaaggcttggcgaaagcagagcaggcgaaaagtgatggaggccttcgaacaggccgagcggaaacccaagcctaatcccaacctgctgtttagcgatgtataccaggagatgcccgcccagttgagaaagcagcaggaaagtctggctagacacttacaaacctacggagagcattaccctctggaccacttcgacaag

SEQ ID NO: 249528 - DNA, 1335 bp, synthetic construct
  misc_feature 1..1335: note = Description of Artificial Sequence: Synthetic coding sequence
  source 1..1335: mol_type = other DNA
atggcggtggcaatcgccgctgctagagtgtggagactaaatcgaggtctttcgcaggcagccctcctgctcctgcggcagccaggcgcaagaggcctagctcgctcccacccgcccaggcagcaacagcagttctcatccctggacgataagcctcaattccccggggcatcggcggaattcatcgataagttggaattcatccagccaaatgtcatctccggcattcccatctatagggtaatggacagacagggacagatcattaatccatccgaagatccacacctgcctaaggaaaaggtactcaagttgtataagagcatgactctgctgaacaccatggatcggatcctgtacgaaagtcagagacagggacggataagcttctatatgactaattacggtgaggagggaacccatgttgggagcgcggccgcactcgacaataccgacctggtctttggccagtatcgcgaggctggggtgctcatgtatcgggactaccctctggaactgttcatggctcagtgctacggaaatatctctgatctgggaaaggggagacagatgccagtccactacggctgtaaggaacgtcacttcgtgaccatctcctcacccctggccactcaaatcccacaggccgtgggagcagcatatgctgctaagcgcgctaatgctaaccgcgtggtaatttgttattttggcgagggagctgcctcagagggcgacgctcatgccggcttcaacttcgcagctacactggaatgccccatcatcttcttctgcaggaataatggatatgctatttccactcctaccagcgagcaatatcgcggtgatggaatagccgcacggggcccagggtacggaattatgagtattagagtggacggcaacgatgttttcgccgtgtacaacgctaccaaagaggctagacgccgcgcagtggccgagaaccaaccattcttgatcgaagccatgacataccggatcggccatcattctacctcagacgattcctcagcttacagatctgttgacgaagtcaattattgggataaacaggatcatccgatctcacgcctgcggcattaccttctcagccaaggatggtgggatgaggaacaggaaaaggcatggaggaaacaatcaaggcggaaggtgatggaggcattcgaacaggcagagcggaaacccaagcctaatcctaatctgctctttagcgacgtgtatcaggaaatgcccgctcagctgcgtaagcagcaggaaagtctggcccgccatctgcagacgtatggtgagcattaccctctggaccatttcgataaa

SEQ ID NO: 249529 - DNA, 1335 bp, synthetic construct
  misc_feature 1..1335: note = Description of Artificial Sequence: Synthetic coding sequence
  source 1..1335: mol_type = other DNA
atggcagttgcaattgccgcagcaagagtgtggcggttgaacaggggactatctcaggctgcacttctccttttgcggcagcccggagctcgtggcctggcgcggtcccatcctcctcgccaacagcagcagttctcctcactggacgacaaaccccaatttcccggagcctccgctgaatttatcgacaagctggaatttattcagccgaacgtgataagcgggatcccaatctaccgggtaatggatagacaggggcagatcatcaacccttctgaggacccacacctgccaaaggaaaaagtgttgaaactgtataaatccatgacactgctaaacacaatggacaggatcctctacgagagccagcggcagggaagaatctctttttatatgaccaattatggtgaagaaggcactcatgtcggcagtgcagccgcgctagacaacactgacctggttttcggacaataccgggaggcgggtgtgttgatgtaccgggactaccctcttgagctgttcatggctcaatgctacgggaatatcagcgatttgggaaagggcaggcagatgcctgttcactatggatgtaaggagaggcattttgttaccatctcttcccctctggcgacccagatcccccaagctgtgggggccgcatatgctgcaaaaagggccaatgccaacagggtggtgatttgttacttcggtgagggagccgcatcagagggagacgcccacgccggctttaactttgccgccacactggagtgccccattatatttttttgtcggaataatggctatgcaatcagtacgcccacaagcgaacagtaccggggagacggtatcgctgcacgggggccaggctacggaattatgtctatccgcgtggatgggaatgatgtcttcgctgtgtacaacgccaccaaggaagcaagacgccgggcagtggctgagaaccagcctttcctcatcgaggccatgacatatcggatcgggcaccacagtacctcggatgattccagcgcctaccgcagcgtggacgaggtgaattactgggacaaacaggatcacccaataagccgcctacgacactatctactatcccagggctggtgggatgaggagcaggaaaaggcttggcggaagcagagcaggaggaaagtgatggaagcctttgaacaagctgagaggaagccaaagcccaatcccaatcttctttttagcgacgtctaccaggaaatgcccgcccagttgcggaagcagcaagagagtctggcgcggcatctgcaaacctatggtgaacattatccacttgaccactttgacaag

SEQ ID NO: 249530 - DNA, 1335 bp, synthetic construct
  misc_feature 1..1335: note = Description of Artificial Sequence: Synthetic coding sequence
  source 1..1335: mol_type = other DNA
atggcagttgctatagcggcagcacgagtttggcgcctgaatcgtggactctcccaggccgcgctcctgctccttagacagcctggagcacgcggtctggcacggtcccatccgccaaggcaacaacagcagtttagctcgttggacgacaaaccccaattccctggagcgtccgctgaattcattgacaagctggagtttatccaacctaacgtcatttcgggaattcctatctacagagtcatggaccgtcaaggacaaatcattaacccctcggaggacccccatctgcccaaggaaaaagtactgaaactttacaaaagcatgaccctcttgaacactatggacaggatattgtacgaatcccaacgccaggggagaatcagcttctatatgactaactacggggaagaaggcacccatgtgggatccgcagcagctcttgacaacactgatctcgtgtttggtcagtacagggaagcaggagtcttgatgtaccgtgattaccctcttgaattgttcatggcgcaatgttacggcaacatttccgatctgggcaagggcagacagatgccagttcattatggttgtaaagagcgtcactttgtgactatcagctctccccttgctactcaaattccacaagccgtgggagcagcctacgcagccaaacgcgcaaatgcaaaccgagtcgtgatctgttactttggagaaggtgcagcctccgaaggagatgcacatgccggatttaactttgctgctactcttgaatgcccaatcatctttttctgtcgaaataacggctacgcaatatccaccccaacttcggagcaatatagaggagatggtattgcagcgcgcgggcctggatacggtattatgtccatccgtgtggatggtaatgacgtgtttgcagtgtacaacgcaaccaaggaagccagacggagagcagtcgcggagaaccagccatttctcattgaagccatgacgtaccgcattgggcatcactctacttccgacgattccagcgcataccggagcgtggacgaagtgaactactgggataagcaggatcaccctatctcgcgcctgagacattacctgctctcgcaaggatggtgggatgaagaacaagaaaaagcatggagaaaacaatcaaggcgcaaggtcatggaagccttcgaacaggcagagagaaagcctaagccaaatcctaacctgcttttcagcgatgtgtaccaggaaatgcctgcccagttgagaaaacagcaggaatccctggctagacatctgcagacctacggggaacactaccctctggatcattttgacaag

SEQ ID NO: 249531 - DNA, 1335 bp, synthetic construct
  misc_feature 1..1335: note = Description of Artificial Sequence: Synthetic coding sequence
  source 1..1335: mol_type = other DNA
atggcagtggccattgccgcggcccgtgtctggcgcctgaacaggggactgtcccaagcagccctgctcctgctgcgccaacccggagcgagaggactcgcgcggagccacccgccacgacagcaacagcagttctcgagcctggatgataaaccacaattcccgggagcatctgcggagttcatcgacaagctggagtttatccaaccaaatgtgatctcgggaatcccgatctatcgagtaatggaccggcaaggacaaatcattaacccatccgaggaccctcacttgcctaaagaaaaggtgctcaaattgtacaagtctatgactctgctgaacactatggaccgcatcctctatgaaagccagcggcaaggtcgcatcagcttctatatgaccaattacggggaggaaggaacgcatgtgggttcagcggcggccctggacaatactgacctcgtctttggccagtacagagaggccggtgtcctcatgtacagagactaccctcttgaactcttcatggcccaatgttacggtaacatatcggatcttggcaagggccgccagatgccggtgcattacgggtgcaaagaacggcacttcgtgactattagctccccgcttgcaacccagatccctcaggccgtgggagcggcatacgccgcgaagcgggcgaatgcaaatcgggtggtgatctgctacttcggagaaggagcggcgtccgagggtgacgctcacgcgggattcaacttcgccgctaccctggaatgccccataatcttcttctgcaggaataacggttacgccatcagcaccccgacgtcagaacagtaccgcggcgacgggatcgcagcccggggaccaggctacggcatcatgtccatccgcgtggacgggaacgatgtttttgctgtgtacaacgctactaaggaggctagacgccgggctgtcgctgagaatcagccgtttttgatcgaggcaatgacgtaccgcatcggacaccactcgacctcagacgatagctccgcgtaccggtcggtagatgaagttaactactgggacaagcaggatcatcccatctccagactgcgacactacttgctcagtcaggggtggtgggacgaggaacaagaaaaggcttggcgcaagcagtcgagaagaaaggtgatggaggcctttgaacaggctgaacggaaacccaagccaaacccgaatctgctgttcagcgacgtctaccaagagatgccggcccagctccgcaaacagcaggagtctctggcacgtcatttgcagacttacggcgaacactacccgcttgatcatttcgataag

SEQ ID NO: 249532 - DNA, 1335 bp, synthetic construct
  misc_feature 1..1335: note = Description of Artificial Sequence: Synthetic coding sequence
  source 1..1335: mol_type = other DNA
atggcagtggctatcgcagccgctcgcgtgtggcgcttgaaccggggcctgtcccaggcggccctgctgctgctcagacagccgggtgccagagggctggcgcgctcccatccgcctcgccagcagcaacagttctcctcactcgacgacaagccacagttcccgggggcgagcgcagaattcattgataaactcgaattcatccaaccgaacgtgatctccggcattccgatttacagggtgatggaccggcagggacagatcatcaacccgtccgaagatccacacctcccgaaggaaaaggtcctcaagctgtacaaatccatgaccctcctgaatactatggaccgcatcctgtacgaatcccagaggcagggaagaatctcattttacatgaccaactacggagaggaaggaacccacgtcggtagcgcagcggctctcgacaacaccgatctggtattcgggcaataccgcgaagccggagtcctgatgtacagggactaccctctggagctgtttatggcccagtgctacggcaacattagtgacttgggaaagggtcggcaaatgcccgtgcactacggatgtaaggaacgccacttcgtcaccatctcatcgccgcttgccactcagatccctcaagctgtgggcgctgcctacgccgcaaagagagccaacgcaaatcgagtggtgatctgctacttcggcgagggagctgcttcggaaggagacgcccacgcaggattcaactttgccgccaccctggagtgtcctatcatcttcttttgcagaaacaacggatacgcgatctcgactccgacctccgaacaatatcgcggagacggaatcgcggcccggggtccaggatatggaatcatgtctatccgggtggacggaaatgacgtgttcgccgtgtacaacgccaccaaggaggcgcgacgccgcgccgtcgccgagaatcagcctttcctgatcgaggccatgacctaccgcatcggacaccattccacctcagacgactcctcggcgtatcgctccgtggacgaagtgaattactgggataaacaggaccaccctatttcccggctgagacactacctgcttagccagggatggtgggacgaagaacaggaaaaagcctggcggaagcagtcacgccggaaagtcatggaggcatttgaacaggccgagcgcaaaccgaagccgaacccgaacctgctcttttcggatgtgtaccaagagatgcccgcacagctccggaagcagcaagagagcctggcccgccatctgcagacttatggggagcactacccgctggatcatttcgacaag

SEQ ID NO: 249533 - DNA, 1335 bp, synthetic construct
  misc_feature 1..1335: note = Description of Artificial Sequence: Synthetic coding sequence
  source 1..1335: mol_type = other DNA
atggctgttgcgattgccgctgcccgcgtatggcgattgaaccgcggattgagtcaagctgctctcctcctgctcaggcagcccggagcaaggggcctagccaggagtcacccaccacgtcaacagcagcagtttagctcactcgacgacaagccccagtttccgggcgcttctgccgaatttatcgataaacttgagttcattcagcccaatgtgatatccgggataccaatatacagggtaatggaccggcagggccagataataaacccaagtgaagacccacatttacctaaggagaaggtacttaaattgtacaaatccatgactttgctcaataccatggacaggattctgtacgagtcccagaggcagggccgaatctccttctacatgactaattatggggaagaaggaacccatgtgggatctgcggctgctctagacaacaccgacctggtattcggacaatacagagaagccggagtgctcatgtatcgcgactatccgcttgaactcttcatggctcagtgctacggcaacatttccgacctcggtaaagggaggcagatgcctgttcattacgggtgcaaagagagacactttgtcactattagctcaccactggccacgcagattccccaggccgtgggggcagcgtacgcagcaaagcgtgctaacgctaatagggttgtcatttgctactttggcgagggagcagctagcgagggggatgcacatgccggttttaattttgccgccactctggagtgtccaatcatttttttctgccgaaataacggctatgcaatctctacccctacctcagagcagtatagaggtgatggaatcgctgctagaggacccggctacggcatcatgtcaatccgagtcgacggcaacgatgtattcgccgtgtacaacgcgacaaaggaggctagaaggagagccgtggccgagaatcagccatttttgattgaggcaatgacgtacaggatcgggcaccactctacctctgacgactcaagcgcttacagatccgtcgatgaagtcaattattgggacaagcaggatcatcccatctccagactgaggcattacctcctgagccaagggtggtgggacgaggagcaggaaaaagcttggaggaagcagtcgaggcgtaaagttatggaggcctttgaacaggccgagcggaaaccaaaaccaaatcccaacctgctgttctccgacgtctatcaggagatgccagcacagctgcgaaagcagcaggagtctctagctcgtcatctccagacatacggtgagcactaccctctggaccacttcgacaag

SEQ ID NO: 249534 - DNA, 1335 bp, synthetic construct
  misc_feature 1..1335: note = Description of Artificial Sequence: Synthetic coding sequence
  source 1..1335: mol_type = other DNA
atggctgtggccatcgccgctgctcgcgtctggcggctgaacaggggcctctcacaggcggcactgctgctcctgcgccagcccggagccagaggactggctcggagccatccacctcgccaacaacagcaattcagctccctggacgacaagccacagttccctggcgcctcggctgagttcatcgataaactggagtttattcaaccaaacgtcatcagcggtatcccgatctacagggttatggaccggcaaggtcagatcatcaatccatcggaggacccccacctccccaaagaaaaagtgctgaaactgtataagagcatgacgctgctcaacaccatggaccggatcctgtacgagtcccaaagacagggaaggatctcattttacatgaccaattacggagaggagggaactcacgtgggatcagcggcggccctcgacaatactgatcttgttttcggccagtacagagaggcgggcgtcctgatgtacagagactatccgctggaattgttcatggctcagtgctacggaaacatctccgatctcggcaagggtcgccagatgccggtgcactacggttgtaaggagcgacacttcgtgaccatctcaagcccgctcgcgactcagatcccgcaggccgtgggagctgcgtacgccgctaagcgggcaaatgcgaacagagtcgtcatctgctacttcggagagggagcagcttcggagggagacgcccacgcggggttcaacttcgccgcgaccctggaatgcccgattatcttcttttgtcgcaacaacggatacgccatctcaaccccaactagcgagcaatacaggggagacggaatcgccgcccgcggcccgggctacggcatcatgtccattcgggtcgatggaaatgatgtgttcgctgtgtacaacgcaactaaagaggcacgcaggcgcgcagtggctgagaaccagccttttttgatcgaagccatgacttacaggatcggtcaccactccacttcggatgacagcagcgcgtaccgttcggtggacgaagtgaattactgggacaagcaggaccaccctatctcacggttgcgccactacctgctgagccaaggatggtgggacgaagaacaagaaaaagcctggcgcaaacagtcgcggcgcaaagtcatggaggcttttgagcaggcggaaaggaaaccgaagcccaacccaaacctgctcttctcagacgtgtaccaggagatgcccgcgcaactgcgtaagcagcaagagtccctcgcccgccatctgcaaacgtacggcgaacattaccccctggatcacttcgacaaa

SEQ ID NO: 249535 - DNA, 1335 bp, synthetic construct
  misc_feature 1..1335: note = Description of Artificial Sequence: Synthetic coding sequence
  source 1..1335: mol_type = other DNA
atggcagtcgccatagctgcggcaagagtatggcgactaaaccgtggactcagtcaggctgcccttctcttgcttagacagccaggggccaggggcctggccagatcacatcctcccaggcagcaacagcagttttcatccctagatgataagcctcagtttccgggggcatctgctgagtttatagataaacttgagttcatccagcctaatgtcatttcaggaattcccatttaccgagtgatggaccgccagggccagattattaacccaagtgaagacccacacctcccaaaggagaaagtcctgaagctgtacaagtccatgacactcctcaacacaatggatcgtatcctgtacgagtcgcagcggcagggtcgcattagtttctatatgaccaactatggggaggagggcacccacgtgggttcagcagccgctctggacaacactgatctggtttttggccaataccgggaagcaggcgtgttgatgtaccgggattacccactagagctctttatggctcaatgctacggaaatataagtgatcttggcaaagggcggcaaatgccagtgcactatggatgtaaagaacgccacttcgtgacaattagcagcccactggctactcaaattcctcaggccgttggcgccgcttatgctgcaaagcgggccaacgcgaatagagtagtgatttgttattttggcgagggagcagcttctgagggtgatgctcatgcaggcttcaacttcgctgccactttggagtgcccgataatattcttttgtaggaacaatggatatgcaatctcaactccaacctcagagcagtaccgcggcgatggtattgcggcccgcggacccgggtacgggattatgtccataagggtcgacggcaacgatgttttcgcagtgtataatgctaccaaagaggcccggaggagagcagtggctgagaatcagcccttcctgattgaggctatgacctatcgcatcggccaccattctacttctgacgactccagcgcctaccgcagcgtggacgaggtgaactactgggacaagcaggaccatcctatctctaggcttaggcattatctgcttagccaggggtggtgggacgaagagcaagagaaggcctggcgtaagcagtcaaggagaaaggtgatggaagctttcgagcaggctgagaggaaaccaaagccaaatcctaacctcctgttctccgacgtgtaccaggagatgccggcccagctgaggaagcagcaggagagtctcgccaggcacttgcagacctacggagagcactatcccctcgatcacttcgataag

SEQ ID NO: 249536 - DNA, 1335 bp, synthetic construct
  misc_feature 1..1335: note = Description of Artificial Sequence: Synthetic coding sequence
  source 1..1335: mol_type = other DNA
atggcagtggcaattgcagcagccagagtctggagactgaatagaggcctgtcacaggccgcgcttcttctgctcagacagcccggtgcacggggtttggcaagaagccatccacctcgacagcaacagcaattttcgtcgcttgacgataagccacaatttcctggagcatcggcagaattcattgacaagctggagtttatacagcccaatgtgatttcgggaattccaatttaccgtgtgatggatcggcaagggcagattatcaacccttccgaggaccctcaccttcctaaagaaaaagtgctgaaactgtacaagtccatgaccctgcttaatactatggaccgtatcctttacgaatcgcaacggcagggtcggatttcattttacatgaccaattacggagaagaaggaacccatgtgggttctgcagcagctctcgacaataccgatcttgtgttcggtcagtacagagaagcaggggtgcttatgtaccgcgactatccacttgaactctttatggcacaatgctacggtaacatttcggaccttggtaaggggcgtcaaatgccggtccattatgggtgcaaggagaggcattttgtgaccatctcaagcccactggcaactcaaattccacaggcagtcggggcagcatacgcagcaaagagagctaacgctaaccgggtggtcatatgttacttcggtgagggtgcagcctcagaaggtgacgcacacgcgggtttcaattttgcagcaactctggagtgccccatcatcttcttttgtcggaacaatgggtacgcaatttcaactcccacttcggaacaataccgaggcgacggcattgcggcccgcggaccgggctacggcattatgtccatcagagtggatggaaatgatgtttttgccgtgtataacgccactaaggaagcacggagacgggccgtcgccgagaatcaaccttttctgattgaggcaatgacttacagaataggacatcattccactagcgacgattcctcagcatatcggagcgtggatgaagtcaattactgggataaacaggatcatcctattagtcgcctccgccactacctgctttcccaaggatggtgggacgaagaacaagagaaggcatggcgcaagcaatcccgtagaaaagtcatggaggcgttcgaacaagcagagagaaagcctaagcctaatccaaatctcctgttttcagatgtgtaccaagaaatgcctgcccaacttcgtaagcagcaggaatccctggcacgtcatttgcaaacctacggagagcactaccctctcgaccactttgacaag

SEQ ID NO: 249537 - DNA, 1335 bp, synthetic construct
  misc_feature 1..1335: note = Description of Artificial Sequence: Synthetic coding sequence
  source 1..1335: mol_type = other DNA
atggccgtggccatagcagccgcccgagtgtggcggctgaaccggggactgtcgcaggcagccctgcttctgcttcggcaaccgggagcccgaggtttggccaggtcgcacccccctcggcagcagcaacagttttccagtctggacgataagccccaattcccgggcgcttcagcggagttcatcgataagctggaattcatccaaccaaacgtcatctcggggattccaatctaccgcgtgatggaccggcaaggacagattatcaatccttcagaagatcctcacctcccaaaagagaaggtgttgaagctctataagtcgatgaccctgctgaatactatggaccggatcctttacgaatcacagagacagggacggatcagcttctacatgaccaattacggagaagaaggcactcacgtgggatcagcggccgccctggacaatactgacctggtctttggacagtacagagaggccggcgtgctgatgtacagggactaccctctggagctctttatggcgcagtgctacggaaacatttcagaccttggaaagggacgccaaatgccagtgcactacggatgtaaggaacggcatttcgtgaccatctcaagcccgctcgcgactcagatcccgcaagctgtaggagcagcctatgcggcaaagcgagcaaacgcgaaccgcgtggtgatctgctacttcggagagggagcggcttcggagggggacgctcatgccggcttcaacttcgcggcaacccttgaatgtcctattatcttcttctgccgcaacaacggctacgcgatctcgacccctacctcggaacagtatagaggagacgggatcgctgcgcgggggccaggctacggtatcatgtccattcgcgtggacggcaacgatgtttttgcagtgtacaacgccaccaaggaggcccggcggcgagcggtggcggaaaaccaaccgttcctgatcgaggctatgacttacaggatcggacaccactccacctcggacgattcctccgcctacagatcggtggatgaagtgaactactgggataaacaggaccatcctatcagccggctcaggcactacctgctttcgcagggatggtgggacgaagagcaggaaaaagcatggagaaagcagagccggcggaaggttatggaggcattcgagcaggcagaacgcaagccgaagcccaatccgaacctgctcttcagcgacgtgtaccaggaaatgccggcccagctccgcaagcagcaagaatccctggcccggcacttgcagacttacggagaacactatcctctcgaccactttgataag

SEQ ID NO: 249538 - DNA, 1335 bp, synthetic construct
  misc_feature 1..1335: note = Description of Artificial Sequence: Synthetic coding sequence
  source 1..1335: mol_type = other DNA
atggctgtcgccatcgcagcagctcgcgtttggagactcaacagaggcttatcccaggcagccctcttgctcctgcgccagcccggagccagagggctcgcccggtcccacccccctcgccaacagcagcagttcagttccctcgatgataaacctcagtttccaggggcatccgctgaattcatcgataagctggagttcatccagccaaacgtgataagtgggatccctatatatcgggtcatggatcgacaaggccaaatcattaaccccagtgaggatccacacttgccaaaggaaaaggtcttgaagttgtacaagtcaatgactctcctgaacactatggacaggattctctatgagtctcagcggcagggccgtatctctttttacatgaccaactatggagaggagggtacacacgtgggcagcgctgccgcccttgacaataccgacttggttttcgggcaataccgggaagccggcgtgttaatgtacagagattaccctctggagctgttcatggcccagtgttatggcaacatcagtgacttgggcaagggacgccaaatgcctgtacattatggctgtaaagaaagacactttgtcactataagtagtccactcgccacgcagattccacaggccgttggagccgcttacgccgccaaacgcgctaacgccaaccgcgttgttatttgctacttcggggagggcgccgcaagtgagggggacgcccatgccggattcaacttcgctgccacactcgagtgcccaatcattttcttctgtagaaacaacggatacgctatttccacccctacgtccgagcaatatcgaggagacggcatcgcagcgcgtggaccgggctacggaatcatgtctataagagtggacggaaatgacgtttttgctgtttataacgcgacaaaggaggccaggaggcgcgccgtcgctgaaaatcagccatttctgatcgaagccatgacttaccggatcggacaccactccactagtgatgacagtagcgcttaccgcagtgtggatgaagtcaactattgggataaacaggatcatccaatatcgcgacttagacattatttactatcccaagggtggtgggatgaggaacaggagaaggcctggaggaaacagtcacgcagaaaagttatggaagctttcgagcaagcagagcggaaacctaaacctaatccaaacctgctgttctccgatgtgtatcaagaaatgccagctcaattaaggaagcagcaggaaagcctggccaggcacctgcagacctacggggagcattaccccctggaccacttcgataaa

SEQ ID NO: 249539 - DNA, 1335 bp, synthetic construct
  misc_feature 1..1335: note = Description of Artificial Sequence: Synthetic coding sequence
  source 1..1335: mol_type = other DNA
atggctgtagctattgccgccgccagggtgtggcgactgaacagaggattgagccaagcagcgctgctgctcctgagacagcctggagcgcgcgggctcgctaggtctcacccccccagacaacagcagcagttctcctccctggacgacaaacctcagtttcccggcgccagcgctgaatttatcgataagctggaattcatccaacctaatgtgatttcggggattcctatctatagggttatggaccggcaaggtcagatcattaatcctagcgaggatccccatttgccaaaagagaaggtccttaagctgtacaagagcatgactcttttgaatacaatggatagaattctgtacgagagtcaacggcagggcagaatcagcttctatatgactaattacggagaggagggcacacacgtgggttcagcggccgccctcgataatacagacctggtgtttggtcagtacagagaggccggtgtgttgatgtaccgggattatcctctcgaactgttcatggctcagtgctatggtaatatttcagacctgggaaagggacgacaaatgcccgtgcactacgggtgcaaagagcggcactttgtgaccattagctctccactcgccacccagatccctcaggccgtcggggcggcatacgccgcaaagagagcgaatgctaacagagtggtcatttgctacttcggtgagggagcggccagcgagggagacgctcacgcggggttcaacttcgccgccactctcgagtgtcctattatcttcttttgtcgcaataatgggtatgctataagcacacccacctcagagcaataccggggcgatggcattgccgctcggggccctggttacggaataatgtccatcagggtggatgggaacgatgttttcgccgtttacaatgcgacaaaggaagctcgaaggagagcagtggcggaaaaccaaccctttctcattgaagcaatgacctaccggattggtcatcactcaacaagcgatgacagctctgcctatcgttctgtggatgaagtgaattactgggacaagcaagatcaccctatctctaggctgcgtcactatcttctatcacagggttggtgggatgaagaacaggaaaaggcatggcggaagcagtccaggagaaaggtcatggaggctttcgagcaggctgaaagaaagccgaaacccaatcccaatttgctgtttagcgatgtgtatcaggaaatgccagcccagcttcggaagcagcaggaatctctcgcccggcatttgcagacttatggcgagcactacccgctggatcattttgacaag

SEQ ID NO: 249540 - DNA, 1335 bp, synthetic construct
  misc_feature 1..1335: note = Description of Artificial Sequence: Synthetic coding sequence
  source 1..1335: mol_type = other DNA
atggcagtagctatcgccgcagcccgggtgtggaggctgaatcgaggactatcacaagcagctctgctcctgctcagacagcccggagcgagaggtcttgcccgctcccaccctccccggcagcagcaacagttcagctctctcgatgataaaccacagtttcccggagcatccgctgaattcatagacaaactcgaattcatccagccaaacgtcatctctggcattcctatctatcgcgtgatggatcggcagggacagatcataaatccctcagaggatcctcacctcccaaaagagaaggttctgaagctgtacaaatctatgacactgttgaacactatggatcgaatcctatatgaaagccaaagacagggccggatctccttctacatgacaaactacggggaggaaggaacacatgtaggctctgcggccgccctcgacaataccgacctcgtattcggtcagtaccgcgaagccggggtactaatgtatcgggattaccccttagaactgttcatggcccagtgttacggcaacatttccgatctgggaaaaggtcggcagatgcctgtgcactatggttgcaaggaacggcattttgtcacgatttcctctcccctggcgacccaaatcccacaagcagtgggtgctgcctatgctgcaaagagagctaatgccaacagagtcgtaatctgctacttcggcgagggcgctgcttccgaaggcgacgcacatgccggttttaactttgctgcaaccctggaatgtccgatcatattcttctgccgtaataacggttacgctatctcaacccccacttctgaacagtaccgcggcgacggtattgcagcacggggcccaggttacgggatcatgtcaatccgggtggacggaaacgacgtgtttgccgtgtacaacgccaccaaagaagcgagacgcagggccgtggccgagaatcagcctttccttatcgaggctatgacctatagaatcggccatcacagcaccagtgatgatagttctgcatataggagcgtcgacgaagtcaattactgggataagcaggatcacccgatcagtcggttgaggcactacctactcagtcaggggtggtgggacgaggagcaagagaaggcgtggcgaaagcagtcaagacggaaggtgatggaggcatttgagcaggcagaacgcaagcccaaacccaaccccaatctgctgttttctgatgtttatcaggaaatgcccgcacagcttcggaaacagcaggagtccttagcgcgtcacctgcagacatacggagaacactacccccttgatcatttcgacaaa

SEQ ID NO: 249541 - DNA, 1335 bp, synthetic construct
  misc_feature 1..1335: note = Description of Artificial Sequence: Synthetic coding sequence
  source 1..1335: mol_type = other DNA
atggccgtggccatcgcggcagcacgggtgtggcgcctgaacagaggtttgtcacaggccgcgctgctgctcctgagacaaccgggagccagaggacttgctcgctcccatcctccacgtcagcaacagcagttctcgagcctcgatgacaagccacagttcccgggagcgtcagccgaattcattgacaagctcgagttcatccagccgaacgtgatctccggcatccccatctatcgagtaatggataggcagggacaaatcatcaatccatcggaagatccccacctgcccaaggaaaaagtgctcaaactctacaagtcgatgacccttttgaacacgatggaccggatcctgtacgaatcccagaggcaaggaagaatctcgttctacatgaccaattatggagaggagggaacgcacgtcggaagtgcggcggcgttggacaatactgaccttgtgttcggccagtatcgggaggcgggggtcctgatgtatcgcgattaccccctggagctctttatggctcaatgttacggcaatatcagcgaccttggaaagggcagacagatgccagtgcactacggctgcaaagagcggcatttcgtgactatttcgagtccgttggcgactcaaattccacaggccgtcggggcggcttacgcggctaaacgggccaacgccaaccgtgtcgtgatctgctactttggtgagggggcagcgtccgagggtgacgcacacgccggcttcaacttcgctgcaaccctcgaatgcccgatcatctttttctgccgcaacaacggatatgctatttcaaccccaactagcgaacaataccggggagatggcatcgccgcacgcggcccaggatacggtatcatgtctatccgcgtcgatggaaacgacgtgtttgccgtgtacaacgccactaaggaagcacgcaggcgcgctgtagccgagaatcagccctttctgatagaagctatgacctaccgcattggccatcactccacgtccgatgactcgtcggcataccgctcggtggacgaagtgaactactgggataagcaggatcacccgatcagccggctccggcattacctgctgtcgcaagggtggtgggacgaagaacaggaaaaagcctggcgcaagcagagcagacgcaaggttatggaagcgttcgagcaggcggagcgaaagcctaagccgaacccgaatctgttgttcagcgacgtctaccaagagatgcctgcccagcttagaaaacaacaggaatccctggccagacatctgcaaacctacggcgagcactaccctctggaccacttcgacaag

SEQ ID NO: 249542 - DNA, 1335 bp, synthetic construct
  misc_feature 1..1335: note = Description of Artificial Sequence: Synthetic coding sequence
  source 1..1335: mol_type = other DNA
atggcggtcgccatagccgcagctagagtatggcgattaaacagaggcctctctcaggccgcattgctgttactacgacagcccggggctcgtggcctggcccggtcgcatccacctcgacagcagcagcagtttagtagcctagacgataagccccagttccctggagcctccgctgagttcatcgataaactcgaattcatccaaccaaatgtcataagtgggatccccatttacagggtcatggacaggcagggccaaattatcaatccctccgaggacccccatctacctaaagagaaagttctgaaactctataagtccatgacacttctgaacaccatggaccgaatcttgtacgagagccaaagacaggggcgcatcagcttctatatgacaaattatggagaggagggcacccatgtgggttctgcagctgccctcgataacaccgacctggtttttggacagtatagggaagctggggtcctaatgtatagagactacccactggagttgtttatggcacagtgctacggtaatatctctgacctgggcaagggaaggcagatgccggtgcattacggatgtaaagagaggcacttcgtgaccatttcttcccccctcgcgacgcagattccacaagccgtgggggcagcatatgccgcaaagcgtgctaacgctaaccgagtggtaatctgctactttggagagggggccgcctccgaaggcgacgcacacgcaggctttaacttcgccgccaccctggaatgcccaatcatctttttctgtcgcaacaacgggtacgccatcagcactccgacatccgagcagtataggggagatggcattgcagcgcgagggccgggatatggcatcatgtctatcagggtggacggtaacgacgtgttcgcagtttataacgctacgaaagaagcccgacgccgagctgtggccgaaaaccaacccttccttatcgaagccatgacatacaggataggacaccactctacctcggacgacagtagcgcttatagatcggtcgatgaagttaattactgggataaacaggaccacccaatttcacgattacgacattacctgttgagccaggggtggtgggatgaggaacaggagaaagcttggcgaaaacaaagcaggaggaaggtgatggaggccttcgagcaggcggagcgtaaacctaaacccaaccccaaccttttgtttagtgatgtataccaggagatgccagcccagctgagaaagcaacaggaaagcctggctagacatctgcaaacttacggtgagcactacccgctggaccacttcgacaaa

SEQ ID NO: 249543 - DNA, 1335 bp, synthetic construct; identical to SEQ ID NO: 249538
  misc_feature 1..1335: note = Description of Artificial Sequence: Synthetic coding sequence
  source 1..1335: mol_type = other DNA

SEQ ID NO: 249544 - DNA, 1335 bp, synthetic construct
  misc_feature 1..1335: note = Description of Artificial Sequence: Synthetic coding sequence
  source 1..1335: mol_type = other DNA
atggcagtggccatcgcagcggccagagtttggaggctgaatcgagggctgtcccaggcggccctgcttctactgaggcagccaggcgcaagaggactcgcaaggtctcacccccccagacagcagcagcagtttagctcgctagacgacaaaccacagttccccggggcttccgccgaatttatcgacaagttagaattcattcagcctaatgtgatctccggcatcccgatatatagggtgatggataggcaagggcagatcattaaccctagcgaggacccccatctccctaaggaaaaggtgcttaaattatacaagtctatgaccctactgaacacaatggaccggatcctatacgaatctcagagacagggacgcatctctttttatatgactaactatggtgaggagggtacccacgttggcagtgccgcagctttagataacaccgatctggtgtttggccagtaccgggaggccggggtgctgatgtatcgcgactatcctttagagctcttcatggcgcagtgctacggaaatatttccgatcttgggaaaggccggcagatgcccgttcactatggctgcaaggaaagacatttcgtcactattagttctcctcttgccacacaaattcctcaagctgttggtgctgcatacgccgctaagcgggccaatgccaaccgggtagtgatctgctactttggggagggagcagcatccgaaggtgatgctcacgccggcttcaatttcgcagccacacttgaatgcccaataatcttcttttgcaggaataacggttatgcgatttctaccccaacttccgaacaatatcgtggagacgggatagccgctcgagggcccggctacggcataatgtccataagagtcgacggtaacgatgtgtttgcggtgtataatgctactaaggaagctaggaggcgggccgtggccgaaaatcagccgtttctgatagaagcgatgacttacagaattggacaccactctacttccgatgacagctccgcatataggtctgtggacgaagtcaactattgggataagcaggatcatccgatatcacggctgagacattacctgctttcgcagggatggtgggatgaggagcaggaaaaggcgtggcggaaacagtccaggcggaaggttatggaggccttcgagcaggctgaacggaagcctaaacctaatcctaacctcctgttttctgacgtataccaggagatgcctgcgcagctgcggaaacaacaggagtctctggcacgacacctccagacgtatggggaacattatcctctggatcatttcgataaa

SEQ ID NO: 249545 - DNA, 1335 bp, synthetic construct
  misc_feature 1..1335: note = Description of Artificial Sequence: Synthetic coding sequence
  source 1..1335: mol_type = other DNA
atggcagtggctattgcagcagccagagtctggcgtctcaatcggggactctcccaggcggcacttctccttctgcgtcaaccaggtgcgcgaggccttgcacgttcgcacccacctaggcaacaacaacagttttcctcgctggacgataaaccccaattccctggcgcatccgctgagttcattgataagctggagttcatccaacctaacgtcattagcggtatccctatttacagagtcatggatcgtcaaggacagattatcaacccgagcgaggatcctcaccttccaaaggaaaaggtactcaagctctacaagtcgatgacgctgttgaataccatggataggatcctttacgagagccaacgccagggacggatctcgttctacatgaccaactacggggaagaaggtactcatgtcggatcggcagccgcccttgataataccgacctcgtgtttggccagtacagagaggcaggcgtgctgatgtacagggactacccacttgaactgttcatggcacagtgctatggaaatatcagcgatcttggaaaaggtcgccagatgccagtccactacggatgtaaagaaaggcattttgtgaccatcagctccccactggcaactcagataccccaggccgtgggagcagcatatgcagctaagagagcaaacgctaatagagtggtgatctgttactttggagaaggagcagcatccgagggtgatgcacatgccggattcaatttcgccgcaacccttgaatgtcctattatcttcttctgcaggaataatggttacgccatttcaacccctacgtccgagcaataccgaggtgacggaattgcagcacgaggccctggctacggaattatgagcatccgcgtggatggcaacgacgtgtttgcagtctacaatgccactaaagaagcgcggcggagagcagtggcagaaaatcaaccttttcttatagaggcaatgacttaccgaataggtcaccattcaacctcggacgatagctcagcgtacagatcggtggacgaagtgaactactgggataagcaagaccatcccatctcaaggctgcgccattacctcctgagccagggatggtgggatgaagaacaagagaaggcgtggcgtaagcaatcgcgacgaaaggtaatggaagcctttgaacaggctgagagaaagcccaagccaaacccaaatcttctgttttccgacgtgtatcaggaaatgccagctcaattgcggaagcaacaagaaagccttgcacgccatctccagacttacggggagcattaccctctggatcactttgataag

SEQ ID NO: 249546 - DNA, 1335 bp, synthetic construct
  misc_feature 1..1335: note = Description of Artificial Sequence: Synthetic coding sequence
  source 1..1335: mol_type = other DNA
atggccgtggcaatcgcagcagcgcgggtgtggagacttaaccgcggcctttcacaagcagctcttcttctgttgagacaacccggcgcaaggggtcttgcaaggagccatccaccaagacaacagcaacaattctcatcgctggatgataagcctcagttccctggagcgtcagcagagtttattgacaagctcgagtttatccaaccaaacgtgataagcggaattccaatttaccgggtgatggatcgccagggacaaatcatcaacccatcagaggatccacaccttccaaaggaaaaggtgctgaagctgtacaagtccatgactctgcttaataccatggacagaatcctctacgaatcgcagagacagggaaggattagcttttacatgactaactacggagaagaaggaacccatgtaggaagcgctgcagcactggataataccgatttggtgttcgggcaatacagggaggctggggtgctcatgtacagggactatcctctggaactgtttatggcacagtgttatggcaacatcagcgacctggggaagggacggcaaatgccggtgcattatggatgtaaagaaagacatttcgtcaccatcagcagccccctggcaactcaaattccacaggccgtcggagccgcctacgccgcaaagagagctaacgccaacagagtggtcatctgctacttcggagaaggggccgcaagcgagggagatgcccatgcaggatttaacttcgctgcaacccttgaatgtccaatcattttcttttgccgaaacaatgggtacgctatttccacccctacttctgaacagtaccgcggcgatggtatagcagcaaggggccctggatacggaattatgtccattagagtggacggaaacgatgtctttgccgtgtacaatgcaaccaaggaagcgcgcagacgggcagtggccgaaaaccaaccttttctgatcgaggccatgacttaccggattggtcatcattcaacttcggacgactcgtcggcatacaggtcggtcgacgaagtgaactactgggataagcaggatcatccaatttcaagactgcgacattacctgctgtcccagggctggtgggatgaagagcaagaaaaggcatggcggaaacaaagccgacgtaaggtcatggaggcatttgaacaggccgagagaaagcccaagcccaacccaaatcttctttttagcgatgtctatcaagaaatgcccgcacaacttagaaaacagcaggaatcgctcgcaagacatctgcagacctacggtgagcactacccgctggatcatttcgacaag

SEQ ID NO: 249547 - DNA, 1335 bp, synthetic construct
  misc_feature 1..1335: note = Description of Artificial Sequence: Synthetic coding sequence
  source 1..1335: mol_type = other DNA
atggctgtggcaattgctgctgctagagtttggagattaaatagaggtttatcacaagctgctcttttattgttgagacaaccaggagcaagaggacttgcaagatctcatccaccacgacaacaacaacaattctcatctcttgatgacaaaccacaatttcctggagcttcagctgaattcattgacaaattagaattcatacaacctaatgttattagtggaattccaatttatagagttatggatagacaaggtcaaattattaatccaagtgaagatccacatttaccaaaagaaaaggttttaaagctttataaatcaatgacattattaaatacaatggatcgtattttatatgaaagtcaaagacaagggagaatatcattttatatgactaattatggagaagaaggtacacatgttggatcagcagcagcacttgataatacagatttagtttttggacaatatagagaagctggagttcttatgtatcgtgattatccattagaactattcatggctcaatgttatggaaatattagtgatttaggaaagggaagacaaatgccagttcattatggatgtaaagaaagacatttcgtaacaatatcatctccacttgctacacaaatacctcaagcagttggagcagcatatgctgcaaaaagagctaatgcaaacagagttgttatttgttattttggagaaggagccgcttctgaaggagatgcacatgcaggttttaattttgccgcaactttagaatgtccaattatttttttttgtagaaataatggatatgcaataagtacaccaacaagtgaacaatatagaggggacggtattgctgcaagaggtccaggatatggaattatgtctattagagttgatggaaatgatgtattcgctgtttataatgcaactaaagaagcaagaagaagagcagttgcagaaaatcaaccatttcttattgaagctatgacctatagaattggacatcatagtactagtgatgattctagtgcttatcgatctgttgatgaagtaaactattgggataaacaagatcatccaattagtcgattaagacattatcttttgtcacaaggttggtgggatgaagaacaagaaaaggcatggagaaaacaatcacgtagaaaagttatggaagctttcgaacaagcagaacgaaaacctaaaccaaatccaaatttactctttagtgatgtatatcaagaaatgccagctcaattaagaaaacaacaagaatcacttgctagacatcttcaaacatatggagaacattatccattagatcattttgacaag

SEQ ID NO: 249548 - DNA, 1335 bp, synthetic construct
  misc_feature 1..1335: note = Description of Artificial Sequence: Synthetic coding sequence
  source 1..1335: mol_type = other DNA
atggccgtggctatcgcagcagccagagtctggaggctgaataggggactctcgcaggccgctctgctgctgctccggcaacctggcgcccgcggtttggcacgatcccacccgccacgccagcaacagcaattcagctcactcgacgacaaaccacagtttcctggcgcctccgccgagtttattgataagctggaatttatccaacctaacgtgatcagcggaatccctatctatagggtcatggatcgccagggacagataatcaacccgtctgaggacccccatctgccaaaggagaaagtgttgaaactgtacaagtcgatgacgctcctcaataccatggaccggattctgtacgagtcacagcgccaggggaggatctccttctacatgactaattacggagaagaggggacccatgttggctccgcagctgctctggataacactgacctggtgttcggacagtaccgggaggccggagtcctcatgtaccgcgattatccacttgaactgttcatggcccagtgctacggcaatatctccgaccttggaaagggccgccaaatgcccgtgcactacggatgtaaggagagacacttcgtcaccatctcctcacctcttgccacccaaatcccgcaggctgtcggcgctgcctacgctgccaagcgggctaatgccaaccgcgtggtcatctgctacttcggtgagggtgcggcctctgaaggagacgcacacgcgggattcaattttgcagcaaccctcgaatgcccgatcatcttcttctgccgtaacaacgggtacgctatttcgaccccgacttctgagcagtacagaggagatggaatcgccgccagagggccaggctacggcatcatgtccattagagtggatgggaacgacgtattcgccgtgtacaatgcgactaaagaagcgcggcgacgcgcggtggcagaaaaccagccgttccttatcgaggctatgacctacagaataggacaccacagcaccagcgacgactcgtcagcgtacaggtctgttgacgaagtcaactactgggacaagcaggaccatccgatctctcggctgcgccactacctgctctcacagggatggtgggacgaggagcaagaaaaggcctggcggaaacagtcgaggcgcaaggtcatggaggccttcgaacaggccgagcgcaagccgaagccaaatccaaacctgctgttcagcgatgtgtatcaagagatgccggcccagctgagaaaacaacaagagtcgctcgcgcggcacctccagacgtacggagagcattacccccttgaccacttcgataag

SEQ ID NO: 249549 - DNA, 1335 bp, synthetic construct
  misc_feature 1..1335: note = Description of Artificial Sequence: Synthetic coding sequence
  source 1..1335: mol_type = other DNA
atggcagtggcaattgccgccgctagggtctggagactgaacaggggcttgtcacaggccgcccttctgctcctgcggcagccaggtgcacgggggctggcacgctcccatccgcctagacaacaacaacaattctcgtccctcgatgataagccacaatttccgggagcatcggcggagtttatcgataagttggaattcatccagcccaatgttatttcgggaattccaatataccgtgtgatggacaggcaggggcaaatcattaatccttcggaggacccgcatctgcctaaggaaaaggtgcttaaactttacaagtccatgactctcctgaatacgatggatagaattttgtacgagtctcaaagacaaggaaggatatcgttttacatgactaactacggagaggaaggaacccacgtgggaagcgccgcagcactggacaacaccgatcttgtgtttggacagtacagagaggcaggagtgctgatgtaccgagactatcccctggaactcttcatggcgcagtgctacggaaacatctccgatcttgggaagggccgccaaatgccagtgcactacggctgtaaggagcgacattttgtcactatctcatcaccgctggcaacccaaattcctcaagcggttggcgcagcttacgctgcaaaacgcgcgaacgctaacagggtggtgatttgttacttcggagagggggcggcctccgaaggagatgcccatgcaggtttcaatttcgcagccactcttgagtgcccaatcatctttttctgccgcaataacggttacgcaatttccacccccacctcggagcaataccgtggtgacggaattgcagccaggggacctgggtacggaattatgtcaattcgggtggatggtaacgatgttttcgcagtgtacaacgccaccaaggaagcaagacggcgggcagtggcagaaaatcaaccatttctgatcgaggcaatgacttatcgaatcggacatcatagcacgagcgatgattcctccgcgtacagaagcgttgatgaagtgaactactgggacaagcaagatcacccgatctcaagactgagacattacttgctgagccagggttggtgggacgaggaacaggagaaggcttggcgtaagcaatcccgacgtaaggtgatggaagcattcgagcaggccgagcgaaaacctaagcctaatccaaacctgctgttttcggatgtctaccaggaaatgcctgcccagcttagaaagcagcaagaatcacttgcgagacacttgcagacctacggagaacattatccccttgaccatttcgacaaa

SEQ ID NO: 249550 - DNA, 1335 bp, synthetic construct
  misc_feature 1..1335: note = Description of Artificial Sequence: Synthetic coding sequence
  source 1..1335: mol_type = other DNA
atggccgtggcaatcgcggccgcaagggtgtggagactgaataggggtctgagccaggctgccctgctgctgttgagacagccaggagcacgcggcctggcccggtcacaccccccaagacaacaacaacagttctcgtcgcttgacgataaaccgcagttcccaggagccagcgcggaattcatcgacaaattggagttcatccagccgaacgtgatctcgggaatccctatctaccgcgttatggacaggcaaggccagatcatcaatccgtcggaggacccgcatttgccgaaggagaaagtgctcaaattgtacaagagcatgaccctcctcaacactatggaccggattctctatgaaagccaacggcaaggacgtatctccttctacatgaccaattacggagaggaagggacgcacgtggggtcggctgcggccctcgataataccgacctcgtctttggccagtaccgcgaggctggagtgctcatgtaccgcgattaccctctggagctgttcatggcgcaatgttacgggaacatctctgatcttggtaagggacgacaaatgccagtgcactacggatgcaaggaaagacacttcgtcacgatttcctcccccctggccacccagatccctcaggcggtgggggcggcctacgcggctaagcgggcaaacgcaaatagagtggtcatttgctactttggagagggagccgcctctgaaggggacgcgcatgccggctttaatttcgctgctactctcgagtgccctatcattttcttctgccgcaacaacggatacgctatctcaactccgaccagcgaacaataccgcggcgacggaatcgccgcacggggaccaggatacggtattatgtcgatcagggttgatggtaatgacgtgttcgcagtgtacaacgccaccaaggaggctcgccgccgcgccgtggcggagaaccagccgtttctgatcgaagcaatgacctaccggatcggccatcacagcacttcagatgactcatccgcctatagatccgtggacgaggtcaactactgggataagcaggatcaccccatctcgcgactgcggcattacctgctgtcccagggctggtgggacgaagagcaggaaaaagcctggcggaagcagtcccgccggaaggtcatggaagcattcgaacaggcggaaagaaaaccaaagccgaacccgaacctgctgttctcggacgtctaccaggaaatgcctgcccaactccgcaagcagcaagaatcacttgcccggcacctgcagacttatggagaacactacccgctggaccattttgataag

SEQ ID NO: 249551 - DNA, 1335 bp, synthetic construct
  misc_feature 1..1335: note = Description of Artificial Sequence: Synthetic coding sequence
  source 1..1335: mol_type = other DNA
atggctgtcgcgattgctgctgcccgagtgtggcgcctcaaccgcgggttgtcccaggctgcgttgctgctgctccgccagcccggagcccggggtcttgctcgtagccatcctcctcgccagcagcagcagttcagtagtctggacgataagcctcaattccccggcgccagtgccgagttcatagataagctggagtttatccagcccaacgtcatcagcggcatccctatttaccgtgtcatggaccgccaaggtcagattattaacccttctgaggacccgcacctccctaaggagaaggttctgaagctctacaagtccatgaccctgcttaacactatggaccgcattctctacgagagtcaacgtcaggggcgcatctcgttctacatgaccaattacggcgaggaaggaactcacgtcgggtctgccgctgctcttgataacacggacctagtcttcggtcagtaccgggaagccggcgtgctgatgtaccgcgactaccctttggagctctttatggctcaatgctacggcaacatttctgacttgggaaagggccgtcagatgcccgtccattacggctgtaaagagcgccatttcgttactatttcttcgcctctggcgacccaaattcctcaggctgttggtgcggcctacgctgctaagcgcgctaacgctaatcgcgttgttatctgctacttcggcgaaggcgcagcttctgaaggtgatgctcacgcaggcttcaatttcgccgcaaccttggaatgccccatcatttttttctgtcggaataatggttacgccatctcgacaccgacgtctgagcagtaccgtggcgacggtatcgccgcccgcggcccgggctatggcatcatgtccatccgtgtcgacggcaacgacgttttcgctgtctacaacgcaactaaggaggctcgccgtcgcgccgtcgccgagaatcagccctttctcatcgaggctatgacctaccgcattggccaccactctacctccgacgatagttcggcttacaggagcgtcgacgaggtgaattattgggataagcaggaccacccgatcagccgactccgccactaccttttgtcgcagggatggtgggacgaagagcaggagaaggcctggcgcaagcaaagtaggcggaaagtgatggaggcctttgagcaggccgaacgtaagcctaagccaaatccgaacttgcttttctctgatgtttaccaggagatgcccgcgcagttgcgcaagcagcaggaaagcctcgcccggcacttgcagacttacggcgagcactacccgctcgatcacttcgacaag

SEQ ID NO: 249552 - DNA, 1335 bp, synthetic construct
  misc_feature 1..1335: note = Description of Artificial Sequence: Synthetic coding sequence
  source 1..1335: mol_type = other DNA
atggctgtcgctatcgcagccgctcgggtgtggaggctcaacagaggcttaagccaagccgccttgcttctgctccgccagcctggtgctaggggcctcgctagaagccacccaccacgccagcaacaacaattctcctctctggatgataagcctcagtttccaggggccagtgctgaatttatcgataagctggagttcattcagccaaacgtgatctctggcatccccatctaccgggtgatggatagacagggccaaatcatcaacccatcagaggatcctcatctgcccaaggagaaggtactgaaactgtataagagtatgaccctgctgaacactatggaccgaatactgtatgaatctcaaagacaagggcggatctctttttacatgacgaactacggggaggaaggaacacacgtgggcagcgctgcagctttggataacaccgatctcgtcttcggccagtatagagaagcaggagtattaatgtacagggattatcccctggagctgttcatggctcagtgctatgggaacatcagcgatttaggtaagggtagacagatgccagtgcattatggatgtaaggaaaggcattttgtcactatctcgtctccgctggctacacagatcccacaggctgtaggtgctgcgtatgctgcaaagcgcgcaaacgcaaacagggttgtcatctgctattttggagagggtgctgcttccgaaggcgacgcccatgccgggtttaatttcgctgcaactttggagtgcccaattatttttttttgtagaaacaatggctacgccatttctacccccacttctgagcagtatcgaggggatggcattgccgccagggggccaggctacggaataatgagcatacgcgtcgatggtaacgacgtgttcgcggtctacaacgcgaccaaggaggcgcggcgtagagccgtggctgagaaccagccttttctgatcgaagctatgacatacagaatcggtcaccatagcactagcgatgattccagcgcctatagatccgtggacgaggtgaattattgggataagcaggatcaccccattagcaggctgcgccattatttgctcagccaaggttggtgggatgaagagcaggaaaaggcctggaggaaacagtctaggcggaaggtgatggaagccttcgaacaagcagaacgcaaacctaagcccaacccaaaccttctatttagcgatgtctaccaggagatgccagctcagcttcggaaacagcaggaaagtctcgccaggcacctccaaacttatggtgaacattaccccctggaccattttgataag

SEQ ID NO: 249553 - DNA, 1335 bp, synthetic construct
  misc_feature 1..1335: note = Description of Artificial Sequence: Synthetic coding sequence
  source 1..1335: mol_type = other DNA
atggccgtggccatcgctgcagcgcgggtgtggaggctgaaccgaggcctgtcccaggctgcattgctgttgctgagacagccaggtgccagggggctcgccaggtcccatccaccccgccaacaacagcagttcagttcactggacgataaaccccagttccccggcgcctcagcagaattcattgataagcttgagtttattcaaccaaatgtgatctccgggatccccatatatcgagtaatggatagacagggccagataatcaaccccagcgaagacccccatctgcccaaggagaaagtgctcaagctgtacaagtctatgaccctgctgaacacaatggatcgaatcctgtacgagtctcagagacaggggcggattagtttctacatgactaattacggagaggagggcacgcacgtaggctctgccgcggctctggataatactgacctcgtgttcggccagtatcgagaggccggggtcctgatgtaccgagattacccactggaactgtttatggcacagtgctatggcaacatttctgatctgggaaagggtcggcagatgcctgtgcactacggctgtaaggagcgccattttgtgaccatcagcagtcccctggccactcagattcctcaggcagtcggggcggcttacgctgcgaagagggcgaatgctaatagagtggtcatctgttatttcggcgaaggagccgcaagcgagggggacgcccacgccggcttcaatttcgccgctacattggaatgcccaattatctttttttgcagaaataacggttatgcgatatctactccaaccagcgaacagtatagaggcgacggcatagctgcacgcggtcctggctacgggatcatgtccatcagggtggacgggaatgacgtgtttgccgtgtacaatgctacaaaagaagcgcggagacgggccgtggcggagaaccaaccattcctgatcgaggccatgacttacaggataggacaccattctacctctgacgacagcagtgcttataggagtgtcgatgaagtcaactactgggacaagcaagatcatccaatttctcgcctgcgccattacctgctcagtcagggttggtgggacgaggaacaagagaaggcctggagaaaacagagccgccgaaaggtgatggaggcttttgagcaggccgaacggaagccgaagccaaatcccaacctcctgttctccgatgtatatcaggagatgcccgcccagttgaggaagcaacaggagagcctggctcggcatcttcaaacctatggggagcattatcccctggaccacttcgacaaa

SEQ ID NO: 249554 - DNA, 1335 bp, synthetic construct
  misc_feature 1..1335: note = Description of Artificial Sequence: Synthetic coding sequence
  source 1..1335: mol_type = other DNA
atggcggtggctatagctgccgccagagtttggaggcttaaccgcggattgagtcaggcagcactcttgctgttacgacagccaggcgctaggggcctggccagaagccaccctcctaggcagcaacaacagttttccagccttgatgacaagccacagttccctggagcctcggctgagttcattgacaaattggaatttatacagcctaatgtcatctctgggatcccaatctatcgagtgatggaccgtcagggacaaatcatcaacccaagcgaggacccacacttaccaaaggagaaggtgctgaagctctataagtcaatgaccttgctgaatacaatggaccgcatcctctacgagtctcagaggcagggccggatctcattctatatgacaaactatggagaggaaggaacccatgtggggagcgcagcagctttggacaacaccgacctggtattcggtcagtacagggaggccggagtccttatgtatcgagattatccccttgaattgtttatggcccagtgctacggaaacatctctgacctcggcaaaggcagacaaatgccagtccactacggctgtaaagagaggcactttgtgacaatttccagccctctggcgactcagattccacaggctgttggcgcggcttatgcagcaaagcgagcgaacgctaacagagttgtcatttgctatttcggagaaggagctgcatcagaaggcgacgcacacgccggattcaatttcgctgctaccctcgaatgccccatcatttttttctgtaggaataacggctatgccatctccactccaacaagcgagcagtaccgtggagatgggatcgctgcacgcggccctggctatggcatcatgtcaattagagtggatggtaacgacgtgtttgcagtttacaatgcaaccaaagaggcccgccgaagggctgtcgctgaaaaccaaccattcctgatagaagctatgacttatagaattgggcatcactccaccagtgatgacagcagcgcttacagaagcgttgatgaggtgaactattgggacaagcaagatcatccaatcagccggctgaggcattacttgctcagccaaggctggtgggatgaggaacaagaaaaagcatggcgaaaacagagtcgaagaaaggtcatggaggcattcgaacaggctgaacgtaagccaaaaccaaacccaaatctgctgtttagcgacgtgtatcaggaaatgcccgcacagcttaggaaacagcaggagtccctcgcccgccatcttcaaacctacggagagcattaccctcttgatcatttcgataag

SEQ ID NO: 249555 - DNA, 1335 bp, synthetic construct
  misc_feature 1..1335: note = Description of Artificial Sequence: Synthetic coding sequence
  source 1..1335: mol_type = other DNA
atggccgtggcaatcgccgccgctcgcgtctggagattgaatagaggactgagccaagcagcactcctgctgctgcggcagccgggtgcaaggggactggcacgaagccacccgccacgccagcaacaacaattctcgtcactggacgacaagccgcagttcccaggggctagcgcggagttcatcgacaagctggaattcatccagccaaatgtcatctcgggaataccgatctaccgggtgatggaccggcagggacagattatcaacccgtcagaggacccccacctgccaaaggagaaggttctgaaactgtacaagtccatgactctgctgaacaccatggatcggatcctttacgagtcgcaaagacagggccgcatatccttctacatgactaactatggagaagaaggaactcatgtcgggtcggctgcggcgctcgataatacggacctcgtttttggacagtaccgggaagcgggcgtgctgatgtacagagactacccactggaactgttcatggcccagtgctacggcaacatcagcgatctcggaaaaggccggcagatgccagtccattacggatgcaaggaacgacatttcgtcactatttcgtcacccctcgccacgcagatcccgcaagcggtgggggcagcctacgcggccaagagagcaaatgcaaaccgcgttgtcatttgctacttcggcgaaggggcggcctctgagggagacgcccacgctgggtttaacttcgcagcaactctggaatgtcccatcatcttcttttgcagaaacaatgggtacgctatctcgaccccgacctcagagcaataccggggagacggaatcgccgcgcgcgggcccggatacggtatcatgtccatcagggtggacggcaatgatgtgtttgctgtctacaatgccactaaagaagcccggcgcagggcggttgcggaaaaccagcctttcttgatcgaggcgatgacttacaggatcggacaccacagcacctcagacgatagctcagcctatcgttccgtggacgaggtcaactattgggacaaacaggaccacccgatctcgcggttgcgacactaccttctctcacagggatggtgggacgaagaacaggaaaaggcatggcgcaagcaatcgagacggaaggtcatggaggctttcgagcaggcggaaaggaagccgaagccgaaccccaacctcttgttctcagatgtctaccaggagatgccagcccagctgcggaaacagcaagagtcccttgcgcgccatctccaaacttacggggagcactatcctttggatcatttcgataaa

SEQ ID NO: 249556 - DNA, 1335 bp, synthetic construct
  misc_feature 1..1335: note = Description of Artificial Sequence: Synthetic coding sequence
  source 1..1335: mol_type = other DNA
atggcggttgcgatagcggcggcgcgagtatggcgtttaaatcgtggtctatcgcaagcggcgttactactactacgacaaccgggtgcgcgtggtttagcgcgatcgcatccgccgcgtcaacaacaacaattttcgtcgttagatgataaaccgcaatttccgggtgcgtcggcggaatttatagataaattagaatttatacaaccgaatgtaatatcgggtataccgatatatcgagtaatggatcgacaaggtcaaataataaatccgtcggaagatccgcatttaccgaaagaaaaagtattaaaactatataaatcgatgacgctactaaatacgatggatcgtatactatatgaatcgcaacgtcaaggtcgtatatcgttttatatgacgaattatggtgaagaaggtacgcatgtaggttcggcggcggcgttagataatacggatctagtttttggtcaatatcgagaagcgggtgttttaatgtatcgtgattatccgctagaattatttatggcgcaatgttatggtaatatatcggatctaggtaaaggtcgacaaatgccggttcattatggttgtaaagaacgacattttgttacgatatcgtcgccgctagcgacgcaaataccgcaagcggtaggtgcggcgtatgcggcgaaacgtgcgaatgcgaatcgagttgtaatatgttattttggtgaaggtgcggcgtcggaaggtgatgcgcatgcgggttttaattttgcggcgacgctagaatgtccgataatatttttttgtcgaaataatggttatgcgatatcgacgccgacgtcggaacaatatcgtggtgatggtatagcggcgcgtggtccgggttatggtataatgtcgatacgtgttgatggtaatgatgtttttgcggtttataatgcgacgaaagaagcgcgtcgtcgagcggttgcggaaaatcaaccgtttttaatagaagcgatgacgtatcgaataggtcatcattcgacgtcggatgattcgtcggcgtatcgttcggttgatgaagtaaattattgggataaacaagatcatccgatatcgcgtttacgtcattatttattatcgcaaggttggtgggatgaagaacaagaaaaagcgtggcgtaaacaatcgcgacgaaaagtaatggaagcgtttgaacaagcggaacgaaaaccgaaaccgaatccgaatttattattttcggatgtatatcaagaaatgccggcgcaattacgaaaacaacaagaatcgctagcgcgacatctacaaacgtatggtgaacattatccgctagatcattttgataaa

SEQ ID NO: 249557 - DNA, 1335 bp, synthetic construct
  misc_feature 1..1335: note = Description of Artificial Sequence: Synthetic coding sequence
  source 1..1335: mol_type = other DNA
atggcggtggccatcgcggccgcaagagtctggaggctgaaccggggcctgagccaagccgcactcctgctgttgcgccagcccggtgctcgaggacttgcgcggtcgcaccctccccgtcagcaacaacaattttcctcccttgacgataagccacagtttcctggggcatccgccgagttcatcgataaactggaattcatccaaccaaatgtgatttcgggtatccctatttaccgggtaatggacagacagggccaaatcattaaccctagcgaggatccgcatttgccaaaggagaaggtcctcaagctgtacaaatccatgactctcctcaacactatggatcgcatcctgtacgagagccaaaggcagggacgtattagcttctacatgactaattacggcgaagaaggaactcatgttggtagcgcagcagcccttgataatacggaccttgtctttggacagtatagagaagcaggcgtgttgatgtaccgggactaccctctggaactctttatggctcaatgttacgggaacatctctgatcttggaaaaggacggcaaatgccagtgcactacggttgtaaggaacgtcattttgtcaccattagctccccactcgcaacccaaatacctcaagccgtgggagcagcgtacgcagcgaaacgggcaaatgcaaatcgagtggtgatctgttatttcggagaaggagccgcttcggaaggagacgcacatgcaggatttaactttgcggccaccctggaatgccctatcatattcttctgccggaacaacggttatgcgatatcgacccccacgtctgaacaataccggggtgacggaattgccgcacggggaccaggctacggtataatgtccattcgtgtggatggcaacgacgtctttgcagtgtacaatgcaacgaaggaagctcgtcgccgggcagtggccgagaaccaaccatttcttattgaggccatgacctacagaattggccatcattccacttcagatgatagctcagcataccgtagcgtggacgaggtgaattactgggataagcaagatcacccaatctcgcggcttaggcactacctgctgtcgcagggttggtgggacgaagaacaagaaaaggcatggcggaagcaatctcgaagaaaagtcatggaagcatttgagcaggctgaacgaaaacccaagcctaacccaaaccttctttttagcgacgtgtaccaagaaatgcctgcacaacttcgcaaacaacaggaaagcctcgccagacacttgcagacctatggggagcattatccacttgatcatttcgataag

SEQ ID NO: 249558 - DNA, 1335 bp, synthetic construct
  misc_feature 1..1335: note = Description of Artificial Sequence: Synthetic coding sequence
  source 1..1335: mol_type = other DNA
atggcggttgccatagcggccgcaagggtctggagactgaacagaggtctgagccaagcggccctgctcctgctgaggcagccgggagccagagggcttgcccgatcgcacccacctaggcagcagcaacaattcagctccttggacgataagccccaattcccgggtgcaagtgcggaattcatagacaaactggagttcatccaacccaatgtcatctcggggattccgatctaccgagtgatggatcggcagggccagattatcaacccctcggaagatccccaccttccgaaggaaaaagtgttgaagctgtacaagtcgatgaccttgcttaacacgatggacagaatcctgtatgagtcgcagcggcaaggcagaatctcattttacatgacgaattacggagaagagggaacccacgtgggatccgccgcagcacttgataacactgacctcgtgttcggacaataccgggaagctggagtgctgatgtaccgcgactacccgttggagctgttcatggctcagtgctacgggaatatctcagatctggggaagggccgccagatgccagtgcattacggttgtaaggagagacacttcgttacgatctcgtccccgctggccactcagatcccacaggcggtgggagccgcctatgcggcgaaacgcgccaatgctaaccgggtcgtcatttgctattttggcgaaggagccgcatcggagggagacgcacatgccggattcaatttcgctgccaccctggagtgcccgatcatcttcttctgccggaacaacgggtacgcgatcagtactcctacctcggaacaataccgcggagacggaatcgccgcccggggcccaggttacggcatcatgtcaattcgggtggacggcaatgacgtgttcgccgtgtataacgccactaaggaagcaaggaggcgggcagtggccgaaaaccagcccttcctcatcgaagccatgacttaccggatcggacatcattcaacctcagatgatagctccgcctaccgctcggtcgatgaagtcaactattgggacaagcaggaccacccaatttcacgcctccgacactacctgctcagccagggctggtgggacgaggagcaagagaaggcctggcgcaagcagtccaggcgcaaggtgatggaggcatttgaacaggcagaacgcaaaccgaagccaaacccaaatctcctcttttcagacgtgtaccaggaaatgcccgcgcagcttcgcaaacagcaggaatcactcgcacggcacctccaaacttacggggagcactacccactggaccatttcgacaag

SEQ ID NO: 249559 - DNA, 1335 bp, synthetic construct
  misc_feature 1..1335: note = Description of Artificial Sequence: Synthetic coding sequence
  source 1..1335: mol_type = other DNA
atggctgtggcaattgctgcagcacgtgtctggcgtttgaatcgggggttatcgcaagctgccttgttgctccttcgacagcctggagctagaggccttgccagatcccacccgccacgacaacaacaacaattttcgtccctggatgataaacctcaattcccaggagcttctgccgagttcatcgacaagcttgagttcattcaaccaaatgtaatctctggcataccaatttatcgagttatggatcgtcaaggacaaattattaatccatctgaagacccacatcttcctaaagagaaggttttgaagctttataaatctatgaccctgttgaacaccatggatagaatactctacgaatcccagaggcagggtagaatcagtttctatatgacgaactatggagaggaaggtacgcacgtgggaagtgcagctgcgttggataacacggatctagtctttggccaatatagggaggcgggtgttcttatgtatcgagattatccacttgaactcttcatggcacaatgctatggaaacatctctgatctcggaaaaggaagacaaatgcccgtgcactatggttgcaaagagcgtcatttcgtgactatctcatcgcccttagcaactcagattccacaagctgtaggtgctgcctatgctgcaaagagggcaaatgcaaatagagtggttatctgttattttggagagggcgccgcaagtgagggagatgcccacgcgggcttcaatttcgccgccacactggaatgtcctattatttttttctgtcgtaacaatggttatgctatttcaacgccaacctctgaacaatatagaggcgacggtatagccgcccgcggaccaggttatggaatcatgagcattcgcgtcgatggaaatgatgtttttgctgtttacaatgcaactaaagaagctcgaagacgggctgttgcagaaaatcagccattcctgatcgaagcgatgacatacagaatagggcatcacagtacttctgacgacagttctgcataccgctccgtagatgaggttaactactgggacaaacaggatcatccaatatccagactccgtcactacttgctcagtcaaggatggtgggacgaagagcaagagaaagcgtggaggaaacaatcgcgacgtaaagttatggaagctttcgagcaggctgaacgaaaaccaaagccaaaccctaacctattattctctgatgtttaccaggagatgcctgcacaattgcgaaagcaacaagaaagcttggcacgccaccttcagacgtatggagaacactatccattggatcactttgataag

SEQ ID NO: 249560 - DNA, 1335 bp, synthetic construct
  misc_feature 1..1335: note = Description of Artificial Sequence: Synthetic coding sequence
  source 1..1335: mol_type = other DNA
atggcggtggcaatcgcagccgcaagagtttggcgtctgaacagagggctgagccaagccgcacttctgctgctgaggcagccaggagcacggggtctggcccggtcgcatcccccgcgacagcaacaacagttttcctcactggacgacaagccacaattcccgggtgcctccgcagagttcatagataagctcgagtttatccaaccaaacgtcatttcgggcattcccatttacagagtgatggatcgacaaggacagatcattaacccttccgaagatccacatctgccgaaagaaaaggtgctgaaactttacaagtcgatgaccctgcttaacactatggatcgaattctctacgaatcgcagagacaagggcggatttcgttctatatgaccaattacggtgaagagggcacccacgttggttcagccgcagccctggacaacaccgatcttgtctttggacaatacagagaagcaggagtccttatgtacagagactaccctttggagctgtttatggcacagtgttacggaaacatttcagatctgggaaaaggtcgacagatgccggtgcactacggatgcaaagagcggcattttgtgacgatctcgtcccctctcgccactcagatcccacaggcagtcggggcagcatacgctgccaagcgcgctaacgcgaatcgagtggtcatttgttactttggcgaaggtgcagccagcgaaggggatgcacatgcaggtttcaactttgcggccacccttgagtgccctatcatcttcttttgccgcaacaacggatacgccatttcgactcctacctcggaacaataccggggagatggaatcgcagcgagaggcccagggtacggaattatgtcgattagagtggatggaaacgacgtgtttgccgtctacaatgcgacgaaagaagcccgcagaagagcagtggctgaaaaccaacccttcctgattgaggcgatgacctaccgcatcggacaccattcaacctcggacgacagctcagcttacagaagcgttgatgaagtgaactactgggacaaacaagatcacccaatttcgaggcttagacattacctcctttcacaaggctggtgggatgaagaacaggaaaaggcgtggagaaagcagtcaagacgaaaagtgatggaggcgtttgaacaagcagaaagaaaacccaaacctaatcccaacctgcttttttcagatgtctaccaggaaatgcctgcccaactcagaaagcagcaggagagcttggcaaggcatcttcagacttacggcgagcactacccactggaccactttgacaaa

SEQ ID NO: 249561 - DNA, 1335 bp, synthetic construct
  misc_feature 1..1335: note = Description of Artificial Sequence: Synthetic coding sequence
  source 1..1335: mol_type = other DNA
atggccgtggctattgccgcagctagggtttggcgacttaacaggggactttctcaggcggcactcctcctccttaggcagcccggggcgcgaggactcgcccgatcccaccctccacgacagcaacaacaattctcatccctagatgataaaccccagtttcccggggcctctgctgaatttatcgataagctggaattcatccaaccaaatgtgatctcaggaatccctatctatcgggtaatggatcgtcaggggcagataatcaaccctagtgaagacccccacctgcccaaggaaaaggtgctgaagctatataagtcaatgactctactgaacactatggacaggatcctgtatgaaagccagcgacaagggcgtatctcattttatatgacaaattacggggaagaaggcacccatgttggctcagccgcagcactcgataacacagacctcgtgttcgggcaatacagagaggcaggggtgcttatgtaccgcgattaccccctggagctcttcatggcccagtgttatggcaacatcagtgacctcggaaaagggaggcagatgccagtgcactatggatgtaaggagaggcactttgtgacgatctcatcccccttggccacccagataccacaggcagtgggtgctgcctatgcagctaagcgggcgaacgctaaccgagtggttatctgttattttggcgaaggagctgcctctgagggagatgctcacgccggtttcaacttcgctgccacactcgagtgtcccataatcttcttttgtagaaataacggttatgctatttccacacccactagcgagcagtatagaggggatggcatcgcagcaagaggacccggatacggaataatgagtattagggtggacggcaacgacgtgtttgctgtttacaacgccaccaaagaagcacgaaggagggcggtagctgagaaccaaccctttctgattgaggcgatgacctatcgtatcggccaccattctacaagcgacgacagctccgcctaccgaagtgtggacgaggttaactattgggataagcaggaccaccccatcagtaggctgcgacactatctcttgtcccagggctggtgggatgaagagcaagaaaaagcctggaggaaacagtccagaaggaaagtgatggaggcatttgaacaggccgagagaaaacccaagcccaatccaaacttactgttcagcgatgtctaccaggagatgcccgctcaactgaggaagcagcaagaatctcttgccagacacttgcagacctacggcgaacactaccctctagatcatttcgataaa

SEQ ID NO: 249562 - DNA, 1335 bp, synthetic construct
  misc_feature 1..1335: note = Description of Artificial Sequence: Synthetic coding sequence
  source 1..1335: mol_type = other DNA
atggcagtggcgattgccgccgcacgggtgtggagactgaatcgaggcttgagccaagctgcgttgctgctgctgcgccagcctggcgcccggggtttggcccgttcccatccccccagacagcaacagcagttttcaagtttggacgacaagccacagttcccgggggcttccgccgaatttatagacaagctggaatttatacagccgaacgtgatatctggcattcccatctaccgtgttatggatcgccagggtcagattattaacccatctgaagacccccacctgccgaaagaaaaagttctgaagctgtataagagcatgacgctgttgaatactatggaccgcattctttatgaatcgcaacgtcagggaaggatttccttctacatgactaattacggtgaagagggaacccatgtcgggagcgcagcggcactggacaatacggatctggtgtttggccaatatcgggaggctggcgtccttatgtaccgcgactatccgctagagcttttcatggcccagtgctatggaaacatttcagacctcggcaagggccgccagatgcccgttcattatggttgcaaggagagacactttgtcacgatctccagtccactggccacgcagatcccccaggccgtcggcgccgcttacgcagcgaagcgggccaatgccaacagggttgtgatatgctattttggtgagggcgcagcatcagagggcgacgctcatgctggatttaactttgctgctacattggagtgtcccattatcttcttctgccggaataacgggtacgccataagcacgccgacatccgaacagtacaggggcgacggaatagcagcacgcgggcctgggtatggcattatgtcaatccgagttgatggaaacgacgtattcgccgtgtataatgcaacaaaggaagctcgccgtagagccgtcgctgagaaccagccattcctaatagaggcgatgacttaccgaatcggacatcatagtacgtcagacgactcctcggcctaccgaagcgtggatgaggtgaactactgggacaaacaggaccaccctattagcagacttcgccactatctccttagccagggttggtgggatgaggaacaggaaaaagcctggcggaaacagtcacggcgtaaagttatggaggcctttgagcaggcggagaggaagcctaagcctaacccaaacctcctattcagtgacgtatatcaggagatgcctgcccagcttcggaagcagcaagagagcctggccaggcacctgcagacgtacggggaacattatcctctggatcatttcgacaaa

SEQ ID NO: 249563 - DNA, 1335 bp, synthetic construct
  misc_feature 1..1335: note = Description of Artificial Sequence: Synthetic coding sequence
  source 1..1335: mol_type = other DNA
atggcggtcgcaatcgctgcggcccgggtgtggaggctcaaccgcggcctctcgcaggctgcgctgttgctgctgcgccagccaggagcaaggggactggcgcggagccatccaccgcggcagcaacaacagttttcgagcctcgacgataagcctcaattcccgggcgccagcgccgagttcatcgacaagctggaattcatccagccaaacgtcatctcggggatccctatctacagggtcatggaccggcaaggacagatcatcaacccgtcggaggacccgcacctgccgaaggagaaggtccttaagctgtacaagtccatgactttgcttaacactatggacaggatcctctacgagtcacaaagacagggccgcatctcgttttacatgaccaactacggagaagaaggaactcacgtgggatccgcggcagcgctcgacaataccgatctcgtgtttggacaataccgcgaagctggcgtgctcatgtaccgcgattatcctctcgaattgttcatggcacagtgctacgggaacatctccgatcttggtaaggggagacagatgcctgtgcactacggatgtaaggaacggcactttgtgacgatctcatccccgttggccacgcaaatccctcaggctgtcggcgccgcttacgccgctaagcgggcaaacgccaaccgagtggttatctgctacttcggagagggagcggcaagcgagggagatgcacacgcgggctttaacttcgcggctaccctcgagtgccctatcatcttcttctgccgcaacaatggctacgccatctcaactccgaccagcgaacagtaccgcggagacggtatcgctgcaagaggcccgggctatgggatcatgagcatcagagtggacggaaacgatgtgttcgccgtatacaacgcaacgaaggaggcccgacggagggcagtggcagagaaccagccgttcctgatcgaggccatgacttaccgcatcggccaccattcaacttccgacgacagctcagcctaccggtccgtggacgaggtgaattactgggacaaacaagaccatccaatcagccgcctgcgccattacctgctgtcccaggggtggtgggatgaggaacaggaaaaggcctggcgcaagcaatcgcgccggaaagtgatggaagcatttgaacaagcagagcggaaaccgaagcccaacccgaatctcctgttttctgatgtttaccaagagatgccggctcagctgcgcaagcagcaagaatcgctcgcgcgccatctgcagacttacggcgagcactaccctctggaccacttcgacaag

SEQ ID NO: 249564 - DNA, 1335 bp, synthetic construct
  misc_feature 1..1335: note = Description of Artificial Sequence: Synthetic coding sequence
  source 1..1335: mol_type = other DNA
atggcagtggcaatcgccgccgctagggtttggaggctgaatcggggactaagtcaggcagccctgctgcttcttaggcagccaggggcacgaggtctagcacgcagccacccgcctcgccagcagcagcaattctcaagcctcgatgacaagccccagtttcctggagcctctgccgaattcatcgataagctcgaattcatacagccaaatgtcataagtggtatcccgatctaccgcgtaatggacagacagggacagatcatcaacccttccgaagatccccatcttcccaaagaaaaagtactgaaactctacaagagcatgacgctgctgaacactatggaccgaattctctatgagtcacagcgccaggggagaatcagcttctacatgactaattacggggaagagggtacgcacgttggatccgcagcagcactagacaacactgacttggttttcggtcagtaccgcgaggcgggggtactaatgtaccgagactatccattagagcttttcatggcccagtgttatgggaacatctccgaccttggtaaggggcgccagatgccggtgcactacggatgtaaagaacgtcacttcgttaccatctcaagcccactggcaacccagatcccacaagcagtgggcgctgcttacgctgccaaaagagctaacgccaaccgggtggtcatatgttacttcggcgagggcgcggcctctgagggtgacgcgcacgcaggcttcaattttgcggctactctcgagtgtcctatcatcttcttctgcaggaacaacggctacgctatttccaccccaacgtccgaacagtatagaggggacggcatagccgcaaggggtccgggttatggcattatgagtattcgtgtcgacggaaatgatgttttcgctgtttacaatgccactaaagaggcccgtcgcagagcagtggcggagaatcagccatttttgatcgaggctatgacttatcgcatcggacaccactccaccagtgacgacagttctgcttatcggagtgtcgatgaggtgaattactgggataaacaggaccaccccatttcacggctgagacattatctcttgtctcaggggtggtgggacgaggagcaggagaaagcctggcgtaaacagtctaggcggaaggtaatggaggcgtttgagcaagccgagagaaaacccaagccaaatcccaacttactgttttcagatgtttatcaggagatgcccgcacaactgcggaagcagcaggaaagtctcgcccgtcacctgcaaacttacggcgaacactaccctctggaccatttcgacaag

SEQ ID NO: 249565 - DNA, 1335 bp, synthetic construct
  misc_feature 1..1335: note = Description of Artificial Sequence: Synthetic coding sequence
  source 1..1335: mol_type = other DNA
atggccgtcgccatcgccgctgcccgggtgtggaggctgaacaggggtctgtcccaggcagccctcctcttgcttagacagcctggcgcacgcggcctcgctcgctctcacccccctcgtcagcagcagcagttctcttccctggacgataaaccacagtttcctggggcaagcgccgagtttatcgataagctggaatttatccagccgaatgtgatctctgggatccccatatatagagtcatggatagacagggccagataatcaacccgtctgaggatccacacctgccgaaagagaaagtgctcaagctgtacaaaagcatgacactcctaaacaccatggatagaattttgtatgaaagtcagagacaaggtcgtattagcttttatatgacgaactacggcgaagaaggcacacacgtaggctcagccgctgcattggacaatacagatcttgttttcggccagtacagggaggcaggggtcctaatgtatagggattacccgctggagttattcatggcacagtgctacggcaacatttctgacctggggaaaggccggcagatgcctgtgcattacgggtgcaaggagagacacttcgtgaccatcagtagtccgctggccactcaaatcccccaggccgtgggtgccgcatacgcggccaagagggctaatgctaacagggtggtaatctgttatttcggggagggggcagcaagcgagggtgacgcacacgctggattcaattttgcggctaccctggagtgcccaataatcttcttctgcaggaataatggatacgccatatccacacccacctcagagcagtaccgcggagatggcatcgctgcaagaggccccggctacggaataatgagtatccgcgtggatggaaacgatgtcttcgccgtgtataacgccacaaaagaggcaaggcgacgcgccgtggctgagaaccagcccttccttattgaggctatgacatatagaattggccaccattctacctccgatgattctagcgcttatcggtctgtagatgaggtgaactattgggacaaacaagaccaccctatatcacgactgcgacattacctgctcagccagggatggtgggacgaagagcaggaaaaggcctggagaaagcagtcgcgcagaaaggtaatggaagctttcgagcaggcggagagaaaacctaagcctaatccaaacttgctgtttagcgacgtctatcaggaaatgcctgcccagttaaggaagcagcaggagtcacttgcccggcacctgcagacctacggcgaacattaccccttggaccacttcgacaaa

SEQ ID NO: 249566 - DNA, 1335 bp, synthetic construct
  misc_feature 1..1335: note = Description of Artificial Sequence: Synthetic coding sequence
  source 1..1335: mol_type = other DNA
atggcagtggcgatcgccgccgcgcgggtgtggaggctgaacagaggactgagccaagccgcccttctgctcctgagacagccgggagcgagaggactggcaagatcccatccgccgagacagcaacagcagttttcctcgctggatgataagcctcagtttcctggggcctccgccgaattcatcgataaactggagttcatccaaccgaatgtcattagcggaatcccaatctaccgggtgatggaccggcagggacagattatcaatccatccgaggacccgcatcttcctaaagaaaaagttctgaagctctataagtctatgaccttgctgaacaccatggaccgcattctctacgaatcgcagcggcagggaagaattagcttctacatgactaactacggggaagaaggaacccacgtcgggtccgccgccgcgctggataatacggatctggtgtttggacaataccgggaggccggagtcctgatgtatcgcgattacccgctggagctctttatggcgcagtgctacggaaacatctcagacctgggaaaaggtagacagatgccggtgcactacggatgcaaagagcgccacttcgttaccatctcttcccctctggcaacccaaatccctcaagccgtcggagctgcctacgcagccaagcgggcgaacgccaacagagtggttatctgctacttcggcgaaggagcggctagcgagggagatgcgcacgccggtttcaacttcgctgctaccctcgagtgtcccatcattttcttctgtaggaacaacggatacgctatctccaccccgacctcagaacagtaccggggtgacggtatcgccgcacgggggccgggatacgggatcatgtccatccgcgtggacggcaacgacgtctttgctgtgtacaacgcaacgaaggaagcgagacgccgggcggtggctgagaatcagcccttccttatcgaagctatgacttatcgcatcggccatcactcaacctcagacgatagctcagcttaccgctcggttgacgaggtgaactactgggacaagcaggatcacccgatctcacggcttcgccactacctcctgtcacagggctggtgggacgaggagcaggaaaaggcatggcggaagcagagccgccgcaaggtgatggaggcattcgaacaggcggaacggaagccgaaaccaaatccgaatctcctgttctcggatgtgtaccaggaaatgcccgcccaactgaggaaacagcaggagtccctggctcgccacctccagacctacggggaacattacccgttggatcacttcgacaaa

SEQ ID NO: 249567 - DNA, 1335 bp, synthetic construct
  misc_feature 1..1335: note = Description of Artificial Sequence: Synthetic coding sequence
  source 1..1335: mol_type = other DNA
atggctgtggccatagccgctgcccgtgtgtggagacttaaccgaggactgtcccaggccgcgttgctgctcctgcggcagcctggcgccaggggcctggctagatcacacccacctcgccaacagcagcaatttagctctttagacgacaaaccgcaattccccggagcgtctgcagaatttattgataagctggagttcattcagcctaatgtgatcagcggaattccgatctatcgcgtaatggaccggcagggtcagatcatcaacccctctgaagacccccacttacccaaagaaaaagtcctcaagttgtacaaatctatgaccctcctcaataccatggacagaatcctctatgagagccagagacaaggacggatatccttctatatgacaaactatggcgaagaaggtacgcacgtgggctctgctgctgcactggataacaccgacctggtcttcggccagtaccgtgaagccggcgtgttaatgtatcgggattatccgctggagctcttcatggcccagtgctatggcaatatcagcgacttaggaaagggaaggcagatgcccgtacactatgggtgcaaggaaagacatttcgtgacaatttccagccccttggctacccaaatcccccaagctgtgggcgcggcgtacgccgcaaagcgcgctaacgcaaacagagttgtcatctgttacttcggagagggtgcggcaagcgagggagatgcacacgctggttttaactttgcggctacgcttgaatgtccaataatcttcttctgccggaacaatggctacgccatttcaacacctactagtgagcagtacaggggagacgggatcgccgccagaggcccaggttatggcataatgagcattagagtcgacgggaacgacgtgttcgccgtctacaacgcgacgaaagaggcccgccgtcgcgctgtggccgagaaccagcccttcttaattgaggctatgacttaccggatcggccaccactcaacctccgatgactcttctgcctataggagcgtggacgaggtgaactactgggacaagcaggatcatccgatctcaagattgcgtcactatctgctgagtcagggctggtgggatgaggagcaggagaaagcatggcggaaacagtcgaggcggaaagtgatggaggccttcgaacaggcagagcgcaagccaaagccaaatccaaacctgctattcagcgatgtgtaccaggagatgcccgcccagctgcggaaacagcaggagtcactggcccgacatttgcagacctacggtgaacactacccgctggatcatttcgacaag

SEQ ID NO: 249568 - DNA, 1335 bp, synthetic construct
  misc_feature 1..1335: note = Description of Artificial Sequence: Synthetic coding sequence
  source 1..1335: mol_type = other DNA
atggccgtggccatcgctgccgccagggtgtggagactgaacagaggcctgtctcaggctgctcttctgcttctgagacagccgggagccagaggcttggcacgctcccatccgccacgccaacagcaacaattctcctctcttgacgacaagccccagttcccaggcgcatccgcggagttcattgataagctcgagttcatccagcccaacgtgatctccggaattcctatttacagagtgatggaccgccagggccagatcatcaatcccagcgaggacccgcacctgccgaaagaaaaggttctgaagttgtacaaaagtatgacacttctcaacaccatggaccgcatcttgtacgagagccaacgccaaggtagaatatccttctatatgaccaattatggcgaggaaggaacccatgtgggtagcgccgcagctctggataataccgacttggtcttcggtcagtatcgcgaggctggcgttttgatgtacagagactaccctttggaactgtttatggcgcagtgttacggtaacattagcgatcttggtaagggtagacagatgccggtccactacggatgtaaggaaaggcacttcgtaacaatttctagcccacttgccactcaaatacctcaagccgttggcgccgcctatgcagccaagcgcgcaaacgcaaaccgcgttgtcatatgctacttcggtgagggagctgcttccgaaggcgacgcgcacgccggtttcaacttcgctgccaccctggaatgccccataatcttcttctgtagaaacaacggttacgcgatctccactcctacctctgaacaatacagaggtgatggcatcgcggccaggggaccaggttacggaatcatgtctatcagggtcgacggaaatgatgtcttcgcggtgtacaacgccaccaaggaggctcgcagacgcgcagtagcggaaaaccaacctttccttatagaggctatgacatataggatcggccaccattctacctccgatgacagtagtgcctacaggtctgtggacgaggtgaactactgggacaaacaagaccatcctattagtagattgaggcattacctcctgagccagggatggtgggacgaggagcaagagaaagcttggagaaaacaatctcgcagaaaggtcatggaagctttcgagcaagctgaaaggaaaccaaagcctaatcctaatctgttgttctcagacgtgtaccaagagatgccggcccagctgcgcaaacagcaggagagcttggcgaggcacctgcagacatatggcgagcactacccactcgatcactttgataag

SEQ ID NO: 249569 - DNA, 1335 bp, synthetic construct
  misc_feature 1..1335: note = Description of Artificial Sequence: Synthetic coding sequence
  source 1..1335: mol_type = other DNA
atggcggtcgctattgccgctgctcgcgtgtggaggctcaaccgcgggctcagtcaagctgccctcttgttgcttcgtcagccgggcgcgagaggattggctagaagccatcctccacgacagcagcaacaattctctagtttggatgataaacctcagtttcccggagcgtctgctgaattcatcgataagctggagttcatccagccaaatgtgattagtggcattcctatatatcgggtaatggaccgacagggtcagatcatcaacccgtccgaggatccccatttacctaaggaaaaggttctgaaactgtataaatcaatgactctcctcaacacaatggaccggatactttatgagtcccagcgccaaggtcgtatatcgttctatatgacaaactacggggaagagggtactcatgttggttctgccgctgcactcgacaacaccgatttggtattcgggcaatacagggaggctggcgtgctcatgtatcgtgactatccattagaactgtttatggcccagtgctatggcaacatctccgaccttggaaaggggcggcagatgccagtgcactatggctgcaaggagagacacttcgtcaccatctcgagcccccttgcgacccagatccctcaagcagttggagctgcatatgcggccaagcgagccaacgcaaacagagttgtaatctgttactttggcgaaggcgcagcctcagagggcgacgctcacgccggatttaactttgcggcaacactagagtgccctattatattcttctgccgtaacaacggatacgctatttccacaccaacgtccgaacaataccgcggggatggcatcgctgctcgtggccccggctacggcattatgagcatcagagtcgatggcaatgatgtttttgccgtgtataacgccactaaagaggctcgtcgccgtgctgttgctgagaatcagccttttctcattgaagctatgacgtaccgaattggccatcactccacaagtgatgattctagcgcgtaccgatcagttgacgaggttaactattgggataagcaggaccaccccatctcccgcttacggcactatctccttagtcagggctggtgggatgaggagcaagaaaaggcatggcggaagcagagccgaagaaaggtcatggaggcattcgagcaggcggaacgcaaaccgaagccaaatcctaatctccttttcagcgatgtttaccaggaaatgcccgcccaacttaggaagcagcaggaaagtttggctcggcacctccagacttacggagagcattatccattagaccattttgacaag

SEQ ID NO: 249570 - DNA, 1335 bp, synthetic construct
  misc_feature 1..1335: note = Description of Artificial Sequence: Synthetic coding sequence
  source 1..1335: mol_type = other DNA
atggcagttgccatcgcggctgcacgagtgtggcgacttaatcgcgggctgtcccaggcggcgctgctgctgcttaggcaaccgggtgcacgtgggttggcacggagccatcccccaagacaacagcaacaattttcatcgctggatgataagcctcaatttcccggagcgtccgccgagtttattgacaagctcgagttcatccagccaaacgtcataagcggaattccgatctaccgagtcatggaccggcaaggacagataatcaacccttcagaagatccacaccttccgaaggaaaaggtgcttaagctgtacaagtcgatgactctgcttaatactatggatcggattctttacgagtcccagagacagggacggatttcgttctacatgaccaactatggtgaagagggtactcatgtgggatcggccgcagctttggataacacggatctggtctttggccaataccgagaggccggagtgcttatgtatcgtgactaccctttggaacttttcatggcccaatgctatggcaacatttcggacctgggaaagggtaggcagatgcccgttcactacggatgtaaagaaaggcatttcgttaccatttcgagccctctggcaacccagataccacaagcagtgggagcagcctacgcagcaaagagagcaaatgccaatagagtggtgatctgttactttggcgaaggagccgcctcagagggagacgcacatgcaggtttcaatttcgccgccactctggagtgtccaataatctttttctgccggaacaacggttacgccattagcactcctacttcagagcaatatcggggagatggaatcgcagcacgtggcccagggtacggaattatgtcgatacgcgtggacggtaacgacgtctttgccgtgtacaacgctactaaggaagcacggagaagagccgtagcggagaaccaaccattcctgatcgaagcaatgacttacaggattggtcaccattctaccagcgatgactcgtccgcgtacaggtcggtggatgaagtgaattactgggataagcaggatcaccccatatcgaggctcagacattacctgctttcgcagggctggtgggatgaagaacaagaaaaggcgtggaggaagcagagccggcggaaagtcatggaagcgttcgagcaagccgaacgaaagccaaaacctaatcctaatcttctcttttccgacgtgtaccaagaaatgcctgcccagcttagaaaacagcaagaaagcctcgcaagacacctgcaaacctacggagaacattacccgctcgatcattttgataaa

SEQ ID NO: 249571 - DNA, 1335 bp, synthetic construct
  misc_feature 1..1335: note = Description of Artificial Sequence: Synthetic coding sequence
  source 1..1335: mol_type = other DNA
atggccgtggctattgcagcagcaagggtgtggcgcctaaatcgtggtctgtcacaggcagcattactgttgttaaggcagcctggggcccgggggctggcccgcagtcatcctccacgccagcagcaacagttctcaagtctggacgataagccacagtttcccggagcttctgccgaatttatcgataaactcgagtttatccagcccaatgtgatttcagggattccgatctatagagtgatggatcggcagggacagataattaacccaagtgaggacccccacctccccaaggaaaaggtgctgaagctatacaagagcatgacactgctgaacactatggaccgaatattgtacgagtcccagagacagggtcggatttccttttatatgacaaactatggggaggagggcactcatgtgggctctgcagccgctttggataacactgacttggttttcgggcagtaccgcgaggccggcgtcttaatgtacagggactatcccttggaactgtttatggctcaatgctatgggaacattagcgacttgggcaaaggccgccagatgccggtgcattacggatgtaaagaacgtcattttgtgacgatttcttctcccttggctactcaaatcccccaggcagtaggagccgcttatgctgcaaaacgggcaaatgccaatcgcgttgtaatctgctacttcggggaaggcgcggcatctgagggcgatgctcacgcaggcttcaactttgctgctactctggagtgcccaataatattcttctgccggaataatggctacgcaattagcacacctacttccgagcagtataggggcgacggaatagccgccagagggccaggttatggcatcatgtctatccgcgtggatggtaacgatgtgtttgcggtgtacaacgctacaaaagaagcaaggaggcgagcggtggcagagaaccagcctttcctgattgaggccatgacctatcggatcggccaccatagcactagtgacgattcttcagcctaccgtagcgtggacgaggtaaactattgggataagcaggatcaccctatttcccggctacggcattacctactttcacagggttggtgggacgaagagcaggaaaaggcatggaggaaacagtccaggagaaaggtgatggaggcttttgaacaggctgagcggaaacctaaacctaacccgaatctcctgttttctgatgtctatcaggaaatgcctgctcagctgcgcaaacagcaagagtccctggctaggcacttacagacctacggagagcattacccactggaccactttgataaa

SEQ ID NO: 249572 - DNA, 1335 bp, synthetic construct
  misc_feature 1..1335: note = Description of Artificial Sequence: Synthetic coding sequence
  source 1..1335: mol_type = other DNA
atggccgtcgccatagctgctgcaagagtgtggaggcttaaccgcggcctgtcacaagccgcgctcctccttttacggcagcccggcgcgcgcggcctggctcggtctcatccaccaaggcagcagcagcagttctcttcactagacgacaaaccccagttcccgggcgccagcgccgaatttatcgataaactggaatttatccagccgaacgtgattagcggaatacctatctatcgggtaatggacagacagggacagataatcaaccctagcgaggacccacatcttcccaaggaaaaggtgctcaagctctataaatcaatgacactgttgaatactatggatcggatattgtacgagtcacagcgccagggacggatcagcttttatatgaccaattacggagaagagggcacacatgtggggagcgctgcagcccttgacaatactgacctggtgtttggacaatatagagaggccggagtgctcatgtatagagattaccccctggagctgtttatggcgcaatgctacggcaatatctcagatctcggtaagggaaggcagatgcccgttcactacggctgcaaagagagacattttgtcacgatcagctccccactggctacacagattcctcaggcagtgggcgccgcctatgctgccaaaagggccaacgcgaaccgagtagtgatctgttactttggggaaggagcagcctctgagggagacgcgcatgctggtttcaatttcgcggcaaccctggagtgccccatcatctttttctgtcggaataacgggtacgcaatcagcacccccacatccgagcagtataggggagacgggatagctgccagaggaccaggttatggtataatgtccattcgcgtggacggcaacgacgtattcgctgtgtacaacgccacaaaagaagcgagacgccgagcagtcgccgaaaaccagccgtttctgatcgaagctatgacatatagaatcgggcaccatagcacttcagatgatagctccgcctataggtccgtggacgaggttaactattgggataagcaagatcatccaatctcacgccttagacattatctccttagccaaggatggtgggacgaggaacaagaaaaagcttggagaaaacaaagcaggcgtaaggtaatggaggcgttcgaacaggccgagcgaaagcctaaacctaatcccaatctgttgttctcagacgtgtatcaggaaatgcccgcacagcttagaaagcagcaggagtccctggcccggcacctgcaaacctacggcgagcattacccactggaccactttgacaaa

SEQ ID NO: 249573 - DNA, 1335 bp, synthetic construct
  misc_feature 1..1335: note = Description of Artificial Sequence: Synthetic coding sequence
  source 1..1335: mol_type = other DNA
atggccgtggcgatcgctgccgcccgagtgtggaggttaaaccgcgggttgagccaggctgctctgctccttctccgccagcccggtgctcggggattggcacgatctcatcctccgcggcagcagcaacaattctcttctctggatgacaagccgcaattcccaggcgcttctgcagagttcatagacaagctggagttcattcagccgaacgtcatttccggcatccctatttatcgggtgatggacagacaggggcagattataaacccctccgaagatcctcatctgcctaaggagaaagtcctgaagctgtataaatctatgactttgttaaatacgatggacagaatcctatatgaatcccagagacagggccggatatctttctacatgacaaattatggcgaggaaggcacacatgtggggtctgcagctgctctggacaatactgatctcgtcttcggtcagtacagagaggcaggtgtcctgatgtatagagactatcctctcgaattatttatggctcagtgctacggcaatatctccgacttgggtaaaggccgtcagatgcctgtccactatggatgcaaggaaagacatttcgtgactattagttcccctctggcaactcagatccctcaagccgtgggggccgcgtatgctgcaaaacgcgcaaatgccaatagggtcgttatatgctattttggcgagggagcagcctctgagggcgacgcccacgccggctttaatttcgcggccacccttgagtgtcccattattttcttctgcaggaacaacgggtatgcaatatctacgcctaccagtgaacagtaccgcggggacggcattgccgctcggggcccgggctacggcattatgagcatacgggtggacggaaacgacgttttcgcagtctataacgccaccaaggaggcccgaaggcgcgcagtggccgagaaccagcccttcctgattgaggcaatgacatatagaatcggccatcacagcacctcggacgatagcagtgcctatagatctgtggacgaagtcaattattgggacaaacaagatcaccctatctcacgactgcgtcactacctcctgtcgcagggctggtgggatgaggaacaggaaaaagcctggcggaagcaatccaggcgcaaggtcatggaagctttcgaacaggcggaaagaaaacccaagcctaatcccaatctgctttttagtgatgtgtaccaggagatgcccgcgcagctccgaaagcagcaggagtcactcgctcgacaccttcagacctacggcgagcactacccactggaccactttgacaag

SEQ ID NO: 249574 - DNA, 1335 bp, synthetic construct
  misc_feature 1..1335: note = Description of Artificial Sequence: Synthetic coding sequence
  source 1..1335: mol_type = other DNA
atggccgtggcaatcgccgcagcaagggtgtggcgcctgaatagggggctttcgcaagcggcacttcttcttctcaggcagcccggagcccgtgggcttgcaagaagccatcctccgcggcaacaacagcagttttcatcgcttgacgataagccacaattcccaggtgcatccgcagagttcatcgataagctcgagtttattcagcctaacgtgatttcgggtatcccaatttaccgcgtcatggacaggcagggtcaaatcataaatccttcagaagatccacatttgcctaaggaaaaagtgctgaaactttacaaatccatgaccttgcttaacactatggaccgcattctctacgaatcacagcgacaaggccgtatttcgttttacatgacgaattacggagaggagggaactcacgtcggcagcgccgcagccctggacaacactgaccttgtgtttggacaataccgagaggcaggagtcctcatgtacagagattaccctctcgaactgtttatggcccaatgctacggtaacatctccgatcttgggaagggtcgccagatgcctgttcattacgggtgtaaagaacggcatttcgtgaccatttcctccccccttgcaactcaaatccctcaggccgtcggtgcggcgtacgcggcaaagagggccaatgccaatcgggtggtcatttgctactttggtgagggcgccgcgtcagaaggagacgcccatgcaggtttcaactttgccgcaaccttggaatgtccaatcattttcttctgtaggaacaatggatacgcaatatcaacgccgactagcgagcaataccgcggagatggcattgcagccagaggtcccggatacgggattatgagcatcagagttgatggcaacgatgtttttgcggtgtataacgcaactaaggaagcacgcaggcgtgcggttgccgaaaaccaaccatttcttatcgaagcaatgacctatagaatcggacatcattcgactagcgatgatagctccgcctaccggagcgtcgatgaagtgaattactgggacaagcaggatcatccaatttcacgccttagacattacctgctctcccaaggatggtgggatgaggagcaggaaaaggcctggcgcaagcaatcgagacggaaagtgatggaagcgttcgaacaggccgaacgtaagcccaagcccaaccctaacctgctgttttccgacgtgtatcaggaaatgcctgcacagctgaggaagcagcaggagtcacttgcccggcatcttcaaacttacggtgaacattaccctctggaccattttgataaa

SEQ ID NO: 249575 - DNA, 1335 bp, synthetic construct
  misc_feature 1..1335: note = Description of Artificial Sequence: Synthetic coding sequence
  source 1..1335: mol_type = other DNA
atggctgtggcaatcgcggcagcccgggtgtggcgcttgaaccggggactgtcccaagccgcgctgctgctgctgaggcagccaggagcccggggcctcgcaagaagccaccctccccggcagcagcaacaattctcctccttggatgacaagccgcagttcccaggagcgagcgctgaattcattgacaaattggagttcatccagccaaatgtgatctcgggcatcccaatctaccgggtgatggaccggcagggtcagatcatcaacccttcggaagatccacatctgccgaaagagaaggtgctgaagctctacaaatctatgaccctgctgaacactatggaccgtatcctctacgagtcccagcggcaggggcggatctcattctacatgaccaattacggagaggagggaacgcatgtgggatccgcggctgctctggacaacaccgacctggttttcgggcaatacagggaagctggagtgctgatgtaccgagactacccgctggaactgttcatggcccaatgctacggtaacatttcggacttgggaaagggaaggcagatgcctgtgcattacggctgcaaggaacgccacttcgtcactatcagttcaccgctcgccacccaaatcccacaagccgtgggagcagcgtatgcagccaaacgcgcgaatgcaaaccgcgtggtgatctgttactttggagagggtgcagcatcggagggggacgcgcacgcaggattcaatttcgcagctacccttgagtgcccgatcatcttcttctgcagaaacaatggttacgctattagcaccccgacctcagaacaatacaggggagacggcatcgctgctaggggcccgggctacggaatcatgagcatccgggtcgacggcaacgatgtgtttgcagtgtacaacgctactaaggaggctcggaggagagcagtcgccgagaaccagccgttcctgatcgaggcgatgacgtacagaattggacaccattcaacctccgacgactcgtctgcataccgatccgtggacgaagtcaactactgggataagcaggatcatccaatcagccgactccgccactacctgctgtcccaggggtggtgggacgaagagcaagagaaggcttggagaaaacagtcgcggagaaaggtgatggaggcattcgagcaagccgagagaaaacccaagccaaacccgaatctgcttttcagcgacgtctaccaggaaatgccggcccaactgcggaagcagcaagaatcactggcgaggcatcttcagacctacggagaacactatccgctggatcacttcgataag

SEQ ID NO: 249576 - DNA, 1335 bp, synthetic construct
  misc_feature 1..1335: note = Description of Artificial Sequence: Synthetic coding sequence
  source 1..1335: mol_type = other DNA
atggcagttgcgattgcggcagcaagagtctggaggcttaaccgcggcctctcccaggccgcacttttgttgctgcgtcagccaggagcacggggacttgcacggtcgcatcctcctcggcaacagcagcaattttcctcgcttgatgataagcctcagtttccaggagcgtcggccgagttcattgataaacttgagtttatacaacccaacgtgatttcgggcatcccaatctacagagtgatggataggcaaggtcagatcatcaatccatcggaggacccccatctgcctaaggagaaagtcctgaaattgtacaagtcgatgaccctgctgaataccatggataggattctctatgaatcacaacggcaaggtcgcatatccttctacatgactaactatggcgaagaaggaactcatgtgggttcggctgcggcacttgataacactgacttggtgtttggccagtaccgggaagcgggagtgctcatgtacagggattatccccttgagctgtttatggcccagtgctacggcaacatttcggacctcggtaaggggagacaaatgcctgtgcattacggatgtaaggaacgtcacttcgtgacgatctcctcccctctcgccacccagatccctcaagcagtgggagcagcatatgcggcgaagcgagctaacgccaacagagttgtaatctgttacttcggagagggtgcagcatctgagggagatgcccatgccgggtttaactttgcagccaccctggaatgcccgatcattttcttttgtcgaaacaacggatacgcaattagcacccctacttcggaacagtaccgtggcgacgggatcgctgcccggggtccaggctacggaataatgtccatacgtgtggatggaaacgatgtgtttgctgtgtacaacgcaaccaaagaggcacgacgaagagccgtcgcagaaaaccagcctttcttgattgaagcaatgacttaccgtattgggcatcattcaacctccgacgactccagcgcataccgcagcgtggacgaagtgaactactgggacaagcaggatcaccccattagccggctgagacattacctcctgtcgcaaggatggtgggatgaagaacaagagaaagcctggagaaagcaaagcaggcgcaaggtcatggaggctttcgagcaagcagaacgtaagccaaagcctaacccaaacctcctcttctcggatgtttaccaagaaatgccagcccagcttcgtaagcagcaagaatcgcttgcccgtcacctgcaaacttacggggagcactacccactggatcatttcgataag

SEQ ID NO: 249577 - DNA, 1335 bp, synthetic construct
  misc_feature 1..1335: note = Description of Artificial Sequence: Synthetic coding sequence
  source 1..1335: mol_type = other DNA
atggctgtggcaattgccgcagctcgcgtgtggcggctcaaccgcgggttgtcgcaggccgctctgctgctgttgcgccagcctggcgctagaggactagcgagaagccatcccccgcgccagcagcaacagttttcctccctggatgataagccgcagtttcccggagcctctgcagagtttattgataaactggagtttattcaaccgaacgttatatctggaatcccgatctaccgtgtgatggatcgccaaggccagatcatcaatcccagtgaagacccccacttaccaaaggagaaggtcctaaaactgtacaagtctatgactttgcttaacaccatggatcggatcttgtatgagtcacagcgacagggaaggatttcattctacatgaccaattacggggaagagggcacacatgtggggagcgcagcagcactggataatacggacctggtgttcggtcagtacagggaggccggtgtgctgatgtaccgggactaccccctggagttgttcatggcccagtgctatggcaacatcagtgacctggggaaaggccgacagatgccagttcattatggctgcaaggaacgacatttcgtgactatctcgagtccccttgccacacagattccgcaggcagtgggggcggcctatgcggctaagcgcgctaatgccaatcgagtggtaatctgttactttggcgagggagcagccagtgaaggagacgcccatgcgggattcaactttgccgccacccttgaatgcccaataatctttttctgccggaataacgggtacgctatctcaacccctacatccgagcagtacagaggcgacggtatagcagctaggggccccggttacggaatcatgtcaattcgggtggacggcaatgatgtattcgccgtgtataatgcgacaaaagaagctagacggcgggccgttgccgaaaatcagccttttctcatcgaagccatgacctatcgcattggtcaccactctacgtcagacgatagtagcgcataccgatctgtggacgaggtgaactattgggataaacaggaccaccccataagtcgcctccgccactacctgctttcacagggctggtgggacgaagaacaagaaaaggcatggcgaaagcagtccaggcggaaggtgatggaggcgtttgagcaggccgaacggaagcctaagcccaaccccaatctcctgtttagcgacgtttaccaggagatgcccgcccaactgaggaaacagcaggagagccttgcccgccatctgcagacatacggcgaacactacccacttgatcatttcgataag

SEQ ID NO: 249578 - DNA, 1335 bp, synthetic construct
  misc_feature 1..1335: note = Description of Artificial Sequence: Synthetic coding sequence
  source 1..1335: mol_type = other DNA
atggcagtggcaatcgcggcagcccgggtgtggcgtctcaaccgaggcctttcacaggcagcactgcttcttcttcgacagccaggggcacgagggctcgcacggtcacacccacccagacagcaacaacagtttagctctttggatgataagccacaattcccaggagcaagcgcagagttcatcgacaagttggaattcatccaacctaacgtgatttcaggaattcctatttaccgcgtcatggaccgccaaggccagattatcaacccttccgaggatccgcatctgccaaaagaaaaggtcttgaagctctacaaatcgatgacgctcctgaataccatggataggatcctttacgaaagccaaaggcagggtcgaatttcgttttacatgaccaattacggtgaggaagggacgcacgtcggtagtgcggcagccctcgacaataccgaccttgtgttcggacaatatcgggaggccggagtgctgatgtacagagattacccactggaattgttcatggctcagtgttacgggaacatatcggatctgggtaaggggagacaaatgccagttcactatggatgtaaggaacggcattttgtgactatatcctccccactcgcaacgcagatcccacaagcagtgggtgccgcttatgcagcaaaacgggctaacgctaatagggtggtgatctgctactttggagagggagcagcgtctgaaggggatgcgcatgcaggattcaattttgctgccactcttgaatgcccgattatcttcttttgtagaaataacgggtacgccattagcaccccgacttcggaacaataccgcggtgacggtatagcggcacgcggtccagggtacggaattatgtccatacgagttgacggaaacgacgtgtttgccgtgtacaacgcgactaaagaagcacggagaagagccgttgccgagaaccagccttttcttattgaagcaatgacttaccgcattggacaccactcgacctcggatgactcctctgcctacaggtccgtagatgaagtgaattactgggacaaacaagatcatcctatttcaagactgcggcattacctgcttagccaaggctggtgggatgaagagcaagagaaggcctggagaaagcagtccagacgcaaggtgatggaagcgtttgaacaggcagagcgcaaacccaagcctaaccctaacctccttttttcggatgtttaccaagaaatgccggcccagcttaggaagcaacaagagagcctggcaaggcatcttcagacttacggagagcactaccctttggatcacttcgataag

SEQ ID NO: 249579 - DNA, 1335 bp, synthetic construct
  misc_feature 1..1335: note = Description of Artificial Sequence: Synthetic coding sequence
  source 1..1335: mol_type = other DNA
atggccgtggctatcgcggcggcgcgggtctggcgcctgaatcggggcctgtcgcaggccgccctcctgctgctcagacaacccggcgcacgcggcctcgcgcgctcccaccctccgcgccagcaacaacagttctcaagcctcgacgataagccacaattccctggagcctcagccgagtttatcgacaaactggagtttatccagccgaacgtgatctcagggatcccgatctaccgggtgatggatcggcaggggcagattatcaacccgtccgaggacccgcatctgcctaaggagaaagtgctcaaactctacaagtcgatgactctcctgaatactatggatcggatcctgtacgagagccagagacaggggcgcatctccttttacatgaccaactacggtgaagagggcactcatgttggctcggccgctgcactcgacaacacggatctggtgttcggacagtaccgggaagcgggggtgctgatgtacagggactaccctctcgaactgttcatggcccaatgctacggtaatatcagcgacctcggaaagggtcggcaaatgccggtgcattacggatgcaaagaacgccacttcgtgactatctcctcgccactggctactcagattccacaagcggtcggagccgcgtatgcggcgaaacgcgctaatgcgaaccgcgttgtgatttgctacttcggcgaaggtgccgcgagtgaaggagacgcccacgcagggtttaacttcgccgccacgctggagtgtccaattatcttcttttgccgcaacaacggctacgccatctccactcccaccagcgaacaataccggggtgacgggatcgcggcccgcggcccgggctatggaatcatgagcatccgggtggacggaaatgacgtctttgccgtctacaacgctactaaggaggccaggcgccgggcagtggcagaaaaccagcctttccttattgaagcaatgacctaccggattggacaccactccaccagcgacgatagctccgcgtacagaagcgtcgacgaagtgaactactgggataagcaagaccacccaatctcccggctcaggcattacctcctcagccagggctggtgggacgaagagcaggagaaggcctggcgcaagcagtcgcggcgcaaagtgatggaagcgtttgagcaggcagaaagaaagcccaagccaaatccaaaccttctcttctcggacgtgtaccaggagatgcctgcccagttgcggaagcagcaggaaagcctggctcgccatctgcagacttacggagagcattacccactggatcactttgacaaa

SEQ ID NO: 249580 - DNA, 1335 bp, synthetic construct
  misc_feature 1..1335: note = Description of Artificial Sequence: Synthetic coding sequence
  source 1..1335: mol_type = other DNA
atggctgttgctatcgctgccgcacgcgtatggcggctgaatagaggcttgagtcaggcggcgcttcttctcctgcgacagccgggggctcgcggactggcgagaagtcacccaccaaggcagcaacagcaattctctagtctcgatgacaaacctcagttccctggcgcaagcgcagaatttatagacaagctcgaatttatacagccaaatgtcatctcagggatacctatctatcgggtgatggaccgccagggtcaaataatcaatcccagtgaagatccacacctgcctaaagaaaaggtccttaaactgtacaagtctatgacactccttaacactatggacaggatactgtacgagtcccagaggcagggaagaattagtttttatatgaccaactacggagaggagggaactcacgtgggtagtgcggctgctctcgacaacacggatctggtatttggccagtatcgggaggccggcgtcctcatgtaccgagactatcccctggaacttttcatggctcagtgctacggtaacataagcgatctggggaagggcaggcagatgcccgtgcactacggctgtaaagagcggcatttcgtcacaatcagctctcctctggccacccagattccacaggcagtaggtgccgcttacgccgccaagagggcaaatgcaaatagagtggtcatttgctatttcggagagggggccgcctctgagggagacgcccacgccggttttaacttcgcagcaacgctcgagtgtcccatcatcttcttttgcagaaataatgggtacgccatttcaactccaacgagcgagcagtacaggggggacggcatcgctgcccgcgggcccggttacggaattatgagcatcagagtggacggcaacgacgtattcgcggtatataacgccactaaagaagctagacggcgcgctgtcgctgaaaaccaaccattcctgatcgaggcaatgacatataggattgggcaccactctacttctgacgactcatctgcttatcgcagcgtggacgaagtgaattactgggataagcaggatcacccaatctctcggctgcggcattacctgctcagtcagggctggtgggacgaagagcaggaaaaagcttggcgcaaacagagtagaagaaaagttatggaggcctttgaacaggcagagagaaagcccaaaccaaatcctaaccttctgttctccgacgtctaccaggaaatgcctgcccagctgaggaagcagcaggaaagtctggctagacatctgcagacttacggggagcattacccgctggaccacttcgataag

SEQ ID NO: 249581 - DNA, 1335 bp, synthetic construct
  misc_feature 1..1335: note = Description of Artificial Sequence: Synthetic coding sequence
  source 1..1335: mol_type = other DNA
atggccgttgccatcgctgccgctcgtgtctggcgtctgaatcgcggcttaagtcaggctgcactgctgctgctgcgacaacccggcgctcgcggactcgcacggtcacacccgccccggcagcagcagcagtttagtagtttagatgacaagccacagttcccaggagcttccgctgaatttatcgataaactggagttcattcagccgaacgtcatttccggaattccaatctacagagttatggaccggcagggacagataatcaatccctccgaagacccccatttaccgaaagagaaagtactaaagctgtacaagtcaatgaccctcctgaatacaatggatagaattctctatgagagccagcgccagggtaggattagcttctacatgacaaattatggtgaagagggtacacacgtgggctctgctgccgcgctcgacaacaccgacctagtttttggacagtacagggaagccggagtgctcatgtaccgagactatcccctggagctattcatggctcagtgctacggaaatatttcagacttgggtaaggggcgccagatgcctgtacactatggatgtaaggagaggcacttcgttacgatcagttcccctctggcaactcagattcctcaggcagtgggcgcagcatacgccgccaagagggctaatgcaaatagggtagttatttgttacttcggcgaaggagccgcctctgaaggagatgcccacgcgggcttcaatttcgccgccactctcgagtgccccatcattttcttctgccgcaataatgggtacgcaattagcaccccaaccagcgagcagtatcgcggcgatggaatcgctgcacgcggcccaggatatggcataatgtcaatacgtgtggatggcaatgacgtgtttgcagtttacaacgccaccaaggaggcacggagacgggcagtagccgaaaaccagccctttctgatagaagcaatgacctatcggattggccatcatagtacgagtgatgactcaagtgcttataggtccgttgacgaggtaaattattgggacaagcaggaccacccaatctccagactgcggcattatctgctgtctcagggatggtgggacgaggagcaggagaaagcctggcgcaagcagtccaggagaaaggtgatggaagcgttcgaacaggcagagagaaagccaaagcccaaccccaatttactgttctctgatgtctatcaggagatgcctgcacagctcagaaaacagcaggaaagcctcgctagacacctgcagacttatggggaacattatccattagatcatttcgacaag

SEQ ID NO: 249582 - DNA, 1335 bp, synthetic construct
  misc_feature 1..1335: note = Description of Artificial Sequence: Synthetic coding sequence
  source 1..1335: mol_type = other DNA
atggctgtcgcaatcgctgccgcgagggtttggagactaaatagagggctgtctcaagcagctttgttgcttttgcgtcagccaggggccaggggattagctcgatcgcacccacctcgccagcaacagcagttttcttctcttgatgataaacctcaattccccggggcttccgctgagtttatagataaacttgagtttatccaacctaacgtgattagtggaatacctatttatcgtgttatggatagacaaggacagatcattaacccttcagaagatcctcaccttccaaaggagaaggtactgaagttgtataagtccatgacacttcttaacactatggatcgtatcttgtacgaatcccaacgacaaggacggatttctttctacatgaccaattatggagaagaaggtacccatgtcggatctgcagctgctcttgacaataccgaccttgtctttggacagtatcgagaagctggtgttttgatgtacagagattatccattggagttattcatggcacaatgctacggcaacatcagtgatttggggaaaggtagacaaatgcctgttcattatggttgtaaggaaagacactttgttactatatcttcaccactggcaactcagatcccgcaggcggtaggggccgcatatgctgctaagcgtgcaaatgctaatagggtcgtgatttgctatttcggtgaaggtgcggcttctgaaggtgatgctcatgctggtttcaacttcgcagctactttggagtgcccgataatattcttttgcagaaataatggttatgcgatatctactccaacttcagaacaatatcggggcgatggaattgctgccagaggacctggatacggaataatgagcattagagtggatggtaatgacgtattcgcagtttataatgcgaccaaagaggctcgaagaagagctgtcgctgagaaccagccttttctcattgaagctatgacatataggattggccaccactcaacgtcggatgactcctctgcatatcggagcgttgatgaggttaactactgggataagcaggaccaccccatcagtaggttacgacactatttgctctctcagggttggtgggacgaggagcaggagaaggcctggcggaagcaatctagaaggaaggtcatggaggcgttcgagcaagctgaacggaagcccaagcccaacccaaacttgctcttcagtgatgtgtatcaggagatgcctgcccaattgaggaaacaacaggaatccttagctaggcatttgcaaacttatggtgagcattacccgctggatcactttgataaa

SEQ ID NO: 249583 - DNA, 1335 bp, synthetic construct
  misc_feature 1..1335: note = Description of Artificial Sequence: Synthetic coding sequence
  source 1..1335: mol_type = other DNA
atggccgtggccattgccgccgctagagtgtggcggttgaaccgggggctctcgcaggctgctctcctgctgctcaggcaacctggtgcacgcggactcgcacgctcccatcctccaagacaacagcagcagtttagctccctggacgataaaccgcagtttccgggagccagcgcagagtttatcgacaaactcgagttcatccaaccgaatgtcatcagcggcattccgatttaccgtgtcatggatagacagggacaaatcattaacccttcagaggatccacatctgccgaaagaaaaagtgctgaaactgtacaagagcatgactctcttgaataccatggatcggatcctttacgaatcacagagacagggacgcatctcgttctacatgactaactacggagaagagggaacccacgtcgggtcagcagccgcacttgacaataccgaccttgtgttcggtcagtaccgggaagcgggcgtcctcatgtaccgcgattacccgctggagctctttatggcccagtgctacggcaacatctcggatcttggaaaaggacggcagatgccggtgcactacggctgcaaggaaagacacttcgtgactatcagctcgccgctggccacccagatcccacaggccgtgggagctgcctatgccgcaaagcgggcgaacgccaatcgggtcgtcatttgctatttcggagaaggcgccgcgtccgaaggcgacgcgcatgctggcttcaacttcgccgctactctggagtgcccgatcatctttttctgccgcaataacggatatgccattagcaccccaaccagcgaacagtatagaggcgacggaatcgcggcacgcgggccgggctacggaatcatgtcaatccgcgtggatggaaacgacgtgttcgccgtgtataacgcgactaaagaggccaggagacgcgccgtcgccgaaaaccagccgttcctgatcgaagcgatgacttaccgaattggtcatcacagcacctcggacgactcttccgcgtacagatcagtggacgaagtcaactactgggacaagcaggatcatccgatctccaggctgagacattaccttttgtcccaaggatggtgggacgaggagcaagagaaggcgtggcgcaagcagtcacggagaaaggtgatggaagcgtttgaacaagccgagcggaagcctaagcctaatccgaatcttctgttcagcgatgtctaccaggagatgccggcacagcttcgcaagcaacaagagtcgctcgctcggcacctgcaaacgtacggagagcactacccgctggatcatttcgataag

SEQ ID NO: 249584 - DNA, 1335 bp, synthetic construct
  misc_feature 1..1335: note = Description of Artificial Sequence: Synthetic coding sequence
  source 1..1335: mol_type = other DNA
atggcagtggccattgctgcagcacgggtctggaggctcaaccgaggactctctcaggcagccctcctactcctgcgccagcctggagcccgcgggctcgcccgatcccatcctcctcggcagcagcagcagtttagttcattagatgataaacctcagttccccggggccagtgccgagttcattgacaagttagaattcatacagcctaatgtgatatctgggatccccatttaccgggtcatggataggcaggggcagataattaatccatccgaggatccacacttacctaaggaaaaagttcttaaactgtacaagtccatgacattattaaacacaatggatcggattctttatgaatcccagcggcagggacgaatatccttctatatgacaaattatggggaagaggggacgcacgttggatccgccgccgctcttgataatactgatctcgttttcggacagtacagggaagccggagtcttgatgtaccgggattatccattagagctcttcatggctcagtgttacggaaatatctctgatcttgggaaagggagacagatgccagtgcattacgggtgcaaggaaaggcacttcgtgactatctcaagtcccctcgctactcagatcccacaggccgttggagccgcatatgccgccaaaagggcaaacgccaatcgggttgtgatctgctatttcggggagggagccgcatcggaaggagacgcacatgccggattcaactttgctgctacactcgagtgtccaataatcttcttttgtaggaacaatgggtatgctatctcaactcccacatcagaacaatatcgcggggacggaatagctgcaagaggaccaggatatggaataatgtccattcgagttgatggaaacgatgtattcgctgtttacaacgcgactaaggaggcaagaaggcgggccgttgctgagaaccaacccttcctgatagaggcaatgacatatcggatagggcaccatagtacttctgatgattcatcagcctatcggtccgtggatgaagtcaactactgggataaacaggatcaccccatatcccgacttagacactatctcctttcccagggatggtgggatgaagaacaggaaaaagcctggcggaagcagagtcgaagaaaagttatggaggcctttgagcaggctgaaaggaaacctaagcccaacccaaacttactatttagtgatgtctatcaggaaatgcctgcacagctaaggaaacagcaggaatcactcgcacgacatttacagacatatggagaacattatcctcttgatcactttgataag

SEQ ID NO: 249585 - DNA, 1335 bp, synthetic construct
  misc_feature 1..1335: note = Description of Artificial Sequence: Synthetic coding sequence
  source 1..1335: mol_type = other DNA
atggccgttgcgatcgccgctgctcgcgtttggaggctgaaccgggggctcagtcaggctgcgcttttacttctacgtcagccgggagctcgagggttagctcgcagtcatccaccacgtcagcagcagcagttttcctcgctcgacgataagccacagtttcccggggcttctgccgagttcatcgataagttggagttcattcaaccaaatgtgatttccgggatcccaatatatagggtcatggaccggcagggccagattataaaccccagcgaagatcctcacctgcctaaggagaaggtgctaaagctctacaaatcgatgacactccttaacacaatggatcgtatcttgtacgaatcccagcgccaggggcgtattagcttctacatgactaattatggggaagaaggaacccatgtggggtcagccgctgcgctcgataatacagacctggtgttcggacagtatcgggaggcaggagtcttgatgtatagagattacccactggagctgttcatggctcagtgctatggaaatatctctgatttggggaaagggcggcagatgccagttcactacgggtgcaaggagcgccatttcgtcacaatttcttcccccctcgccacacagatcccccaggcggtgggggccgcctacgcagctaagagggctaacgctaatcgcgtggtaatatgttattttggtgagggtgctgcatcagaaggggatgcacacgcgggattcaacttcgccgccaccctcgagtgtcctatcatattcttctgtcgcaataatgggtatgctatttccacccctacttccgaacagtatcggggcgacggcatcgccgctcgagggccaggatacgggattatgtctataagggtggacgggaatgacgtattcgcggtctataacgcgacaaaggaggcgagacgaagggctgtcgctgagaatcagccatttctgatagaagcaatgacatatcgcatcggccaccactccacctctgacgactcatctgcctaccgttctgtcgatgaagtaaattattgggataagcaggaccacccaataagtcggctgcggcactacctactgtcgcagggctggtgggacgaggagcaggaaaaagcgtggcggaaacagtctcgacgtaaagtgatggaggccttcgagcaagccgaacgaaagccaaaacctaaccccaatcttctgttttctgacgtgtaccaggagatgccagcgcagctgcgtaagcagcaggaatctctggcacgtcacctccagacctacggcgaacactaccctctagaccacttcgataaa

SEQ ID NO: 249586 - DNA, 1335 bp, synthetic construct
  misc_feature 1..1335: note = Description of Artificial Sequence: Synthetic coding sequence
  source 1..1335: mol_type = other DNA
atggctgtcgcaatcgcagccgccagagtatggagactgaatcgtggtctcagccaagccgcattgttgcttttgaggcagcccggagcccgcggcctggcccgcagtcaccctccacgccagcagcagcagttttctagcctggatgacaagccccagttccccggcgcatccgcagaattcatcgacaaactggagtttattcaacccaacgtcatctctggtattccaatatatcgcgtcatggaccgtcagggacaaataattaatccatccgaggacccacatcttcccaaggagaaggttcttaaactctacaagagtatgactctgctcaatacaatggacaggatcctctacgaatctcagcgccaaggccgcatttctttttacatgaccaactacggtgaggagggcactcacgtgggctcagctgcagcactggacaacactgacttggttttcggacagtaccgcgaggccggcgtgttgatgtatcgcgactatccattggaactgttcatggcccagtgctacggaaacatctccgacctgggaaagggcaggcagatgcctgtgcactatggatgcaaggagaggcatttcgtcaccattagctcaccccttgcaacacagatacctcaagccgttggcgctgcttatgctgctaagagggctaacgcaaacagggtggtgatctgttatttcggcgaaggcgctgcctctgagggagacgctcacgccggtttcaactttgcagctacactggaatgccctatcatctttttctgccgtaataacggctacgccatctctactccaacatccgagcaatatcgcggagacggtattgccgctcgcggtcctggatacggcataatgtctattagggtggacggtaatgacgtgttcgccgtctacaatgccacaaaggaggcacgtcgtagggccgtggctgaaaatcagccattccttatcgaggcaatgacataccgtatcggtcaccactctacctctgatgactcctctgcttatcgctcagtggacgaggtcaattactgggacaagcaggaccatccaatttcaagactgagacattatctcctgtcccaaggatggtgggacgaggagcaggaaaaagcctggagaaagcaatcaaggagaaaggtgatggaggctttcgagcaggccgagaggaagcctaagcccaatccaaacttgttgttttctgatgtataccaggagatgcccgctcagttgagaaagcaacaagagagcttggcccgtcacctgcaaacctacggagaacattaccccttggatcacttcgataag

SEQ ID NO: 249587 - DNA, 1335 bp, synthetic construct
  misc_feature 1..1335: note = Description of Artificial Sequence: Synthetic coding sequence
  source 1..1335: mol_type = other DNA
atggcagtcgccatcgcagccgcaagggtgtggcgcctcaatcgcggcttgagccaggccgcactgcttctgcttaggcagccgggagctagagggctggcgaggagccacccgcctcgccagcaacagcaattttcttcgctggacgacaagccacaattccctggggcatcagcagaattcatagacaagctcgagttcatccagccgaacgtgatttcgggcatccccatttatcgagtgatggacaggcaaggtcaaatcatcaatccgtcggaagatccacatctgcctaaggagaaggtgctcaaactttacaagtcaatgacccttctgaatactatggacagaatcctgtacgagtcccagagacaaggaaggatttctttttacatgacgaactacggagaagaaggaacccacgtcggaagcgcagccgctctggataatactgacctggtgttcggccagtaccgggaagcaggcgtcctcatgtaccgcgactaccctctcgaactgtttatggcacagtgctacggaaacatctccgacctgggcaagggtcgccagatgccggtgcactacgggtgcaaagagcggcatttcgtgaccatcagctcaccgctggcgacccagataccacaggccgtgggtgccgcgtacgcagcgaagagggcgaatgccaatcgggtggtgatctgttacttcggagaaggagctgcctctgaaggagacgcccacgccggattcaatttcgccgcgacgcttgagtgtccgatcatcttcttttgccgaaacaacgggtacgcgattagcaccccaacttcagagcagtaccggggtgacggaatcgcggcccgcggcccggggtacggaattatgtcaatccgggtggacgggaacgatgtctttgccgtctacaacgccactaaagaggcccggcgtcgggctgtcgcggaaaaccagccattcctcattgaggcaatgacctacagaatcgggcaccattcaacttcagatgattcctcggcctatcggtccgttgacgaagtcaactactgggataaacaagatcatcctatctcgcgcctccgccattacctcctgagccagggttggtgggacgaagaacaggagaaggcttggagaaagcagtcacgacggaaggtgatggaagccttcgagcaggcggagcggaagccgaaaccgaaccccaacttgctgttctcggatgtctaccaggaaatgcccgctcaactgcgcaaacagcaggaatcgcttgccagacaccttcaaacctacggagagcactatcccctggaccatttcgataaa

SEQ ID NO: 249588 - DNA, 1335 bp, synthetic construct
  misc_feature 1..1335: note = Description of Artificial Sequence: Synthetic coding sequence
  source 1..1335: mol_type = other DNA
atggctgttgccattgcggcagctcgagtctggcggttgaaccgaggactaagtcaggccgccctattattactccggcaaccaggagctagggggcttgcccggtctcatccacccaggcaacagcaacaattttcttccctggacgacaagccacagtttcccggagcttctgcagaattcatagataagttggaattcatacagccgaacgtgatttcaggcattccaatttatcgagtaatggatagacagggccagattatcaacccatccgaggatccccacttgccgaaggagaaagtactgaagctgtacaagagtatgaccctacttaacaccatggaccgcattctgtatgaaagccagagacagggacgcatttccttctacatgaccaattatggcgaagagggcacgcatgtgggatctgccgcagctctcgacaatacagatttggtttttggacagtatagggaggcaggcgtgttgatgtacagagactaccctctggagctgtttatggcccagtgctacgggaatatcagcgatctgggcaagggccgtcagatgcccgtgcattacgggtgcaaagagagacactttgtaaccatttcttctccccttgcaactcagattcctcaggcagtgggggccgcctatgccgcaaagcgggctaatgcaaacagagtcgtgatctgttactttggggaaggggctgccagcgagggcgacgcacacgccggctttaattttgctgccacactggaatgccccatcatcttcttttgcagaaacaatgggtacgccataagtactcctacctccgagcagtaccggggtgacggtatcgctgcaaggggtccaggatacgggattatgagcatcagggttgacggtaatgacgtctttgccgtgtataatgccacaaaagaagcccggaggagagccgttgctgaaaaccagccttttttgattgaggcaatgacgtacaggatcgggcaccattctaccagtgatgacagtagtgcatacaggagcgtggatgaagtgaattactgggataagcaggatcacccaatttctaggctgcggcattatctattatctcagggttggtgggacgaggagcaggaaaaggcgtggcggaagcagtcccgtcgcaaggtaatggaggccttcgagcaggccgaacgaaagccaaagcccaatccaaatctgctcttctccgatgtctatcaagagatgccagctcagctgagaaaacaacaggagtctctagctcggcatctgcaaacctacggagagcactatcctttggaccacttcgataag

SEQ ID NO: 249589 - DNA, 1335 bp, synthetic construct
  misc_feature 1..1335: note = Description of Artificial Sequence: Synthetic coding sequence
  source 1..1335: mol_type = other DNA
atggcagtggccattgccgctgcgagagtgtggaggctgaataggggcttgtcccaagcggcccttctgctgctccgccagccgggtgctaggggacttgctagatcgcaccccccgcgacaacaacaacagttctcgtcccttgatgacaagccgcaattcccgggagcctcagccgaattcatcgacaagctcgaattcatccagccaaacgtgatcagcgggatcccgatttacagagttatggaccggcaaggacaaatcatcaacccgtcggaagatccgcatttgcctaaggagaaagtcctgaagctctacaaatcaatgactctgctgaacactatggacagaatcctgtacgaatcccagcgccaaggacgcatcagcttttacatgaccaactatggcgaggaaggaactcatgtggggtccgccgctgccctggacaacaccgacctcgtgttcggccagtaccgggaggcaggagtgctcatgtacagagattatccgctggagctcttcatggcccagtgctacgggaatatctcagacctgggtaaagggcggcaaatgcctgtgcactacggttgcaaggagaggcacttcgtgactatctcgtcccctctcgctacccagatcccacaagcggtgggtgccgcttacgccgcaaagagagccaacgccaacagagtcgtcatctgttacttcggagaaggagcggctagcgaaggcgatgcacacgccggattcaacttcgcggcaactctcgaatgccctatcatcttcttctgccggaataacggatacgccatttccacgccgacttcggaacagtaccggggtgatggaatcgcagctcggggacccggctacggaatcatgtctatccgggtggatggaaacgatgtgttcgccgtgtacaatgcaaccaaggaggcccggcgccgcgccgtggccgagaaccaaccattcctcatagaagccatgacgtatcggatcggccaccactcgacctctgatgattcgtcggcataccgcagcgtcgacgaagtcaattactgggacaagcaagaccatccgatttctcggctgagacattacctgctgagccaaggatggtgggatgaagaacaagagaaagcctggcggaagcaaagccgccgcaaagtgatggaagccttcgagcaggccgagcgcaagcctaagccaaaccccaatctcttgttctcagatgtgtaccaggaaatgcccgcacagctgagaaagcagcaggagtccttggcgcggcacctccaaacttatggcgagcactaccctttggaccattttgacaag

SEQ ID NO: 249590 - DNA, 1335 bp, synthetic construct
  misc_feature 1..1335: note = Description of Artificial Sequence: Synthetic coding sequence
  source 1..1335: mol_type = other DNA
atggcggtagccatcgctgcagctcgcgtatggagactgaatagagggctctcacaggccgcactcttgctacttcggcagcccggagccagaggactagctaggtctcatccgcctagacagcagcagcagttcagttcgttagatgacaagcctcagttccctggggcctccgctgagttcatcgataagttggaatttatccagcccaacgtgatcagtgggatcccgatttacagagttatggatcggcaagggcagattatcaaccccagtgaggaccctcatctccccaaagaaaaagtgcttaaactctataaatctatgacactacttaacactatggataggattctatatgaatctcaacggcaggggagaatctcattctacatgacaaattacggggaagagggaacacacgtagggtcagcagccgccctcgataacacagatttagtctttgggcagtatagggaagccggagtgctgatgtatcgtgattatcctctagagctattcatggcacagtgttatgggaacatctctgatctcgggaaaggacgccagatgcccgttcactatggatgtaaagaacggcattttgttacaatatcctctccactggccacacagatcccccaggcagttggggccgcatatgcagccaaacgcgctaatgccaatagggttgtcatctgttatttcggggaaggagccgccagtgaaggggatgcccatgccgggtttaacttcgctgccactttagaatgccctatcatttttttttgtcggaataatgggtacgccatatcaactccaacgagtgaacaatatcgaggggatgggattgctgcccgcgggcccgggtacggaatcatgtctatcagagtggatggaaatgatgtattcgccgtatataatgctacaaaagaagcccggaggcgggcagtggcagaaaatcagccctttcttatcgaggccatgacttatagaatagggcaccattctacatcagacgattcatccgcttatcggtcagtggatgaagtgaattattgggataaacaggatcaccctatatctcggctccggcactatctcctatctcagggatggtgggatgaagaacaggaaaaagcctggcgaaagcaatctcggaggaaggtaatggaagcttttgagcaggccgaaaggaaacccaaaccaaatcccaatctcctcttctccgatgtataccaggaaatgccagctcagctccggaaacagcaggagtccttggctcggcatcttcagacatacggagagcactatcctttagatcattttgataaa

SEQ ID NO: 249591 - DNA, 1335 bp, synthetic construct
  misc_feature 1..1335: note = Description of Artificial Sequence: Synthetic coding sequence
  source 1..1335: mol_type = other DNA
atggcggtggcaatagccgcagccagagtgtggagactgaatcggggactgtcacaggcagcacttctgttgctgaggcaacccggggcgcggggacttgcacggagtcatccgccccgccagcagcaacaattctcgtcgcttgatgataagccacagtttccaggggcatccgctgagtttatagataagctcgagtttattcagccaaacgttatttcagggattccgatttatcgagtcatggacagacaaggtcagatcataaaccccagcgaagatcctcatcttcctaaggagaaagtgctcaaactgtacaagtccatgactctccttaataccatggaccggattctttacgaatcacaaagacaaggacggatttccttttacatgaccaactacggcgaggaaggtactcacgtgggatcggcagcagcgctggataataccgatcttgtgtttggacaataccgagaagcaggcgtgttgatgtatagagattaccctctcgagctgttcatggctcagtgctacggtaatatctccgacctggggaagggcagacagatgcctgtccattacggttgtaaggaacgccattttgtcaccatttcgtcccctcttgcaacccagattcctcaggctgtgggagcggcctacgcagcaaagagagccaatgccaaccgcgttgtgatctgttactttggcgagggtgcagcatcggaaggagacgcccatgcagggtttaacttcgctgcaaccttggaatgtcccataatcttcttttgccgtaataacggatacgcgattagcacccccactagcgaacaatatcgtggagacgggatcgcagcaaggggaccgggatacggtatcatgagcattagagtggatggtaatgatgtctttgcagtctacaacgcaactaaggaagcacgcagacgtgcagtggccgaaaaccaaccatttcttatcgaagcaatgacctacaggattgggcaccacagcacttcggacgattcctctgcataccgcagcgttgacgaggtgaactattgggataaacaggaccatccgatttccaggctgcggcattatcttctgagccaggggtggtgggatgaagaacaagaaaaagcctggcgcaagcaatcgcgccggaaagtgatggaagcatttgagcaggcagaacgtaagcctaagcccaaccctaatctcctcttttcagatgtgtaccaggaaatgccagcacagctgcgaaagcagcaagaatcccttgcccgccatctgcagacctacggcgagcattacccactggatcactttgataaa

SEQ ID NO: 249592 - DNA, 1335 bp, synthetic construct
  misc_feature 1..1335: note = Description of Artificial Sequence: Synthetic coding sequence
  source 1..1335: mol_type = other DNA
atggctgttgcaattgcagccgcgagagtatggcgcttaaaccgcgggctgtctcaagcggccttgcttctgttaaggcagcccggcgccaggggactggctcggagtcaccccccacgccagcagcagcaattcagctctctggacgataaaccccaatttccaggcgcatccgcggaattcattgataagcttgagtttatacagcccaacgtaatctcaggaatcccgatttaccgggtcatggaccgccagggtcagatcattaacccctctgaggatcctcacttgcccaaggaaaaggtcctgaagctgtataaaagcatgacactgctcaatacgatggaccgcattctttatgagagccagcgccaggggcgaatcagcttttacatgaccaactatggagaggaggggacccacgtgggctcagcggccgcactggacaacacagatcttgtgtttgggcagtacagagaggcgggagtactgatgtacagagactatccgctagaactattcatggcccagtgctacggcaatatctcggacttgggtaagggccggcagatgcctgtgcattacggctgtaaagagagacattttgtgacaatttccagcccgctggcaacacagattcctcaggctgtcggcgccgcgtacgctgccaagcgagccaacgctaatcgggtggtgatctgctacttcggggaaggggctgccagcgagggggacgcccatgccggcttcaacttcgccgcgacgttggagtgtcctattattttcttctgtaggaacaatggatacgccatcagtactcccacatccgaacagtaccggggggacggcatcgcagccagaggaccaggctatggcattatgtccattcgtgtcgacggtaatgacgtgttcgctgtgtataatgctacaaaagaggctagacggcgggcggtggctgagaaccaaccattcctgatcgaggccatgacctataggattggccaccactccacctccgacgatagcagtgcctacaggtcggtcgatgaagtgaactactgggacaagcaggaccatcccattagccggctcaggcattacctattgagccaaggatggtgggacgaagagcaggagaaggcgtggcggaaacaaagtagaaggaaggtgatggaagcctttgaacaggcagagcggaagccgaagccgaacccaaaccttttattttcggacgtgtaccaagaaatgcctgctcagcttaggaaacagcaagaatccttagcaagacacttgcagacttacggagaacactatcccctggaccattttgacaag

SEQ ID NO: 249593 - DNA, 1335 bp, synthetic construct
  misc_feature 1..1335: note = Description of Artificial Sequence: Synthetic coding sequence
  source 1..1335: mol_type = other DNA
atggcagtggcaattgcggcagcgcgcgtttggcggttgaacagaggtctttcgcaggcagcactgcttctgcttcgtcaaccaggggcaagggggctcgcacgatctcaccccccacgtcaacagcaacaattctcgagcctggatgataagccgcagttccctggggcctcggcggaattcatcgataaactggagtttatccaacctaatgtgatttccggaattcctatctacagagtgatggaccgccaaggacaaatcattaaccctagcgaagatccccacctgccgaaggaaaaggtcctgaagctctacaagtccatgactctgttgaacacgatggatagaattctgtacgaatcacagcggcagggacggatttcattttacatgactaactacggcgaagaaggtactcatgtgggaagcgcagcagccctcgataacactgatctcgtgttcggacagtatcgggaagcaggagtgctgatgtaccgcgactacccccttgaactgtttatggcacaatgttatggcaatatctctgaccttggaaaggggcggcaaatgcctgtgcactacggctgtaaagaaagacattttgtcaccatctcctcccccctcgcgacccagatcccccaagcggtcggcgcggcatacgcagcgaagcgcgcaaatgccaaccgcgtggtgatttgttactttggtgaaggagctgcgtcagaaggagacgcacatgcgggttttaacttcgcagcaactcttgaatgcccaatcattttcttctgtagaaacaacggatacgcgatctctacccctacttcggaacagtaccgcggtgacgggattgcagccagaggccctgggtacggtattatgagcatcagggtggacggcaacgatgttttcgcagtgtacaatgccaccaaggaagcccgaaggagagcggtcgcggagaaccagccgtttcttatagaggccatgacctacagaattggacatcattccacgtcggatgactcctccgcctaccgtagcgtggacgaagtaaactactgggacaaacaagaccatccaatcagcaggcttaggcactacctgctcagccagggatggtgggacgaggagcaggaaaaggcctggaggaaacagtcgcgtcgtaaggtgatggaagcgtttgaacaggcagaaaggaaacctaagccaaaccctaacctcttgtttagcgatgtgtaccaagaaatgcctgcacaactgcggaagcaacaggaatcgctggccagacacctccagacctatggagaacattaccctctggatcattttgacaaa

SEQ ID NO: 249594 - DNA, 1335 bp, synthetic construct
  misc_feature 1..1335: note = Description of Artificial Sequence: Synthetic coding sequence
  source 1..1335: mol_type = other DNA
atggctgtcgctattgccgcggcgagagtgtggcggcttaataggggcctgtcacaagcagcactcttgcttctgcgtcaacccggcgcccgcggcttggctcgctctcatccccccagacagcagcagcaattttcctccttggatgataaacctcagttccccggcgcaagcgccgaatttatcgacaaactcgagtttattcagccaaacgtaatcagcggcattccgatttatcgagtgatggaccggcagggtcagatcattaatccaagcgaagatccacatctccccaaagagaaagtgctgaagctctataagagcatgaccctgctcaatacaatggataggatactctacgagagccagcgacagggtaggattagcttttacatgacgaattacggggaggaggggacccacgttgggagcgcagccgcattggacaatacagatctggtcttcggacagtaccgcgaggcaggcgtcctgatgtatcgtgactaccctctagagctctttatggcacagtgctatggcaacatctctgacttgggtaaaggtagacaaatgcctgtccactacggctgcaaggaacggcactttgtcaccatttccagtccactcgccacccaaatcccccaggccgtgggcgctgcctacgctgcaaagcgtgccaacgccaatcgggtggtcatatgttactttggcgaaggcgccgcgtccgagggggacgctcatgccggcttcaactttgctgctactctggagtgccctataattttcttttgtcggaataatggttatgcgatatccaccccaacgagcgaacagtatcgaggtgacggaattgccgcacggggtcccggctatggaattatgtcaattcgtgtcgatggtaatgatgtgttcgcagtttataacgcgaccaaagaggcccgacgccgcgcggtggcagaaaatcagccttttttaatagaggccatgacatatcggattggacaccattctacctcagacgattcgagcgcctatcggtccgtggatgaagtcaattattgggacaagcaggaccacccaatctctaggctgaggcactatctacttagccagggctggtgggatgaagaacaggagaaggcctggaggaagcagagcagacgcaaagtcatggaagcctttgaacaggcagagcgcaagcctaagccaaaccctaatttactgttttcagatgtgtaccaagaaatgccagcacagctcaggaagcagcaggagtctctggcccgtcatctgcagacctatggagagcactatcccctcgaccacttcgacaaa

SEQ ID NO: 249595 - DNA, 1335 bp, synthetic construct
  misc_feature 1..1335: note = Description of Artificial Sequence: Synthetic coding sequence
  source 1..1335: mol_type = other DNA
atggccgttgcaatagccgccgctcgtgtgtggagactcaatcgcggcctatctcaggctgcactgctgttgttgagacagcccggcgcccgaggtctagcacgttcacacccacctagacaacagcagcagttctccagtctcgatgataaaccccagtttcccggcgcctctgcggagttcatagacaaactggagtttatccaacctaacgtgatctccggaatccccatctacagggtgatggaccggcagggacaaatcatcaatcctagcgaagacccccacttgccaaaggaaaaggtcctcaagctgtataagtcaatgactctcttgaatacgatggatagaatcctatatgagtctcaaagacagggcaggatttccttttacatgacgaattatggtgaagagggaacccacgttggctctgcagcagccctggacaatacggatttagtgttcggacagtatagggaggccggtgtgcttatgtatagggattaccccctcgagttgttcatggctcagtgttatggcaacatctccgacttgggcaaggggcgccagatgccagtgcactatggctgtaaggagaggcactttgtcactatatcatcaccattagcaactcaaataccccaggctgtcggagctgcttatgccgctaagagagctaacgcaaacagagtggtaatatgctattttggggagggcgccgcaagcgaaggggacgctcatgccgggtttaacttcgccgcaacactcgaatgccccataatatttttttgtcgtaataatgggtatgccataagtaccccaactagcgaacagtacaggggcgatgggatcgctgcaagaggacccggatacgggatcatgtcaatcagagtggacggaaatgatgtgtttgctgtgtataatgcgacaaaagaggccaggcgtagagcagtcgctgaaaaccagccattcctgattgaggccatgacctatcgaattggacaccactcaacatcagatgactcgtctgcataccgcagcgtggacgaggtgaactactgggacaaacaggatcaccccatcagcagattacggcactacctactgagccagggatggtgggacgaagaacaggaaaaggcttggcggaaacagagccgccggaaagtcatggaggcgttcgagcaggccgagagaaaacccaagcctaaccctaaccttctttttagtgacgtgtaccaagaaatgcctgcacaactgagaaagcaacaggagtctctggcacgccatcttcagacatatggcgagcactatcctttagaccattttgacaag

SEQ ID NO: 249596 - DNA, 1335 bp, synthetic construct
  misc_feature 1..1335: note = Description of Artificial Sequence: Synthetic coding sequence
  source 1..1335: mol_type = other DNA
atggctgtagcaattgcagcagctcgcgtctggcgattgaaccgtggactttcacaggccgcgctgttattgttacggcaacccggcgctcgcggtttagccagaagtcatcctccgagacagcagcagcaattttcttctctggatgataaaccgcagtttccgggcgcgtccgcagaatttattgacaagctcgaatttatccaaccgaacgtaattagcggcattccaatataccgcgttatggacagacaaggacagatcattaacccttcagaagatccacatctgccgaaagaaaaagtgctgaaattatataaatctatgaccctattgaatacgatggatcgtattctgtatgagagccagcgacagggacgcatttcgttttatatgacaaattatggagaagaaggaacacatgtaggttccgcggctgctcttgacaatacagacttggtattcggacagtacagggaagcaggagtcttaatgtatagagactatcctttggagctatttatggcccagtgctacggaaacatctccgatcttggcaaaggcagacaaatgccagttcattacggctgcaaagaaagacattttgttactatctcttcaccgttagcaacacaaattccgcaagccgttggagccgcttatgctgcaaaacgggcgaacgcaaatagggtggtgatctgctattttggcgagggcgcagcgagcgaaggagatgcacacgcgggattcaattttgccgcaacccttgaatgcccgatcattttcttttgtcgcaataatggatacgcaataagtacacctacatcagaacaatatcgtggtgacggcattgcagcgcgtggccctggttatggaataatgtccatacgggtggatggtaatgatgtctttgcagtttacaatgcaacgaaagaagcacgccgtcgtgccgtggcagaaaatcaacccttcctcatcgaggcgatgacctacagaattggccaccactcgacatccgatgatagctctgcttacaggagcgttgacgaagtaaattattgggataaacaggatcatccaatttcacgcctgcgccactaccttctcagtcaaggttggtgggatgaggaacaggaaaaagcctggcgtaaacagagccgtcgcaaagtaatggaggcattcgagcaagctgaacggaaaccgaagccgaatcctaaccttcttttttctgacgtttatcaggaaatgccggcacaattgagaaaacagcaagaatcacttgcaagacatcttcaaacgtatggcgaacattacccgttagatcattttgacaaa

SEQ ID NO: 249597 - DNA, 1335 bp, synthetic construct
  misc_feature 1..1335: note = Description of Artificial Sequence: Synthetic coding sequence
  source 1..1335: mol_type = other DNA
atggctgtggccatcgcagctgcccgagtctggcgtctgaatcgcggcctatcacaggccgccctcttgctgctgcggcagccaggcgccagaggccttgcaaggagccaccccccacgtcagcagcaacagttcagttcccttgacgacaagcctcagttccctggtgcctcagctgagtttatcgacaagctagaatttatacagcctaacgttatttcaggcatccctatctatcgcgtgatggacaggcagggacagattattaacccctccgaggacccgcatctgcccaaggagaaagtactgaagctttataaaagtatgaccctgctgaatactatggatcgcatactgtatgaatcccagagacaggggaggatttcgttctatatgacgaactacggagaggagggtacccacgtgggtagtgccgctgccctggacaatacagatttagtgttcgggcagtaccgagaagctggagtgctcatgtatcgggattatccactcgaattgtttatggcccagtgctacggaaacatttccgatcttgggaagggcaggcagatgcccgttcactatggctgtaaagagcggcactttgttaccattagcagtcctctcgcaactcagattccccaagccgttggcgcagcatacgcggcaaagcgggccaatgccaacagagtggtcatatgctactttggcgagggcgctgcgagcgagggcgacgcacacgctggctttaatttcgctgcgacgctggagtgccctatcatctttttctgtaggaacaacggctatgctatatcaactccgactagtgaacagtacagaggggacgggatcgccgcgcgtggtcccggttacgggattatgagcatacgggtagacggtaatgatgtttttgccgtgtataatgctaccaaggaagctagacgtcgcgctgtcgcggaaaaccaaccattcttgatcgaggctatgacctaccggatcggacatcattctaccagcgacgactcctcagcctaccgcagcgttgacgaagtcaattactgggacaaacaagatcacccaatcagcaggctgagacactatctgctgtcacagggctggtgggatgaggaacaggagaaagcttggcgaaagcagagccggagaaaggtcatggaggcgttcgagcaggcagaaaggaaacctaagcccaatccgaaccttcttttctccgacgtttaccaggagatgcctgcacagttgcgaaagcagcaggaatcgctggcacgccacctgcagacttatggggagcattaccccctcgatcattttgataaa

SEQ ID NO: 249598 - DNA, 1335 bp, synthetic construct
  misc_feature 1..1335: note = Description of Artificial Sequence: Synthetic coding sequence
  source 1..1335: mol_type = other DNA
atggcagtggccattgccgcagcgagagtctggcgtctgaaccgaggtttgagccaggccgcgctgctgcttctcagacaacctggtgcgaggggccttgccaggtcacatccacctcgacaacagcaacagttctcctcccttgatgacaagccacagtttcctggggcatcagcagaattcatcgataagctggagtttatccagccaaatgttatttccggcatacccatttaccgggtgatggacagacaaggtcaaatcattaacccttcagaagatccgcatttgcctaaagaaaaggtgcttaaactttacaagagcatgactctgctcaacacgatggacagaattctttatgagtcccagcgtcagggacgcatatcattttacatgacgaattacggtgaggaaggcacccacgtgggctcagcggcagcactcgacaacactgatctcgtgttcggacaatacagagaggcaggtgtgctgatgtaccgagactacccacttgagctgtttatggcacaatgctatggcaatatcagcgatctgggaaaaggaaggcagatgcctgtccactacggatgtaaggaacgccactttgtgaccatttcttcccccctcgcaacccaaatcccccaagcggtcggggcagcatacgctgccaagagggcaaacgctaatagagtggtcatctgttactttggagagggagcagcgtcggaaggggatgcacatgccgggtttaactttgcagccaccctcgaatgcccaatcattttcttttgtaggaacaacgggtacgctatctcgactcccacctcggaacagtaccggggagatggaatcgcggcccgtggtccggggtacggtattatgtccattagggtcgatggaaatgatgtgttcgcggtctacaacgcaactaaagaagcgagacggagagccgttgccgagaaccaaccttttcttatcgaggcaatgacgtacagaatcggtcatcacagcacttcggacgattcatcggcatacagatcggttgacgaagtcaactactgggacaaacaagaccatcctatctccagactcagacactaccttttgtcacaggggtggtgggatgaggaacaagaaaaggcatggagaaagcaaagccggcggaaggtgatggaagcattcgaacaagcggagagaaagcctaaacccaatccaaatttgctcttttccgatgtctaccaggagatgcccgcgcaactgcgaaagcagcaagaatccctggcgcgacatcttcagacctacggtgaacattaccctctggatcatttcgacaaa

SEQ ID NO: 249599 - DNA, 1335 bp, synthetic construct
  misc_feature 1..1335: note = Description of Artificial Sequence: Synthetic coding sequence
  source 1..1335: mol_type = other DNA
atggccgtcgccattgcggccgcccgcgtctggcgcttgaaccggggtttgagccaggccgccttgctgctgctccggcaaccaggggcacgtggcctggctagaagccacccgccccgtcagcagcaacagttcagctctctcgatgacaagccacagtttcccggggcatcggccgagttcatagataagctagagtttatacagcccaatgtgataagtggaatacccatctatcgagtgatggatcgacagggacagattattaatccatcagaagacccccacctcccaaaggaaaaggtccttaagctatacaagtctatgacgcttctgaacacgatggatcgcattctgtatgagtcccagaggcagggacggatcagcttttatatgactaattacggagaagagggaacccacgtgggcagcgcggccgccttggataacacggacctggtgttcggtcagtaccgcgaggccggtgtgctaatgtaccgagactaccctttggagctgttcatggcccagtgctatggcaacatatccgacctgggcaagggtcgacaaatgccggtgcactacggctgcaaagagaggcatttcgtcacaattagttccccactggccacccagatcccacaggcagtgggcgctgcgtacgccgcgaagcgggcgaacgccaaccgagtcgttatctgctacttcggagagggagcggcatccgaaggcgacgcccacgccggatttaacttcgcggcaaccctagaatgccccatcatcttcttttgtcgtaataacggctatgccattagtaccccgacgtccgaacagtatcgcggcgatggcatcgctgcaaggggtccaggctacggcattatgtcgattcgtgttgatggtaacgacgtattcgctgtctacaacgcgactaaggaggcacgacgccgagcagtcgccgagaatcagccgtttctaattgaagccatgacataccgtatcggacatcattcaacgtcggatgattcgtcggcctatagatccgtcgatgaggtaaactattgggataagcaggatcatcctatctcacgcttgcgccattacctgctgagtcagggttggtgggatgaggagcaggaaaaagcctggaggaagcagagtcgacgcaaagtgatggaggccttcgagcaggctgagagaaaacccaagcctaaccccaatctgctgttctctgatgtgtaccaagagatgcctgcccagttgcgaaagcagcaagagtcccttgcccgccacctgcagacctacggagaacactacccgcttgatcacttcgacaag

SEQ ID NO: 249600 - DNA, 1335 bp, synthetic construct
  misc_feature 1..1335: note = Description of Artificial Sequence: Synthetic coding sequence
  source 1..1335: mol_type = other DNA
atggccgtggcaatcgctgcagcccgcgtgtggcggctcaaccgcggcctctcgcaagccgccctgctgctgctgcgacagccaggagcacgcgggttggccagatcgcatccgccccgccaacaacaacaattctcaagcctggatgacaaaccccagttcccaggagcgtccgcggagtttatcgacaagctggagtttattcagccgaacgtcatctccggcatcccgatctaccgtgtcatggaccggcagggacaaatcattaacccatcagaggacccacatctccccaaggaaaaggtgctcaagctgtacaagtcaatgaccctgctgaataccatggatcggatcctctacgaaagccaacggcagggtcggatctccttctacatgacgaattatggggaagagggcactcacgttggctcagcagcggcactggataacactgacctggtttttggacagtatagagaggccggagtgttgatgtaccgggactaccctctggaacttttcatggcacagtgctacggaaatatctccgacctcggaaaaggacggcagatgcccgtccactacggctgcaaggaacgccatttcgtcactatcagctcccctctcgcaactcagatcccacaggccgtcggagcagcgtacgcggccaagcgcgccaatgcgaaccgggtcgtgatctgttacttcggagaaggtgcagccagcgagggcgatgcgcatgccggcttcaacttcgccgctaccctggaatgtccgatcattttcttttgccggaacaacggatacgcgatttccaccccaacgtcggaacagtatcgcggggacgggatcgccgcccggggaccaggatacggaattatgtcaatccgggtggacggaaatgatgtgtttgctgtttacaacgcgaccaaggaggctagacgcagagcggttgcggaaaaccaaccttttctcatcgaggcgatgacgtaccgcattggacatcactcaacctccgatgactcgagcgcttaccggtcagtggatgaagtgaactactgggacaaacaggatcatccgatctcacggctccggcattacctgctgtcacagggatggtgggatgaagagcaggagaaagcctggcggaagcaatctcgccgaaaagtcatggaagcctttgaacaggcggaacgcaagccgaagccgaacccaaatctgctgttttcggacgtctatcaggagatgcccgcccaactgcggaagcagcaagaatcgcttgcgaggcacctccaaacttacggagagcactatccgctggaccacttcgacaag

SEQ ID NO: 249601 - DNA, 1335 bp, synthetic construct
  misc_feature 1..1335: note = Description of Artificial Sequence: Synthetic coding sequence
  source 1..1335: mol_type = other DNA
atggcagtcgcaatagccgcagcacgagtgtggcgccttaatcggggattgtcacaagcagcacttcttctgctcagacaaccaggagctagaggtctggcaagatcccaccctccacgccagcagcaacaatttagttccttggatgataagccccagtttccaggtgctagcgccgaattcatcgacaaattggagtttatacaaccaaacgtgatatcggggattcctatctacagagtgatggacaggcaaggtcagatcatcaatccgtcagaggaccctcatcttcccaaggaaaaggtgctgaagctgtacaagtcgatgacccttctgaacacgatggacagaatcctgtacgaatcccagcggcagggtcggatttcattctacatgactaactacggggaagaggggactcacgttggatcagccgcagccctcgacaacacggatctggtttttggacagtacagagaagcaggtgtgcttatgtacagagattaccccctggaacttttcatggcacagtgttacggcaatatcagcgaccttgggaagggacggcaaatgcccgtgcattacggatgtaaggaaagacactttgtgactatttcgagcccgctcgccacgcagattccgcaagcagtgggtgcggcatacgcagcaaagagggctaacgccaacagggtggtgatttgttactttggtgaaggagcagcaagcgagggggacgcgcatgcaggcttcaattttgcagcgaccctggaatgccccatcatattcttctgccggaacaacggctacgcaatatcgactccgacctcggagcagtatcggggtgatggaatcgccgcaagaggccccggttacggaattatgtcgattagagtggacggcaacgatgtatttgcagtgtacaatgccaccaaagaggcaagacgaagggcagtggcagaaaatcagccttttttgattgaagccatgacttacagaatcggccatcacagcaccagcgatgattcgtcagcgtacagaagcgtcgatgaggtcaattactgggataaacaagaccatccaatatcaaggcttagacattatctcctgtcacaggggtggtgggacgaagagcaggaaaaggcatggcgcaagcaaagcagaaggaaggtcatggaagcattcgaacaggccgaaagaaagccaaagcctaaccctaacctgcttttcagcgacgtctaccaagaaatgcccgctcagctgcgcaaacaacaagagagccttgcaagacatctgcaaacctacggagaacattaccctctggatcattttgataag

SEQ ID NO: 249602 - DNA, 1335 bp, synthetic construct
  misc_feature 1..1335: note = Description of Artificial Sequence: Synthetic coding sequence
  source 1..1335: mol_type = other DNA
atggccgtagccattgccgccgctagggtgtggcggttgaatcgcgggctgagccaggctgccctgctgttgttgcgacagccaggcgcacggggcctggcgcgaagccatccaccaaggcagcagcagcagttctctagccttgacgataaaccacagtttcccggcgcaagtgcagagtttatcgacaagctggagtttattcagccgaatgtgattagcggaatccccatatatcgggtgatggatcgccagggtcagatcatcaaccccagtgaggacccgcacctgccaaaggagaaagtactgaagctctataagagcatgaccctgctgaacactatggatagaatcctctatgagagccagaggcaagggaggatttccttctatatgaccaattacggggaggaagggacacatgtaggctccgccgctgcactcgacaatacggacctggtctttggacaatatcgggaagccggggtcctgatgtaccgagattacccgctggaactgtttatggcccaatgttacgggaatatctccgacctgggaaagggcagacagatgcccgtgcattatggttgcaaggaaagacatttcgtcaccatcagtagcccgctcgccacacagatacctcaggcggtaggggctgcatacgctgccaaaagagctaatgcaaatcgcgtggtaatttgttactttggagaaggggcagcctcagagggagacgctcacgcaggctttaattttgcagcaacactggaatgtcctatcatcttcttctgtcgaaacaacgggtacgcaatctccacacctacatccgagcagtaccggggcgacggcattgctgcacgggggccaggctacgggatcatgagtattcgggtggatggcaatgatgtgtttgccgtgtacaatgcaacaaaggaggccagaagacgagctgtcgccgagaaccaacctttcctgatcgaggccatgacataccggattggacatcacagcacaagtgacgacagttctgcctacagatccgtggacgaggtcaattattgggataaacaggatcacccgatctcccggctgagacactatctgctgtcccaggggtggtgggacgaggaacaggaaaaagcatggagaaagcaatcccggcgaaaggtcatggaggccttcgaacaggcggagcgcaaacccaagcccaatcctaacctgctgttctctgacgtgtaccaggagatgcctgctcagctgagaaagcaacaggaatccctcgctagacacctgcagacttacggcgaacactacccactggaccatttcgacaaa

SEQ ID NO: 249603 - DNA, 1335 bp, synthetic construct
  misc_feature 1..1335: note = Description of Artificial Sequence: Synthetic coding sequence
  source 1..1335: mol_type = other DNA
atggcagtggctattgccgctgcgagagtgtggagactgaacagaggactgtctcaggcggcgttgttgctcctgcgtcagccgggtgcacgtggactcgcacgatcccaccctccacggcagcaacaacagttttcgtccctcgacgataaaccgcaattccctggggcctcggctgagttcatagataagctggaattcatccaacccaatgtcatttcgggcatacctatatacagggtcatggataggcagggacaaatcatcaatccctccgaggatccacatctgccaaaggaaaaggtgcttaagctgtacaaaagcatgacgctcctgaataccatggataggattctgtacgagtcccaaagacagggcagaatctccttttacatgaccaattacggagaggagggaacccatgtgggctcggctgctgcactggacaacactgatctggtctttggacagtacagggaagcgggagtgcttatgtaccgggactatccccttgaactcttcatggcccagtgttacggcaacatatcagacctggggaagggacggcaaatgccggtccactacggatgtaaggaaaggcactttgtgacgatttccagcccactggcaactcagatccctcaagccgtcggggcggcatatgcagcgaagcgtgcaaacgcgaatagggtggtgatctgctactttggcgagggagcagcaagcgaaggcgacgcacatgcagggtttaacttcgccgcgactctggaatgtccaataatcttcttctgtcgtaataacggctacgcgatttcaactccaactagcgaacaataccgtggagatggaattgcagcaaggggacctggctacgggattatgtccattagagtggacggtaatgatgtctttgcggtttacaatgcaaccaaggaagcacgccgtagagcagtggcagaaaaccaaccttttcttattgaggcaatgacgtaccggattggacatcactcaacttcggatgattccagcgcataccggtcggtggacgaagtgaactactgggacaagcaggaccatcctatctcgcgcctgcgccattaccttctgtcgcagggctggtgggacgaagaacaggagaaagcatggcgaaagcaatcgagacgaaaggtgatggaggcctttgaacaagcggagcggaagcccaaaccgaacccaaacctccttttcagcgatgtgtaccaggaaatgccagcacaactgcgtaagcaacaggaatccctcgcgcggcatcttcagacttacggagagcattatccactggatcactttgataaa

SEQ ID NO: 249604 - DNA, 1335 bp, synthetic construct
  misc_feature 1..1335: note = Description of Artificial Sequence: Synthetic coding sequence
  source 1..1335: mol_type = other DNA
atggccgtggctatagccgctgcacgtgtgtggcggttaaacaggggactgtctcaggctgccctgctgctactgaggcaacccggggcccgtgggctagcccggtctcaccccccaagacaacaacagcagttctcttcccttgacgacaagccccaattccccggtgcatcagctgagttcatcgataaacttgagttcatccaaccaaacgtcattagtggtattccaatttaccgtgtcatggatcgtcagggccagatcatcaatcctagtgaggacccccacctgcctaaggagaaagttctcaagctctataaatctatgactcttctgaacacaatggacagaatactgtacgagtctcagcggcagggtaggatcagcttctatatgacaaactacggtgaggaggggacccatgtcgggtccgctgctgccctggacaacactgatctagtgttcgggcagtaccgggaagccggtgttctgatgtatagagactaccctctggaactgtttatggcccaatgctacggaaacatatcagatctgggtaagggccgtcagatgcccgttcactatggttgtaaagagaggcacttcgttaccatctctagtccactagcaacacagatcccacaggctgttggcgcagcctatgctgctaaacgcgcaaacgccaaccgcgtggtcatctgttattttggggagggagccgcctccgagggcgacgctcacgcaggctttaatttcgcagctaccttggagtgtccaattatcttcttctgtcgaaataacggttacgcaatatctacccctactagtgaacaatacaggggcgacggtatcgccgccagaggcccaggatacgggataatgagcatcagagtggatggaaacgacgtcttcgccgtctataatgccaccaaggaggctagacgccgcgccgtcgctgagaaccagccattcctaatcgaagcaatgacttatagaataggccaccacagcacttctgacgattctagcgcctaccgcagtgttgacgaggtgaattattgggataagcaggaccatccaatatctaggctgcgtcactacctgttaagtcagggatggtgggatgaggagcaggaaaaggcatggcggaaacagtctaggcgtaaggttatggaagcatttgagcaggccgaacgcaaaccaaaacctaaccctaaccttctgttctccgatgtttaccaagaaatgcctgcccaacttagaaaacagcaggagagcctcgctcggcacctgcagacctacggagagcattaccctctggaccacttcgataag

SEQ ID NO: 249605 - DNA, 1335 bp, synthetic construct
  misc_feature 1..1335: note = Description of Artificial Sequence: Synthetic coding sequence
  source 1..1335: mol_type = other DNA
atggcagtggcaatagcagcagcaagagtgtggcgtttgaatcgggggctttctcaggcagcacttcttcttcttaggcaacctggtgcacgtggactggcaaggtcccaccctccccgacaacaacaacaattttcatcgctcgacgacaagcctcagtttccaggtgcatccgcggagttcattgataaactcgaattcattcagcccaacgtcatctccggcatccccatctaccgcgtcatggatagacagggacagattatcaacccatccgaagatccacatctgccgaaggagaaggtgcttaagctgtacaagtccatgaccctgctgaacactatggatcggattctttacgaaagccaaaggcaagggcgtatttcgttctacatgactaactacggagaagagggtactcacgtgggctccgcagcagcactggacaataccgacctggttttcggacaatacagagaagccggtgtgcttatgtacagagactaccccctggaactgtttatggctcagtgctacggaaacatctccgacctgggaaagggtaggcaaatgccagtgcactacgggtgtaaggagaggcactttgtgaccatatcgagcccactcgcaactcagattcctcaggcagtgggagccgcatacgcagcaaagcgcgcaaacgcgaatagagtggtcatttgttacttcggagagggcgcagcatcggagggagatgcacatgcaggttttaactttgcggcgactctcgaatgtccaatcattttcttttgcagaaataacggttacgcaatcagcactcctaccagcgagcaataccgtggtgatggtatagctgcacgcggtccgggatatggaatcatgtcgatcagagtggatggtaacgacgtgttcgcagtgtacaatgcgactaaagaagcccgtagacgcgcagtggccgagaaccagcctttcttgatcgaagcgatgacctacagaatcggacaccactccacctcagatgactcctcagcctaccggtcagttgacgaggtgaattactgggataagcaagatcatcccatatcccgacttaggcactaccttctgtcccaaggatggtgggacgaggagcaggagaaggcctggagaaaacagtcacggagaaaggtgatggaagcgttcgaacaagcagaaagaaaacctaagccaaacccgaacctgcttttttcagacgtgtaccaagaaatgcccgcccagcttaggaagcaacaagaatcgttggcaagacatctgcagacctacggggagcattaccctcttgaccatttcgacaaa

SEQ ID NO: 249606 - DNA, 1335 bp, synthetic construct
  misc_feature 1..1335: note = Description of Artificial Sequence: Synthetic coding sequence
  source 1..1335: mol_type = other DNA
atggccgtggccattgctgccgcgcgcgtctggcgtctcaataggggcttaagccaggccgcacttctgctgctgcgccagcctggagctcgtggcctggcccgcagccacccacctcgtcagcagcagcaattttcttcgctagacgacaagcctcagttccccggcgcaagcgccgagttcatcgataagctggagttcattcagcctaatgtgatcagcggcattcctatttatcgtgtgatggatcgccaaggccagatcatcaacccttctgaggacccgcatcttcctaaggaaaaggtgctcaagctatacaagagcatgactctgctgaataccatggatcgcattctgtacgaatcccagcggcagggcagaattagcttctacatgacgaactacggcgaggaaggcacacacgtgggttccgctgcggcactggataacaccgatttagtgttcggtcaatatcgcgaagcgggagtcctgatgtaccgtgactacccgctggagcttttcatggcacagtgctacggaaacatcagcgacctgggcaaaggtcgtcaaatgcctgtgcattacgggtgcaaagaacgccattttgtgactataagctctccgcttgccactcagattccgcaggcagtcggagccgcatatgctgcgaagcgggcaaatgcgaaccgcgtggtgatttgttacttcggcgagggagcggcctcagagggggacgcccacgccggcttcaacttcgccgccacactcgaatgcccgattattttcttttgcagaaataacgggtatgcgatttcaaccccgacttctgagcagtatcgtggcgacggaattgcggctcgaggtccaggttatggcataatgtccatccgggtggacggcaatgacgttttcgcagtttataatgcaaccaaggaagcccggcgcagggcggttgccgagaatcaaccttttctgatcgaggctatgacctatcgaattggtcaccatagcaccagcgacgattcttccgcctaccgctcggtcgacgaagtaaactactgggataaacaggatcacccaatcagccgcctgcgccattacctgctgagccaaggttggtgggatgaagagcaggaaaaggcctggcgtaaacagtcacgtagaaaggttatggaggccttcgagcaggcagaacgcaagccaaagccgaacccgaacctgctcttcagtgatgtttaccaagaaatgccagcacagctgcgcaagcagcaggagagtcttgcgcgtcacctgcagacctacggtgagcattatccactggaccacttcgacaag

SEQ ID NO: 249607 - DNA, 1335 bp, synthetic construct
  misc_feature 1..1335: note = Description of Artificial Sequence: Synthetic coding sequence
  source 1..1335: mol_type = other DNA
atggccgtggcaatcgctgcagctcgagtgtggaggttgaaccgcggactatcacaggcagccttactgttactccggcagcccggcgcaaggggcctagctcgctcccatcccccacgtcagcagcaacagttctcgtccctggacgacaagccgcagttcccaggggcctccgctgagtttattgacaagctggaatttatacaacccaatgttatctcaggcatccccatctatcgtgtcatggaccggcaggggcagattatcaatccatccgaagatccacatctgcctaaggaaaaggttcttaaactttacaagtctatgactctgctaaacactatggacaggatcctctacgagtcccagcgtcagggtcgcatttctttttatatgaccaattatggagaggaagggacgcatgtggggagtgccgccgcacttgataataccgatttggttttcgggcaatacagagaggcgggggtactgatgtaccgcgactatccactagaattattcatggcacaatgctacggaaacatcagtgatctcggcaaggggaggcagatgcctgtccattatgggtgtaaggaaaggcactttgtgaccatttctagccctctggctactcagatccctcaggccgtaggcgccgcatacgccgccaaaagggccaacgccaatagagtggtcatatgttacttcggcgaaggcgccgctagcgaaggggacgcccatgctggatttaatttcgcggcgacgctcgaatgccccattattttcttttgtcgtaacaacggctacgcgatctccacaccgacgtccgagcagtatcggggagacggaatcgcagctagaggtccgggttacggtataatgagcataagggttgacggcaacgatgtttttgccgtgtataatgctaccaaagaagcccgccggcgggcagtggctgaaaaccagcccttcttgattgaggccatgacctatcgcatcggacatcactctaccagcgacgactcaagcgcatacaggagcgtagacgaggtgaactattgggacaagcaggaccaccccatcagtcgactccgccattacctgttaagtcagggctggtgggacgaagaacaggagaaggcgtggcgcaagcaaagccggagaaaagtgatggaggcttttgagcaggcggagcgcaaaccaaagcctaatccaaacctactcttctctgacgtataccaggagatgcctgctcaacttcgaaagcaacaagagtctctcgcacgacacttgcagacttacggggaacactacccgctcgatcactttgacaag

SEQ ID NO: 249608 - DNA, 870 bp, synthetic construct
  misc_feature 1..870: note = Description of Artificial Sequence: Synthetic coding sequence
  source 1..870: mol_type = other DNA
atgatcgaaactgacagcggggtggacgatgatatggcctgccataagatcccggtcgaggccgacttcctctacgcatactcgaccgcaccaggttactatagctggcgtaatagcaaggatggatcatggtttatccaatcactctgtgccatgctcaagcagtacgcggataagctggagtttatgcatatcctgacccgtgtgaacaggaaggtggcaactgaatttgagtcattctcctttgatgcaaccttccatgcaaaaaagcaaattccctgtatcgtctccatgttgactaaggaactgtacttctaccatgacgaggtggacggtggaagccctatggaaaataccgaaaatagcgtggatagcaagtcgatcaagaacttggagcccaagataatccatggttcggaatcgatggactccgggatctcgttggataactcctacaagatggattatccagaaatggggctctgtattatcattaacaacaagaatttccacaaatccactgggatgaccagccggtcgggcactgatgtggatgcggccaatctgagagaaacctttagaaaccttaagtacgaagtgcgcaacaagaatgatcttactagggaagaaattgttgaactcatgcgggatgtgagcaaggaagatcactccaagagatcctccttcgtgtgtgtgcttctgtcgcatggagaagaaggaatcatttttggtactaatggtcctgttgaccttaagaaaatcactaatttctttagaggtgatcgctgcaggtcccttactggtaaaccaaaacttttcattatccaggcgtgtcgcgggaccgagctggattgtggaattgaaaccgat

SEQ ID NO: 249609 - DNA, 870 bp, synthetic construct
  misc_feature 1..870: note = Description of Artificial Sequence: Synthetic coding sequence
  source 1..870: mol_type = other DNA
atgatcgagactgactccggagtggacgacgatatggcatgccacaagatcccggtggaagcagatttcctttacgcttacagcacggcaccggggtactactcgtggcggaattcgaaagacgggagctggttcatacagagcctgtgcgccatgctcaagcaatacgcagacaaattggagttcatgcatatcctgactcgcgtgaacaggaaggtggcgacggagttcgagtcattcagtttcgatgccactttccacgccaaaaagcagatcccctgtattgtgtcaatgctcactaaggaactgtacttttatcacgacgaagtggatggaggatctcctatggagaacaccgaaaattctgtggactcgaagtcaatcaagaatctggagccgaagatcatccacggatcggaatccatggactcaggcatcagcctggataactcctacaaaatggactacccggagatgggactctgcattatcatcaataacaagaactttcacaagtcgaccgggatgactagcaggtcgggcactgacgtcgatgcagctaatttgagagaaactttcagaaatcttaagtacgaagtgcgcaataagaacgaccttacccgagaggaaatcgtggaactgatgcgagatgtctccaaggaagatcactctaaacgcagctcctttgtgtgcgttcttctgtcccatggagaggaaggcattatctttggcactaatggaccagtcgatctcaagaagatcaccaatttcttcaggggcgaccggtgtcggagcctgacgggaaagccgaaactgttcatcatccaggcatgccggggaaccgaactggactgcgggattgaaactgac

SEQ ID NO: 249610 - DNA, 870 bp, synthetic construct
  misc_feature 1..870: note = Description of Artificial Sequence: Synthetic coding sequence
  source 1..870: mol_type = other DNA
atgatagagacagactccggggtggatgatgatatggcctgccacaagataccagtggaagctgatttcctgtacgcctacagtactgctcctggatattacagttggagaaattcgaaggatgggtcttggtttatccagtccttgtgcgcaatgttaaaacaatatgcagacaaactggagtttatgcacatccttactcgcgtgaataggaaggtggccacagagtttgagagctttagctttgatgcaacattccatgccaagaaacaaatcccatgtatcgtgtcaatgctcacgaaagagttgtacttttatcacgatgaagtggacggcggcagcccaatggagaatacagagaattccgtagactctaagagcataaaaaacttggagcctaaaataatccacgggtcagagtcaatggacagtggcattagcctggataatagttacaaaatggactaccctgaaatgggcctatgtatcatcattaataacaaaaatttccacaaatccacgggcatgaccagcagatccggaacagacgttgacgccgccaacctgagggagacctttaggaacctgaagtatgaagtgcgcaacaaaaatgacctcacccgggaggagatcgtggagctgatgcgtgacgtttctaaagaagatcacagcaagcgcagtagttttgtttgtgtactattatcgcacggggaggaaggcattatttttggcactaacggccctgtggatctgaaaaaaataaccaacttcttccgtggggacaggtgccgatctctgacaggcaaacccaagttgttcattattcaggcttgtcgcggcacggagttagattgtggtattgagactgac

SEQ ID NO: 249611 - DNA, 870 bp, synthetic construct
  misc_feature 1..870: note = Description of Artificial Sequence: Synthetic coding sequence
  source 1..870: mol_type = other DNA
atgatagagaccgattcaggtgtcgacgacgacatggcttgccacaaaattcctgtcgaggcggattttctgtatgcatactctactgctcctggttattactcttggaggaattccaaagacggcagttggtttatccagtctctgtgcgctatgctgaagcagtacgccgacaagctggagttcatgcacattctgacaagagtaaaccgcaaagtggctaccgaatttgagtccttctcttttgatgcaacattccacgcgaaaaaacagatcccttgcatcgtgtccatgctgacgaaggaactgtacttctaccatgacgaggtggacggcggttctcccatggagaatacagagaacagcgtggactctaagtccatcaaaaacctcgaacccaaaattattcatggttctgaatctatggattctggaatttctcttgacaacagctataaaatggactacccagagatgggtctctgcattataatcaacaacaagaactttcacaagtctactggaatgacctctcgctccggcaccgacgtggatgccgccaacttgcgcgagacatttaggaacttgaaatacgaggtaaggaataaaaacgacctgaccagggaagaaatcgtggaacttatgagagacgtgagtaaggaggatcattccaagaggtcatccttcgtctgcgttctcctctcacacggagaagaaggcataatttttggcacaaacggacccgtggatttgaagaagatcactaactttttcaggggcgataggtgtcgctcactgacgggaaagcctaagttgttcattatacaagcatgtaggggtacagaactggattgtggaatcgagaccgac

SEQ ID NO: 249612 - DNA, 870 bp, synthetic construct
  misc_feature 1..870: note = Description of Artificial Sequence: Synthetic coding sequence
  source 1..870: mol_type = other DNA
atgatcgaaacggacagcggtgtcgacgacgacatggcttgtcataagatcccggtggaagccgacttcctgtatgcgtatagcaccgcccctggatactactcctggcggaattcgaaggacggctcctggttcatccaatccctctgtgcgatgcttaaacagtacgctgacaaactggagttcatgcacattctgactcgcgtaaacaggaaggtggctactgagttcgaatcgtttagtttcgatgcaacctttcacgccaagaagcagatcccatgcatcgtgtccatgctgactaaggaactgtacttttaccatgatgaggtggatggaggatcaccgatggagaacaccgaaaattcggtcgactcgaaatcaataaagaacctggaacccaaaatcatacatggctcggaatcaatggattctggtatctcactcgacaactcatacaagatggattacccggagatgggactctgcatcatcatcaacaacaaaaacttccacaagtccactggtatgacctctaggtccgggaccgatgtggacgcagcaaatttgagggaaacgttccgtaatctcaaatacgaagtgaggaataagaacgacctgactcgcgaggagatcgtcgagctgatgcgggacgtgtctaaggaggatcacagcaaacggtcgtcgttcgtttgcgtgctcctgtctcacggagaagaagggattatctttggaaccaacgggccagtcgacttgaagaagatcaccaacttcttccgcggagatcggtgccgcagcctgactggtaagcctaaacttttcatcattcaggcctgccgaggcactgagttggattgcggcatagaaaccgac

SEQ ID NO: 249613 - DNA, 870 bp, synthetic construct
  misc_feature 1..870: note = Description of Artificial Sequence: Synthetic coding sequence
  source 1..870: mol_type = other DNA
atgatcgaaactgacagcggagtcgatgatgatatggcttgccacaaaatccctgtcgaagcggacttcttgtacgcctactccaccgcacccggatactactcctggagaaatagcaaagatggttcctggtttatccagtcgctctgcgctatgctgaaacagtacgccgataagctggagtttatgcacatcctgacccgcgtcaaccgcaaagtggctaccgagtttgagtcgttctccttcgatgcaactttccatgcgaaaaagcaaatcccgtgcatcgtgtcaatgttgaccaaagaactgtacttttaccacgacgaagtcgacggaggctccccgatggagaatactgagaactcggtcgattcaaagtcgattaagaatctcgagccgaaaatcatccacggatcggagagcatggactcaggaattagcctcgataactcgtacaagatggattatcctgagatgggtctgtgtatcatcatcaacaataagaatttccataagtcaactggtatgacttccagatcgggaaccgatgtggacgcagccaacctcagagagactttcaggaacctcaagtacgaagtgcgcaacaagaatgaccttactcgggaggaaatcgtcgagttgatgcgcgatgtgtccaaggaggaccactcgaagcggtcctcgtttgtgtgtgtgctgctgtcacacggtgaagaaggaatcatctttggaactaatggaccggtcgatctcaagaaaatcactaacttcttcagaggtgatcgatgcagatcgcttaccggaaagccgaagctgttcatcatccaggcatgcagaggcacggaactggactgcggcattgaaaccgac

SEQ ID NO: 249614 - DNA, 870 bp, synthetic construct
  misc_feature 1..870: note = Description of Artificial Sequence: Synthetic coding sequence
  source 1..870: mol_type = other DNA
atgatcgaaacagactctggagtggacgatgacatggcttgtcacaagatccccgtcgaggcggatttcctttatgcctatagtactgcacccggctactattcctggcgtaattctaaggacggcagctggtttatccagtcgctatgcgctatgctgaagcagtacgcagacaagctggaatttatgcatatcttgactagagtgaaccggaaggtggctacggagtttgagtcattttcttttgatgcgacttttcacgcaaagaagcagataccttgcatagtgtccatgctgacaaaagaactctatttttatcacgacgaagtcgacggtggatctccaatggagaacaccgaaaattcagtggattcaaagtcaatcaagaacctcgagcctaaaattatccatggatcggaatccatggactccggaatttcactggataattcttacaaaatggactatccagaaatgggactttgcatcattatcaacaataagaattttcacaaatctaccgggatgacgagcagaagcgggacagacgtcgatgccgcaaacctgagggagacttttcggaatttaaaatacgaagtccggaacaagaatgatctcacccgcgaggaaatcgtggagctaatgagggatgtgagtaaggaggaccacagcaagaggagctctttcgtttgtgtgctgctgtcccacggcgaagaaggaataatatttggaacgaatggacccgtggatcttaagaagatcaccaatttctttcgtggagaccggtgtcgctcccttacaggcaagccgaagctcttcatcatccaggcatgcagaggcaccgagctcgattgcggcatagagactgat

SEQ ID NO: 249615 - DNA, 870 bp, synthetic construct; identical to SEQ ID NO: 249610
  misc_feature 1..870: note = Description of Artificial Sequence: Synthetic coding sequence
  source 1..870: mol_type = other DNA

SEQ ID NO: 249616 - DNA, 870 bp, synthetic construct
  misc_feature 1..870: note = Description of Artificial Sequence: Synthetic coding sequence
  source 1..870: mol_type = other DNA
atgatcgaaaccgacagcggagtggatgatgacatggcttgccacaaaatcccggtggaagcagatttcctttatgcatatagtaccgcgccgggctactacagctggcggaattcgaaggatggatcgtggttcatccaatcgctgtgcgccatgctcaagcagtacgcggacaaactcgagttcatgcacatccttacccgagtcaaccgcaaggtcgcaaccgagttcgaatcgttctcgttcgacgccactttccatgctaaaaagcagatcccatgtatcgtgagcatgctgactaaagagctctacttctatcatgacgaagttgacggaggctcaccgatggaaaacaccgaaaattcagtggattccaagtccattaagaacctggaacccaagataatccacggttccgaaagcatggactcaggcatctccctggacaattcctacaagatggactaccctgagatggggctgtgcatcatcattaacaacaagaatttccacaaatcaaccggcatgacttcacgctccggaaccgacgtggacgccgcaaatctgagagagacttttcgcaacctcaagtacgaagtccgtaacaagaacgatctcacccgcgaggaaatcgtggaactgatgcgcgacgtctccaaggaggatcattcgaaacggtcgtcttttgtctgcgtgctgctttcacacggagaggaaggcataatctttgggaccaacggaccagtcgatctgaagaaaatcactaacttctttcggggcgatcgctgtagatcattgactggaaagccgaagctcttcataatccaagcgtgcaggggaaccgagctggattgcggcattgaaaccgac

SEQ ID NO: 249617 - DNA, 870 bp, synthetic construct
  misc_feature 1..870: note = Description of Artificial Sequence: Synthetic coding sequence
  source 1..870: mol_type = other DNA
atgatcgaaaccgattccggagtcgatgacgatatggcgtgtcacaagattcctgtggaagcggacttcctttacgcatacagcacggcaccaggatactacagctggcggaatagcaaggatggttcgtggtttattcaatcactttgtgctatgctcaaacagtacgcagataaactggaattcatgcatatcttgaccagggtgaaccggaaggtggccactgaatttgaatccttttcgttcgatgcaactttccacgctaagaagcagattccatgtattgtgtccatgcttactaaggaactctacttctaccatgacgaagtcgatggaggatcacccatggaaaacaccgagaacagcgtggattcaaagtcgattaagaatcttgagccgaaaatcatccacggctcggagagcatggattctggtatttcactggataattcatacaaaatggattacccagagatggggctgtgtattatcatcaataacaaaaactttcacaaaagcactggcatgacttcccggagcgggacggatgtcgatgcagcaaaccttagagaaaccttcaggaatcttaagtacgaagtgaggaacaagaatgatctgactcgagaagagattgtcgaactgatgagagatgtgtcgaaggaggaccactcaaaacggtcgtcatttgtgtgtgtgcttcttagccacggagaagaggggatcatttttggaactaatgggcctgtcgatctcaagaagataactaactttttccgcggagatagatgccgttcactgaccggcaagccaaaacttttcattatacaggcatgcaggggtactgaacttgactgcggcatagaaaccgac

SEQ ID NO: 249618 - DNA, 870 bp, synthetic construct
  misc_feature 1..870: note = Description of Artificial Sequence: Synthetic coding sequence
  source 1..870: mol_type = other DNA
atgattgaaacggactctggtgttgatgacgatatggcttgtcacaaaataccagtcgaggccgacttcctgtatgcctattcaacagctccgggatattattcatggagaaactcgaaagacggatcgtggttcattcaatctctgtgtgctatgttaaaacagtacgctgataagctagagttcatgcatatcttgacacgtgtaaaccgtaaagtggctacagagttcgaaagtttctccttcgacgcaacatttcatgctaaaaaacaaattccgtgtatagtctccatgctaacaaaagaactctatttctaccatgatgaagttgatggaggatcccctatggaaaatactgagaattcggtggacagtaagtctattaaaaatttggaacccaagattattcatggaagtgaatcaatggattcaggtatctcacttgataattcttataaaatggattatcctgaaatgggactttgtatcattataaacaacaagaattttcacaaatctacaggaatgacttctagatccggcactgatgtagatgctgctaatttgcgtgaaacatttagaaatcttaagtacgaagtgagaaacaaaaatgatttgacccgagaagagatagtagaacttatgcgagatgtgagtaaggaagatcacagtaagcgttcatcttttgtttgcgtacttctgtcgcatggagaggaaggaatcatctttggaactaacgggccagtcgatctaaagaagattacaaattttttccgcggagatcgatgccgatctcttaccggaaaacccaaactcttcataattcaagcatgtcggggtactgaacttgactgtggaatagaaaccgac

SEQ ID NO: 249619 - DNA, 870 bp, synthetic construct
  misc_feature 1..870: note = Description of Artificial Sequence: Synthetic coding sequence
  source 1..870: mol_type = other DNA
atgatcgagaccgacagcggagtcgatgatgacatggcctgtcataagatcccagtggaggccgacttcctgtatgcctactcaactgcgccaggatattattcatggcgtaattccaaggacggatcctggttcatccagtctctgtgtgccatgcttaagcagtatgctgataagctggaattcatgcacatcttaacaagagttaataggaaagtagcaacggagtttgaatctttctcatttgacgcgacatttcatgcaaagaaacagatcccttgtatcgtctccatgctgacaaaggagttgtatttttaccatgacgaggtagatggaggttccccaatggaaaacacagaaaatagcgtggattccaagtctataaaaaacctggagcccaaaatcatccacggatccgaatctatggacagcggaatttctctcgataactcttacaaaatggactatccagagatgggcctgtgcataatcataaataataagaacttccataagagtaccggaatgacaagtcgaagcggtacagacgttgatgcggccaacctgcgggagacttttcgtaatcttaagtacgaagtgcggaacaagaacgaccttactcgggaagagatcgtcgagctcatgcgcgatgtctccaaagaggaccactcgaaaagatcatcgttcgtgtgtgtgttactctctcatggggaggaaggtataatcttcgggactaacggccctgtggacctgaaaaaaatcaccaacttttttcggggggacagatgtaggtctctgacaggcaaaccgaaactgtttataattcaggcatgccggggcacggagttggattgtggcattgaaaccgat

SEQ ID NO: 249620 - DNA, 870 bp, synthetic construct
  misc_feature 1..870: note = Description of Artificial Sequence: Synthetic coding sequence
  source 1..870: mol_type = other DNA
atgattgaaacggatagcggggtagatgacgacatggcctgccacaagatcccagtggaggccgatttcctctacgcctattctactgcgccgggctactattcctggcgtaattccaaggacggtagttggtttatccagtcgttgtgtgcaatgctcaagcagtacgccgacaaactggaattcatgcatattctcacacgcgtgaacaggaaggtggctactgagtttgagtccttctcctttgacgctactttccatgccaagaagcagatcccttgtatagtatccatgcttaccaaggagctatacttctaccatgatgaggtcgatggaggatcaccgatggaaaacacggaaaattctgtggactccaagtccattaaaaacctcgaaccgaagataatacacgggagcgaatctatggacagtgggattagcttggataatagttacaaaatggactaccccgagatggggctgtgtatcatcatcaacaacaaaaactttcataagagcaccggcatgacaagccgctcaggtaccgacgtcgatgccgccaatctgcgggagactttccggaatcttaaatacgaggtgagaaacaaaaacgacctgacacgggaggaaattgtggaactcatgcgggacgtgtccaaagaggaccactcaaagcggtcctcctttgtatgcgtgctgctctctcacggcgaggaaggtatcattttcgggaccaatggaccggtcgatctgaaaaagattacgaacttcttccgcggcgaccgttgtagatcccttacaggcaagccaaaactgtttatcattcaggcttgcagaggcacagagctagactgcggcatcgagaccgac

SEQ ID NO: 249621 - DNA, 870 bp, synthetic construct
  misc_feature 1..870: note = Description of Artificial Sequence: Synthetic coding sequence
  source 1..870: mol_type = other DNA
atgatcgaaactgacagtggggtggatgacgacatggcatgtcataaaatacccgtcgaggctgattttctgtatgcatatagcactgctcccggctattactcttggcgaaatagcaaggacggaagctggttcatccaatcgttatgcgcgatgctcaagcagtatgcggataagctggaattcatgcacatcctgacacgcgtcaatcggaaagtggcaaccgaatttgagagcttcagtttcgacgccacattccatgccaaaaaacagatcccctgcatcgtttctatgctgaccaaagaactgtatttttatcacgatgaggtcgatggtggctcacccatggagaacactgaaaattcagtggattccaagtccatcaagaacttggagcccaaaatcatccatggttctgagtccatggactctggcatcagtctggacaactcctacaaaatggactaccctgagatgggcctctgcatcatcatcaacaacaaaaattttcacaaatctaccggaatgacatcgcggtccggcactgacgtagatgccgccaacctacgcgagacttttcgcaacctgaagtacgaagtgcggaataaaaacgatttgacccgagaggagattgtagagctgatgcgcgacgtgagcaaggaggatcactccaagagaagtagctttgtctgtgtgctgctgagccacggcgaagaaggaataatttttggcacgaacggccccgtggatctcaagaaaataacgaacttctttaggggtgatagatgcagatccctaaccggcaaacccaagctgttcattattcaggcatgtcggggtaccgaactggactgcgggatcgagacggat

SEQ ID NO: 249622 - DNA, 870 bp, synthetic construct
  misc_feature 1..870: note = Description of Artificial Sequence: Synthetic coding sequence
  source 1..870: mol_type = other DNA
atgatagagaccgatagtggcgtggatgacgatatggcctgccataagatacctgtggaggcagacttcttgtacgcatattctacagcaccaggttattattcttggcgaaatagcaaggacggctcctggtttattcagtcactgtgcgccatgctgaagcagtatgcagataagctggagtttatgcacatcttgacaagagtgaacaggaaagtggccactgagttcgagagtttctcctttgacgcgaccttccacgctaagaaacagattccctgtattgtgtcaatgctgactaaggaactgtacttctatcacgatgaagtggacggaggcagcccgatggagaacaccgagaattctgtggactccaagagcataaaaaacctggagccgaagatcatccacggttcagagtctatggactccggcatttccctggacaattcctacaaaatggactatccagaaatggggctatgtatcataatcaataacaagaactttcacaagtcaaccggcatgacttctaggagtggcacagacgtggatgcagctaacctacgagaaacattcaggaatttgaagtacgaagtgaggaataaaaatgacctcacacgtgaagaaatcgtggaactgatgagagatgtatctaaagaggatcactcgaaacgttctagctttgtttgcgtgctgctatcccacggggaagaaggaattatctttggaaccaatggtccagtggacctgaagaaaatcactaactttttccgtggtgaccgatgccgcagcctgaccggcaagcccaaactattcattatccaggcatgcaggggaaccgaactggactgtgggatagagaccgac

SEQ ID NO: 249623 - DNA, 870 bp, synthetic construct
  misc_feature 1..870: note = Description of Artificial Sequence: Synthetic coding sequence
  source 1..870: mol_type = other DNA
atgatcgagaccgatagcggtgtggatgatgacatggcttgtcacaagatacccgtggaagcagactttctttacgcctattctaccgcacctggctactactcttggcgcaactctaaggacggatcgtggttcattcaaagtctttgtgccatgctcaagcagtacgcagacaagcttgagtttatgcacattttgacacgagtcaatagaaaggtagccacagagttcgaatccttcagcttcgacgcaactttccacgcgaaaaaacagattccatgtatcgtgagcatgttaaccaaagaattatatttctatcatgatgaagtcgacgggggatcgccaatggaaaatacagaaaacagcgtagatagtaagtcaataaagaatctggagccaaagattatccatggttccgagagtatggatagcggcatcagcttggataactcctataagatggattatcctgaaatgggcctctgtatcattattaataataaaaatttccacaaatctaccggcatgacctccaggagtggcacagacgtagacgctgccaatttgcgggagaccttcagaaaccttaagtatgaggtcaggaacaaaaacgatctgactagagaggagattgtcgagctgatgcgggacgtgtctaaggaggatcatagcaagcgatcatcctttgtttgcgtcctgttgtctcatggagaagagggcatcattttcggcacgaacggacctgtcgatctgaagaaaataaccaatttctttaggggggacagatgcaggagcctgaccgggaagccgaagcttttcatcatccaggcttgcaggggaactgaactcgactgcggcatagaaacggat

SEQ ID NO: 249624 - DNA, 870 bp, synthetic construct
  misc_feature 1..870: note = Description of Artificial Sequence: Synthetic coding sequence
  source 1..870: mol_type = other DNA
atgatcgagaccgatagtggagtagatgacgacatggcatgccacaagattcccgtggaagccgatttcctctatgcctacagcacagccccagggtactattcatggcggaatagcaaagacggatcctggtttattcagagtctctgcgctatgcttaagcagtatgccgacaaactggaattcatgcacatcctcactagggtgaaccgaaaggtagcaactgaatttgaaagcttctctttcgacgcaaccttccacgcaaaaaagcaaattccatgcatagtgtccatgctgacgaaagagctttacttttatcatgacgaggtggatggaggatcacccatggaaaatacagagaattccgtagacagtaagagcatcaagaacctggaacccaaaattatccatggaagcgagtcaatggattctggcatttcactggataatagctataaaatggattatccagagatgggactgtgtattatcattaacaacaaaaactttcacaagtcgacgggtatgactagtcgatccggaacggatgtggacgccgcaaatctgcgcgagacttttcgcaatctcaaatacgaggtgcgtaacaagaatgatctaactcgggaggaaatcgtggagttgatgagagacgtatccaaggaggaccattccaagaggtcttcctttgtctgcgtcctactgtcgcatggcgaggagggaataatcttcggtacaaacggccctgtcgatctgaaaaagatcactaatttcttccggggggatagatgcaggagcctcacggggaagccaaaattgttcattatacaggcctgccggggaacggagctggattgcggcatagaaacggat

SEQ ID NO: 249625 - DNA, 870 bp, synthetic construct
  misc_feature 1..870: note = Description of Artificial Sequence: Synthetic coding sequence
  source 1..870: mol_type = other DNA
atgattgaaacggatagtggtgtcgatgatgatatggcttgccataagatcccggttgaggctgacttcttgtatgcatatagtaccgcacctggttattactcgtggcgtaatagcaaggatggtagttggtttatccagagcctttgtgcaatgttaaaacaatatgcggacaagcttgagtttatgcatattttaacacgagttaaccgtaaggtcgcaactgagttcgaatcttttagcttcgatgctacgtttcatgctaagaaacaaataccatgcatagttagcatgctaacaaaagaattgtacttctaccatgatgaagttgacggtggttccccaatggagaacacagagaattccgtcgactctaagtcgatcaaaaacttagaacccaagatcatccacggaagtgaaagtatggacagtggtatctctttagacaactcctacaagatggattacccagagatgggcttgtgcatcatcatcaataataaaaatttccacaagtcaactggcatgacttctagatccgggactgatgttgatgcagcaaatttacgcgagacttttagaaacttaaaatatgaggttaggaataaaaatgatctcacaagggaggaaattgttgagctaatgagggatgtgtccaaagaggatcactcaaagaggagttcttttgtttgtgttctgcttagtcatggtgaggaagggatcatctttggtacgaacggcccggtagatctgaaaaagataacaaatttttttaggggagacagatgccgatctttgactgggaagcctaagttgttcatcatacaagcgtgtaggggtacagagttggattgtggcattgagacggat

SEQ ID NO: 249626 - DNA, 870 bp, synthetic construct
  misc_feature 1..870: note = Description of Artificial Sequence: Synthetic coding sequence
  source 1..870: mol_type = other DNA
atgatagagaccgatagtggtgtggatgatgatatggcctgccataaaattcccgtggaggcagatttcctatacgcctactccaccgcgcctgggtattactcctggcggaattccaaggatggcagctggttcattcagtccttatgtgccatgctgaaacaatacgctgacaaactggaatttatgcacattctgactcgggttaacaggaaggtggcaaccgagttcgagtctttctcctttgatgctacatttcatgcaaaaaaacagattccttgcatcgtgagcatgctgactaaagaactgtatttctaccacgacgaggtggatggcggcagtcctatggaaaatacagaaaactcggtggattcaaaatctataaagaatctggaaccaaaaattatccacggttcagagagcatggacagtggaatttcactggacaatagctacaagatggattaccctgaaatgggactgtgtattattatcaacaacaagaactttcataagtccacagggatgactagccggtccggcacggacgtcgacgcggccaacctgcgcgaaacttttcgcaatctgaagtatgaagtcagaaataagaatgacctgacccgcgaggaaattgttgagctgatgagagatgtcagcaaagaggaccattcaaaacggagttcattcgtgtgtgtgctcctgtcccatggagaggaaggtatcatcttcggcaccaatggacctgttgacctcaaaaaaataaccaatttttttcggggggaccggtgcaggtcccttacaggtaaaccaaaactgttcatcatacaagcctgtcgtggcacagagctggattgcggcatagaaaccgat

SEQ ID NO: 249627 - DNA, 870 bp, synthetic construct
  misc_feature 1..870: note = Description of Artificial Sequence: Synthetic coding sequence
  source 1..870: mol_type = other DNA
atgatcgagaccgatagcggcgtggatgacgatatggcttgccacaaaatccctgttgaggccgatttcctgtatgcctacagcacggcacccggctactactcgtggagaaactccaaggacggatcctggttcatccagtccctttgcgcgatgctcaaacagtacgccgacaagctcgaattcatgcacatcctaacccgtgtaaacagaaaagtggcgacggaatttgaatcattctcatttgacgccacctttcatgctaagaaacagatcccctgtatcgtgtcgatgctgactaaggagctctacttctaccatgatgaagtggacggaggttctccaatggaaaacactgagaactccgtggactcaaaatcaatcaagaacctggagcctaagatcatccacggcagtgaatctatggactctggcatcagtctggacaatagctacaaaatggattatccagaaatgggactgtgcattatcattaataataagaacttccacaaatctacaggaatgaccagccgcagtggtaccgacgttgatgctgccaatttgagggagaccttcagaaacctgaagtacgaggtccggaataagaacgatctgactcgtgaagagatagtggagctgatgcgggacgtgagcaaggaagaccatagcaagaggagttcatttgtatgcgtccttttgtcgcacggtgaagagggaataatcttcggcacgaatgggcccgtcgatctgaagaagatcacgaattttttccggggcgataggtgtaggtccttgaccggtaagcccaagctgttcattattcaggcctgccggggaacagaactcgattgtggtatcgaaacagat

SEQ ID NO: 249628 - DNA, 870 bp, synthetic construct
  misc_feature 1..870: note = Description of Artificial Sequence: Synthetic coding sequence
  source 1..870: mol_type = other DNA
atgatcgaaactgattcaggtgttgacgatgatatggcatgccataagatccctgtcgaggcagactttttatatgcatattctacagccccaggctattacagttggagaaattctaaagatggatcgtggtttattcagtccctttgtgcaatgctgaaacaatacgcagataaactagaatttatgcatatcctcacgcgagtgaaccgcaaagtagctacggaatttgagtcgttttctttcgacgcaacattccatgccaagaagcaaattccatgtattgtctccatgttgacaaaagaactgtacttctatcacgatgaagtagatggcggatctccgatggagaacacggaaaattctgtagattctaagtctattaagaacctggaaccgaaaattatacacggaagcgaatctatggatagtgggataagtcttgacaacagctacaagatggattaccccgaaatgggtctatgcatcataattaataataagaatttccacaaatcgactggcatgacgtcacgttccggaacagacgtcgacgctgctaacttgcgcgaaacgtttcgtaatcttaaatatgaagttcgaaataaaaatgacttgacgcgcgaagaaatagtagaactgatgagggacgtgtctaaagaagaccattcaaagcgctcgtcatttgtgtgcgtgctccttagccatggagaggaaggcatcatatttggaaccaatggaccggtcgatcttaaaaagattacgaacttttttcggggcgatagatgccgttcattgacaggcaaaccgaagttgttcattattcaagcttgcagaggtacggaactggattgtggcattgaaaccgat

SEQ ID NO: 249629 - DNA, 870 bp, synthetic construct
  misc_feature 1..870: note = Description of Artificial Sequence: Synthetic coding sequence
  source 1..870: mol_type = other DNA
atgattgaaactgacagtggtgtcgacgacgacatggcctgtcataagatccccgttgaggccgacttcctttacgcctactccactgctcccggatattactcctggcgaaactcaaaggatggaagttggttcatccaatcgctctgcgccatgttaaagcagtacgcagacaagcttgagttcatgcacatcctcaccagggtgaataggaaagtggccaccgagttcgagagtttcagtttcgacgcaacattccacgcaaagaaacaaataccgtgcatcgtgtccatgctcactaaggaactgtacttttatcatgacgaggtggatggcggttcaccaatggaaaacactgaaaactccgtggactccaaatccatcaaaaatctagagcccaagataatacacgggtccgaatctatggattctggaatcagcctggataacagctataaaatggattatcctgagatgggcttgtgcattatcatcaataataagaattttcataagtctaccggcatgacaagcagaagtggcaccgatgtggacgcagctaatctgagggaaacattcagaaaccttaagtacgaagttaggaataagaacgacctgacacgcgaggagattgtggaactgatgagagacgtaagcaaggaagaccattccaagaggagctcatttgtgtgcgtccttttgagtcatggcgaggaggggattattttcggaacgaatggacctgtggatcttaagaagatcactaacttttttcgaggcgatcgctgccgatctcttacagggaagcctaaactgtttatcatccaagcctgtaggggaaccgagctcgattgcggtatcgaaaccgac

SEQ ID NO: 249630 - DNA, 870 bp, synthetic construct
  misc_feature 1..870: note = Description of Artificial Sequence: Synthetic coding sequence
  source 1..870: mol_type = other DNA
atgatcgagactgactctggagtcgatgacgacatggcatgccacaaaataccggtggaagccgacttcctgtacgcctactccaccgcgccgggttactactcatggcggaactcaaaggacggatcatggtttatccagagcctctgcgcaatgctcaagcagtacgctgataaactcgaattcatgcacattctcactcgggttaataggaaagtggccactgaattcgagagcttcagctttgacgcgacctttcacgcaaagaagcaaatcccctgcatcgtgtcaatgcttaccaaggagctgtacttttaccatgatgaagtggatgggggttcgcctatggagaacaccgagaatagcgtggacagcaaatcaatcaagaatcttgaacctaagatcatccacggcagcgaatcgatggactccgggatctcgcttgacaactcctacaagatggactatcctgaaatgggactgtgtatcattatcaacaacaagaacttccataagagcaccggaatgacttccagatccggaaccgacgtggacgctgcgaatcttagagaaaccttccggaacctgaagtacgaagtgcggaacaaaaatgaccttactcgggaagaaatcgtcgagctgatgcgggacgtgtccaaggaggaccattccaagcgctcttcatttgtgtgcgtgctcctctcacatggagaggagggaattatcttcggcaccaatggacctgtcgatctgaagaagatcaccaacttcttccgcggagacaggtgtcgcagcctgaccgggaaaccgaagctgttcattattcaagcctgtcgcggaaccgaattggactgcggaatcgaaaccgac

SEQ ID NO: 249631 - DNA, 870 bp, synthetic construct
  misc_feature 1..870: note = Description of Artificial Sequence: Synthetic coding sequence
  source 1..870: mol_type = other DNA
atgattgagaccgatagtggggtggatgacgacatggcctgccataaaattcccgtcgaggccgacttcctctacgcctactccaccgctcccgggtactattcctggcgcaattctaaggatggtagctggttcattcaatctctatgtgctatgctgaaacagtatgctgataaactcgagtttatgcacatcttaactagagtcaacaggaaagtggccaccgaattcgaaagcttttcgttcgatgcgacattccacgccaagaagcagataccatgcatagttagcatgctgacaaaggaattgtacttttatcatgacgaggtggatgggggatctcctatggaaaatacggaaaattcagtggactctaaatcaattaaaaatctggagcctaaaataatacacggatctgaatccatggattcaggaatctccctggataattcctacaaaatggactatccggagatggggttgtgcatcatcattaataataagaacttccacaagtcaacagggatgacctcccgcagcggcacagacgtcgacgccgccaatttgcgcgagactttcaggaacctcaaatacgaggtgcgaaacaaaaatgacctaactcgggaggaaatcgtcgaattaatgcgtgatgtatcgaaggaggatcattcgaagcgcagcagtttcgtatgtgttctattgtcccacggtgaggaaggcataatattcgggaccaatggcccagtggacttaaagaagatcaccaacttcttccgcggtgatcgttgcagatctttaactggcaagccaaagttgttcatcatacaagcgtgccggggcactgaacttgactgcggcatagaaaccgac

SEQ ID NO: 249632 - DNA, 870 bp, synthetic construct
  misc_feature 1..870: note = Description of Artificial Sequence: Synthetic coding sequence
  source 1..870: mol_type = other DNA
atgattgaaaccgacagcggagtggatgacgacatggcctgccataagatcccggtcgaagccgattttttgtatgcctacagtacagcgccaggctattacagttggagaaactccaaggatggctcctggttcattcagagtctgtgcgcaatgttgaagcagtacgcggataagttggagttcatgcatatcttgacccgggtgaaccgaaaggttgccaccgagtttgaaagcttcagtttcgacgcgaccttccacgccaagaaacagataccatgcatcgtttcgatgctcacgaaggagctttacttctaccacgacgaggtcgacggtggcagtcctatggagaacactgagaactcggtggactccaaatcgataaaaaatcttgagcccaagatcatccatggatcggagtcgatggatagcggcatatccctggataatagctacaaaatggactatccggagatgggcctatgcataatcatcaacaacaaaaattttcacaagagcaccggaatgacctctagaagtgggacggatgtcgacgcagcaaaccttcgggaaacttttcgcaatctaaaatacgaggtgcgaaacaagaatgatctgacccgtgaggagattgtcgaattgatgcgtgatgtttcgaaggaggatcactcgaagcgaagctcatttgtttgcgtccttctgtcccacggcgaggaaggcatcattttcggcaccaatggacctgttgacctcaagaagatcaccaatttcttccgcggcgaccggtgccgctcgttgactggaaagccaaagctattcataatccaagcctgccggggtaccgaacttgactgcggcattgagaccgat

SEQ ID NO: 249633 - DNA, 870 bp, synthetic construct
  misc_feature 1..870: note = Description of Artificial Sequence: Synthetic coding sequence
  source 1..870: mol_type = other DNA
atgattgagactgattcgggtgtggacgacgacatggcctgtcataagatcccagtcgaagctgattttctctacgcttactcgacggctcccggatactattcatggaggaatagcaaggacggaagctggttcatccaatctctctgcgcgatgctgaaacagtacgccgataagctggaattcatgcatattctcactcgggtgaaccgcaaagtcgccaccgaattcgagagcttcagcttcgacgcgaccttccacgctaagaaacagatcccgtgcatagtctccatgctcaccaaggaactgtacttctaccatgacgaagtcgatggcggctcgcctatggagaacactgagaattcggtggactcgaagtctatcaagaatctggagcctaaaatcatccacggctcggagagcatggactccggaatctccctggacaactcctacaagatggactacccggaaatgggtctgtgtatcattatcaacaataagaatttccacaagtcgactggtatgacttcacggtcaggaacggatgtcgacgcagccaatctgcgggaaacttttagaaatttgaagtacgaggtgcgcaacaagaacgatctgactagagaggaaatcgtggaactgatgagggacgtgtcgaaagaggaccactccaaacgctcgtcattcgtgtgcgtccttctctcccacggagaagagggaatcattttcggcactaacggtccggtggatctcaagaagatcactaatttcttccgcggagatcggtgccgctcactgaccggaaagccgaagctcttcatcatccaggcctgccggggaactgaactggactgcggaattgaaacggac

SEQ ID NO: 249634 - DNA, 870 bp, synthetic construct
  misc_feature 1..870: note = Description of Artificial Sequence: Synthetic coding sequence
  source 1..870: mol_type = other DNA
atgatcgagacggactcgggcgtggacgacgatatggcctgtcacaaaataccagtcgaggctgatttcctgtacgcatactcgaccgcgccgggttactacagctggaggaattccaaagacggatcgtggttcatccagagcctgtgcgccatgctgaagcaatacgcggacaagctggagtttatgcacatcctcaccagggtgaacagaaaagtggcaactgaattcgaatccttctcattcgatgccacgttccacgcgaaaaagcagatcccttgtatcgtgtccatgctcacgaaggaactgtacttctaccatgatgaagtggacggaggctccccgatggagaacacggaaaactccgtggattccaagtccattaagaatttggaaccaaagatcatccacggaagcgagtcgatggactcaggaatctcgttggataactcctacaagatggactatccggaaatggggctgtgtatcattatcaataacaagaattttcataagtccaccgggatgacctcacgtagcggaactgatgtagatgcggctaacctgagggaaacctttcggaacctgaagtacgaagtcagaaacaaaaacgacctgacccgcgaagagatcgttgaactgatgcgagatgtttcgaaggaggaccattcgaagcgaagcagctttgtctgcgttcttctctcacacggtgaggaaggaatcatcttcggaactaacggtccggtggaccttaagaaaatcaccaacttcttccgcggtgaccggtgcagatcactgactggcaagcctaaactgttcatcattcaagcctgtcgcggcaccgaactcgactgcggtatcgagactgac

SEQ ID NO: 249635 - DNA, 870 bp, synthetic construct
  misc_feature 1..870: note = Description of Artificial Sequence: Synthetic coding sequence
  source 1..870: mol_type = other DNA
atgattgaaacggattccggtgtggatgatgacatggcatgccacaaaattccggtcgaagcagacttcctgtacgcttactccaccgctcccggatactactcgtggcgcaattcgaaggatggttcatggttcattcaatcgctctgtgcaatgctgaaacagtacgcagataagctcgagtttatgcatatcttgactcgcgtcaaccgcaaggtggcaaccgaatttgaatccttttcgtttgacgccacttttcatgccaagaagcaaataccttgcattgtcagtatgctgaccaaggagctttacttttaccacgatgaggtggacgggggttccccaatggaaaacactgaaaattcggtggattccaagtcaattaagaatcttgagccaaaaatcatacacggctccgaatctatggacagcggtatatccctggataacagctacaagatggattaccctgaaatgggactgtgtattatcatcaacaataagaattttcataagagtacgggcatgacttctcggtctgggaccgacgtggatgcagccaatcttcgagaaactttccgaaatcttaagtacgaagtgagaaacaagaacgacctgacgcgcgaagagatcgtagaactcatgcgtgacgtgtcaaaggaagatcattcgaagcgctcatccttcgtctgtgtgcttctgtcgcatggagaggaaggaattatcttcggaaccaatggcccagtggatctgaaaaagatcaccaacttctttagaggcgatcggtgtagatcgctgaccggcaagcctaaactcttcattatccaggcttgtaggggtactgagctggattgtggaattgaaaccgac

SEQ ID NO: 249636 - DNA, 870 bp, synthetic construct
  misc_feature 1..870: note = Description of Artificial Sequence: Synthetic coding sequence
  source 1..870: mol_type = other DNA
atgattgaaaccgattccggggtggacgacgatatggcctgtcacaaaataccggtggaagctgactttctgtatgcctacagcacagcccctggctactattcatggcgcaatagtaaagatgggtcatggtttattcagagcctttgcgccatgttaaaacagtatgctgataaactggagttcatgcacattctcacccgtgtgaacagaaaagttgctaccgagtttgagagcttttcttttgatgcgactttccacgcaaagaagcagatcccatgtattgtatctatgctgacgaaagagctgtacttttaccacgacgaggttgacgggggctctcccatggagaacacggaaaactccgtggattcaaaatccatcaagaatctcgaacccaagattattcacggcagtgagagtatggactcaggaatcagcctcgacaattcctacaaaatggattatccagagatggggttgtgcatcattataaacaacaaaaactttcataagtccaccgggatgacaagccgatctggcaccgatgtggatgcagcaaacctgagggaaacttttaggaacttaaaatatgaggtccggaacaaaaacgatctgactagggaggagattgtggaactaatgagggatgtgagcaaagaggatcattcaaagcgcagttcctttgtctgtgtcctgctcagccacggggaggagggcatcatcttcggtacgaacggtcccgtggatctgaagaaaattaccaattttttcagaggtgataggtgcaggagtctgaccgggaagcccaaattgtttatcatacaggcatgccgcggaacggaactcgactgtggcattgaaaccgat

SEQ ID NO: 249637 - DNA, 870 bp, synthetic construct
  misc_feature 1..870: note = Description of Artificial Sequence: Synthetic coding sequence
  source 1..870: mol_type = other DNA
atgatcgaaacggattcgggagtggacgacgacatggcgtgtcataagattccggtggaggcagattttctgtatgcctactcgaccgctccaggttactacagttggcggaatagcaaggatggtagctggtttatacagagcctgtgcgccatgcttaaacagtacgcagacaagctggagtttatgcatatcctcactagagtgaacaggaaggtcgccactgagttcgaatcattttccttcgacgccacctttcacgcaaagaaacagatcccgtgtattgtatcgatgcttacgaaagaactttacttctatcacgatgaggtggacggaggaagccctatggaaaacaccgagaatagcgtggactcaaagtcaattaagaacctggaaccaaagatcattcatggttcagaatccatggactcgggtatttcgttggataactcttacaaaatggactaccccgagatgggcctgtgcattatcattaacaataagaacttccataagtcaaccggaatgacctctaggagcggaaccgatgtcgatgccgcaaacctgagggaaacttttagaaacctcaagtacgaggtcagaaacaagaatgacttgaccagggaagagatcgtggaactgatgagagacgtgagcaaggaagatcactccaagcggtcctcatttgtgtgtgttcttctgtcccatggagaagagggaataatctttgggaccaacgggcctgtcgatcttaagaaaatcaccaacttcttccgaggtgatagatgcaggtccctcacgggaaaaccaaagctctttatcattcaagcgtgtagaggaaccgaactcgattgtggaatcgaaactgac

SEQ ID NO: 249638 - DNA, 870 bp, synthetic construct
  misc_feature 1..870: note = Description of Artificial Sequence: Synthetic coding sequence
  source 1..870: mol_type = other DNA
atgattgagaccgactctggtgtggatgacgatatggcctgtcacaaaataccggtcgaggcggacttcctgtacgcctacagtactgcaccaggctactactcctggaggaattccaaagatggctcttggttcatccaatcactgtgcgcgatgctgaaacagtacgccgacaagctggaattcatgcacatcctgactcgggtaaaccgcaaggtagctacagaattcgagtccttcagtttcgacgccacatttcacgcaaaaaagcagatcccgtgcatcgtctcgatgctgacaaaagagctctacttctatcacgacgaggtcgacggaggctccccaatggagaacacagagaatagcgttgacagcaagagcataaagaatctggagccaaagatcatccatggctccgagtccatggacagcggcataagcctggacaactcgtacaagatggattaccccgagatgggcctttgtatcattataaacaacaaaaacttccacaaaagtacaggaatgacctctaggtcagggactgacgttgacgccgctaacctccgtgagacattccggaatctaaagtacgaggtccggaacaagaacgacctgactcgcgaagaaattgtggagctgatgcgggacgtctccaaagaggatcactccaaacgctcctccttcgtctgtgtgctgctcagccatggcgaagagggcatcatatttggcacaaatggcccagtcgacctgaaaaaaatcaccaatttttttcggggtgacaggtgtcgttcactcacaggtaagcctaagctgttcatcatccaagcctgccgaggtaccgagctggattgtggaatcgagacagac

SEQ ID NO: 249639 - DNA, 870 bp, synthetic construct
  misc_feature 1..870: note = Description of Artificial Sequence: Synthetic coding sequence
  source 1..870: mol_type = other DNA
atgattgaaactgattccggagtggacgatgacatggcatgtcataagattcccgtcgaagcagattttctgtatgcgtactccactgcacctggatattactcctggcggaactccaaggacggttcctggtttatccagagcctttgtgcaatgctgaagcaatacgccgacaaacttgaattcatgcatatcctgacgagagtcaatagaaaggttgcaaccgaatttgaatcctttagctttgatgccacttttcatgcgaagaagcagataccttgtatcgtgtccatgttgaccaaggaactgtatttctatcatgatgaggtcgatgggggttcgcctatggagaacaccgaaaactccgtggattcaaaatcgattaagaatctcgagcctaagatcattcacggttcggagagcatggatagcggaatttcacttgacaactcatacaagatggattaccccgaaatgggactttgtattatcattaacaacaagaatttccataagagcactggaatgacttcacggagcggaactgatgtggatgccgcaaatctgcgggaaaccttcaggaatctgaagtacgaagtgagaaacaagaacgacctgacccgagaggaaattgtcgagctcatgcgagatgtatcgaaggaagatcattcgaaaagatccagcttcgtgtgtgtgctgctctcgcatggggaagaaggcatcatctttggtacgaacggaccagtcgaccttaagaaaatcaccaatttctttagaggtgacaggtgtagaagcctgacgggcaagcctaaactctttatcattcaggcttgtagggggactgagctcgactgcgggattgaaaccgac

SEQ ID NO: 249640 - DNA, 870 bp, synthetic construct
  misc_feature 1..870: note = Description of Artificial Sequence: Synthetic coding sequence
  source 1..870: mol_type = other DNA
atgattgaaacagacagcggcgttgacgatgatatggcctgtcacaagattccagtagaggccgactttctctatgcttattccaccgctcccggttactattcctggcgcaacagcaaggatggtagttggttcattcagtccctgtgcgcgatgctgaaacagtatgcagacaaactcgagtttatgcacatcttgaccagagtgaatcgaaaggtggcaaccgagttcgagtcattctcctttgacgctacgtttcatgcaaaaaaacagataccttgtatcgtaagtatgttgactaaagagctctatttctaccacgacgaggttgatggcggcagtcccatggagaacactgagaacagtgtagattcaaagagtatcaaaaatttggaacctaaaatcatacacgggtcggagagcatggattctggtatttccctggataatagctataaaatggactatccagaaatgggcctttgcattataatcaacaataaaaactttcataaaagtacaggcatgaccagcaggtcagggaccgacgtggatgccgctaatctgcgggagacgtttcgaaatctgaagtatgaagtacggaacaagaatgatctgacgagggaagagattgtcgaactgatgagggacgttagcaaagaagatcattccaagaggagtagcttcgtatgcgtgttattgagtcacggtgaggaaggcatcatctttggtacgaacggacccgtcgatctgaagaagatcaccaacttctttcggggggataggtgccgatctcttaccggaaaaccgaagctgtttatcatccaggcgtgccgcgggacagagctggattgcgggatcgagaccgac

SEQ ID NO: 249641 - DNA, 870 bp, synthetic construct
  misc_feature 1..870: note = Description of Artificial Sequence: Synthetic coding sequence
  source 1..870: mol_type = other DNA
atgatcgagactgattcaggagtggacgacgatatggcgtgtcacaaaatcccagtggaagcagattttctctatgcctatagtaccgcgcctggatactactcatggcgcaattctaaggatggcagctggttcatccagtccctctgcgccatgttaaaacagtacgctgataagctcgagtttatgcatattctcacccgagtgaataggaaggtcgccacagagtttgaaagctttagttttgacgctacttttcacgcaaagaagcagatcccctgcatagtgagcatgctgaccaaggagttatatttttaccatgacgaggtagatgggggctcccccatggagaatacagagaacagtgttgatagcaaatccatcaaaaacctggagcccaagattatacacgggtccgagagcatggacagcggaatctccctggacaactcgtataaaatggactatccagaaatgggattgtgtattatcattaacaacaagaatttccacaagtccactggtatgacctcccgctccggaaccgatgtcgacgctgccaacctgcgtgagacctttagaaatttaaaatacgaagtcaggaataaaaacgatctgacaagggaggagatcgtcgagctgatgcgagatgtttcaaaggaggaccactcgaagcggagcagtttcgtgtgcgtcctcctctcccatggtgaagaggggataatattcggcactaatggccccgtggacttaaagaagatcaccaattttttcaggggcgacaggtgcagatcccttactggaaaaccgaagctgttcataatccaggcctgtcgcggcacagaacttgactgcggcatcgaaaccgac

SEQ ID NO: 249642 - DNA, 870 bp, synthetic construct
  misc_feature 1..870: note = Description of Artificial Sequence: Synthetic coding sequence
  source 1..870: mol_type = other DNA
atgatcgagactgacagcggagtggacgacgacatggcttgtcacaaaatcccggtggaggcagacttcctctacgcgtactcaaccgccccgggctactactcgtggagaaactcgaaggacggttcttggttcatccagtcattgtgcgccatgctcaagcagtacgctgacaagctcgagtttatgcacatcctgaccagagtcaaccgcaaagtggcaactgagttcgaatcgttctccttcgatgccaccttccacgcgaagaagcaaattccatgtatcgtgagcatgctgaccaaggaactgtacttctaccacgacgaagtcgacggaggatcccctatggagaacaccgagaacagcgtggattcaaagtccattaagaatttggaaccaaagattatccatggatccgagtccatggattcgggaatctcgctggataattcgtacaaaatggactaccctgagatggggctctgcatcatcatcaacaataagaatttccataagtcgaccggaatgacttcccggagcggcaccgacgtggacgcggcgaacctgagagaaaccttcagaaatctcaaatacgaggtgcgcaacaagaacgacctgactcgggaggagatcgtggagctcatgagagacgtgtcgaaagaagatcattcgaagcggtcgtccttcgtgtgcgtccttctgtcgcacggagaagaaggaattatctttggcaccaatggcccggtggacctcaagaagatcaccaacttcttccggggagacaggtgcaggtcactgaccggaaagccaaaactgtttatcatccaagcgtgccgtggcaccgaactggattgcggaattgaaaccgat

SEQ ID NO: 249643 - DNA, 870 bp, synthetic construct
  misc_feature 1..870: note = Description of Artificial Sequence: Synthetic coding sequence
  source 1..870: mol_type = other DNA
atgattgagaccgactctggcgtcgatgacgacatggcctgccataagattcctgttgaagccgacttcctgtatgcgtattcaacggccccaggttattattcttggcgtaattcaaaagacggatcttggttcattcaatccttgtgtgccatgcttaagcagtatgctgataaactggagtttatgcacattttgactagagtgaaccgcaaagtggccacggagttcgaaagtttcagcttcgatgctacatttcatgctaaaaaacaaatcccatgtatcgtaagcatgcttaccaaggaactgtacttctaccatgacgaagttgatgggggaagccccatggaaaacactgagaatagcgttgattcaaaatccatcaagaacctagagcccaaaatcattcatgggtctgaaagcatggacagcggcatcagcttggataacagttacaagatggattatcctgaaatggggctgtgcatcatcataaacaataagaattttcacaaaagcacagggatgaccagtcgaagcggcactgatgttgatgctgccaatctgcgagagactttccggaatctgaagtacgaggtgaggaacaagaatgatcttaccagagaggagatagtcgaattgatgcgggatgtctccaaagaggaccactctaagaggtcatctttcgtgtgcgtgctgctgtcccacggagaggaaggaattatctttggcactaacggccccgtggacttgaaaaagattaccaatttcttcagaggagacagatgccggtcactgacgggcaagcccaagctgtttattattcaggcatgcagagggaccgaattggactgcggaatcgagacggat

SEQ ID NO: 249644 - DNA, 870 bp, synthetic construct
  misc_feature 1..870: note = Description of Artificial Sequence: Synthetic coding sequence
  source 1..870: mol_type = other DNA
atgatagagacggactccggggtggatgacgatatggcttgtcataagattccagtcgaggcagatttcctgtacgcatacagcacggcgccaggctactacagctggaggaactccaaagacggttcgtggtttattcaatccctttgcgcaatgcttaagcagtacgctgataaactggaattcatgcatattcttaccagggtgaaccgcaaggtcgcaactgagttcgaatccttcagctttgatgccacgtttcacgccaaaaagcaaataccttgcattgtgtccatgctcactaaggagctctacttctaccatgatgaagtggacggtggatcgccaatggaaaatactgagaacagcgtggactctaaatcgattaagaatctcgagcctaagattattcacggctccgaatcaatggattccggcatctccctggacaactcatacaagatggattaccccgagatgggtctgtgtatcatcatcaacaacaagaatttccacaagtccactggtatgaccagccggtcgggaactgatgtggatgctgccaaccttagagaaaccttcagaaacctgaaatacgaagtgagaaacaagaatgatctcactagagaggaaattgtggaattgatgagagatgtgtccaaagaagatcattcgaagagatcgtcgtttgtgtgtgtccttctctcacatggtgaagaaggcattatctttggcactaacggcccagtggatctcaagaagattaccaactttttccgcggcgatagatgtcggagccttaccggaaaaccaaaactgtttatcatccaagcatgcaggggaactgaactcgactgtggaatcgaaacggat

SEQ ID NO: 249645 - DNA, 870 bp, synthetic construct
  misc_feature 1..870: note = Description of Artificial Sequence: Synthetic coding sequence
  source 1..870: mol_type = other DNA
atgattgagaccgattcaggtgtggatgatgacatggcttgccataagatacctgtggaggcggatttcctgtatgcgtattccacggcgccaggttactattcttggcgcaattctaaagacggatcttggttcattcagtctctgtgcgccatgctcaaacagtatgcggacaagctcgaattcatgcatatcctgacacgagtaaatcgcaaggtagctactgagtttgagagcttctctttcgacgcgacatttcatgctaaaaagcaaattccgtgtatcgtgtccatgctgactaaggagctgtatttctatcacgacgaagtcgacggcggctcccctatggagaatactgaaaatagcgtcgattctaagagtatcaagaacctggagccaaagatcatacatggatcagagtcaatggattccgggatatcactggacaactcctacaagatggactatcctgagatgggcctttgcatcatcataaataacaaaaatttccataaatctaccgggatgacctctagatcagggacggacgtggacgccgccaatctgcgggaaacgtttcgcaatctgaaatacgaggtcaggaataaaaacgatttgacccgagaggagatagtagagctcatgagggatgtgagcaaagaggatcacagcaaacgctcatcttttgtgtgcgtgttgttatctcacggagaggaaggaataatcttcggcacaaacgggcctgtcgaccttaaaaagataaccaatttctttaggggagatcgatgccggtctctgactgggaaacctaagctcttcatcattcaagcctgcaggggtaccgaactggattgtggcattgagaccgat

SEQ ID NO: 249646 - DNA, 870 bp, synthetic construct
  misc_feature 1..870: note = Description of Artificial Sequence: Synthetic coding sequence
  source 1..870: mol_type = other DNA
atgatcgaaactgactcgggagttgacgacgacatggcgtgccataagatcccggtcgaagcagattttctgtacgcctactcgaccgctccaggctactactcgtggcgcaacagcaaggatggctcatggtttatccagtcgctttgcgcaatgttgaagcagtacgccgataagctggaattcatgcatatcctcactcgggtcaatagaaaggtggctacggagttcgaatcattctcattcgacgctaccttccatgccaagaagcagataccgtgcatcgtctcgatgctgactaaagaactgtatttctaccacgacgaggtggatgggggctcccccatggagaacactgagaattcagtggattccaagtcaattaagaatttggagcctaaaatcatccatggttcggagtccatggatagcgggatctcgctggacaactcgtacaaaatggattacccggagatgggactctgcatcatcatcaacaacaagaatttccacaagtccactgggatgacttccagaagcggaacggatgtggacgctgcaaacctgagagaaaccttccgcaatctcaagtacgaagtgaggaacaagaacgacctgactcgcgaggagatcgtggaactgatgagagacgttagcaaggaggaccactcgaagcggtcatcgttcgtgtgtgtgttgctgtcccacggcgaggaaggaatcatctttggaaccaatggtcctgtcgatcttaagaaaatcaccaacttttttcggggggatcggtgccgctcgcttacgggaaagcccaaactgtttatcatccaggcttgccgcggaacggagctggattgtggaatcgaaactgat

SEQ ID NO: 249647 - DNA, 870 bp, synthetic construct
  misc_feature 1..870: note = Description of Artificial Sequence: Synthetic coding sequence
  source 1..870: mol_type = other DNA
atgatcgagacggacagtggagttgatgatgatatggcctgtcataagattcctgtggaagcggacttcctatatgcttattccactgctccgggctattacagctggaggaatagcaaagacggatcctggttcattcagtcactgtgcgccatgctcaagcagtacgcagataaattggaatttatgcacatactcacaagggtcaacaggaaggtcgccaccgagttcgagagcttctctttcgatgccaccttccatgctaaaaagcaaatcccctgcatcgtgagcatgctgactaaggagctgtacttttaccacgacgaggtggatggtggatctccaatggagaacaccgagaacagtgtggactccaagagtatcaaaaacttggaaccgaagataattcatggtagcgagagcatggacagcggcatcagcttagacaacagctacaagatggattatcctgagatgggtctgtgcatcatcatcaacaacaagaacttccacaaaagtacaggaatgacttcccgctctggcaccgatgttgatgctgcgaatcttagagagacgtttaggaatctgaaatatgaggttcgcaacaagaatgacttaacccgagaagagatcgtggaactgatgcgcgatgttagtaaggaagaccactcaaagcgatccagcttcgtttgcgtactactctcccatggcgaagagggcattatattcgggactaacggcccggtagatctgaagaaaataacaaacttcttcagaggggaccggtgcaggtccttgacggggaagccgaaactgttcattatacaagcttgtagaggcaccgagttagactgtgggatcgagacggat

SEQ ID NO: 249648 - DNA, 870 bp, synthetic construct
  misc_feature 1..870: note = Description of Artificial Sequence: Synthetic coding sequence
  source 1..870: mol_type = other DNA
atgatcgaaactgattctggagtggatgatgatatggcctgtcataagattcctgtagaagccgatttcctttacgcttactcaacagcccctgggtattatagttggcgcaattcgaaagacggatcttggttcatacagtccctctgtgctatgttgaagcagtatgctgataaactggaatttatgcatattctaactagggtgaaccgaaaagtggctactgaatttgagtcattctccttcgatgcaactttccacgcaaaaaagcagattccctgcatcgtttcaatgttaactaaggagctctacttctatcatgatgaggtggatggaggatcccccatggaaaatacagaaaattcagtcgactctaaatcaataaaaaacctggaaccaaaaattatacacgggagtgagtccatggattccggaatatcattggataattcttataaaatggattatcccgaaatgggactgtgtataatcattaacaataaaaactttcacaaaagtacaggaatgacatctagaagtgggacagatgttgatgcagccaatctcagagaaacattcaggaacttgaaatatgaagtgaggaataagaatgaccttacacgggaagaaatcgtcgagcttatgagagatgtcagtaaagaggatcactctaaaagatcatctttcgtgtgtgtgcttctctcccatggggaggaaggaattattttcggaacaaacggaccagtcgatctgaagaaaataactaattttttccggggggatcggtgccgaagtttaacaggaaaaccaaaactatttattatccaggcctgccgggggacagaactcgattgtggaatcgaaactgat

SEQ ID NO: 249649 - DNA, 870 bp, synthetic construct
  misc_feature 1..870: note = Description of Artificial Sequence: Synthetic coding sequence
  source 1..870: mol_type = other DNA
atgatcgaaaccgattcgggagtcgatgacgacatggcatgtcacaaaatccctgtggaagccgatttcctctacgcatacagcaccgcacccgggtactatagctggagaaattctaaggacggttcctggttcatccaatcattatgtgctatgcttaagcagtacgcagacaagctggaatttatgcacatcctcacaagggtaaacaggaaggtggccaccgaatttgagtcctttagctttgacgccacgtttcatgccaagaagcagataccatgcattgtgagtatgcttactaaagagttatacttctatcatgacgaggtggatggtggaagtccaatggaaaataccgaaaattctgtagattccaagtcgatcaagaacctggaaccaaagatcatccatggctctgaatcgatggattccggaattagcctggacaatagttataagatggactacccagagatgggcttatgtatcatcatcaacaataagaacttccataagagcaccggaatgacttctagaagtggcactgacgttgacgccgccaacctcagggagacctttcgaaacctgaagtacgaagtcagaaataagaacgacctcactagggaagaaattgtagaactcatgagggacgttagtaaggaggaccattccaagcgcagctcctttgtctgcgtgttgctatctcacggggaggagggtatcatatttgggacgaatggacccgtcgatttgaaaaagattacaaacttctttcggggcgacaggtgcaggtctctaactggtaagccgaaactgtttatcattcaggcttgccgcggaactgaactcgactgtgggatcgagactgat

SEQ ID NO: 249650 - DNA, 870 bp, synthetic construct
  misc_feature 1..870: note = Description of Artificial Sequence: Synthetic coding sequence
  source 1..870: mol_type = other DNA
atgatcgaaactgacagcggggtggatgacgacatggcttgtcacaagatccctgttgaggcagactttctgtacgcctatagtacggcacccggctattacagttggagaaacagcaaagatggctcctggttcattcagtcgctgtgcgccatgctgaagcagtatgccgataaactggagttcatgcacatactcacccgcgttaatcggaaggtagccacagaatttgaatccttttctttcgatgccactttccacgccaagaagcagatcccgtgcattgttagtatgttaacaaaggaactgtacttttatcacgatgaagttgatggtggcagtcccatggagaatacggagaactccgtggatagcaagtccattaagaatttggagccaaaaattattcacggatctgaatcaatggatagtggtataagcctagacaactcttacaagatggattatcctgagatgggattgtgcatcatcattaacaacaaaaatttccataagtcaaccggtatgacctctcggagcgggacagatgtagacgccgcaaacctgcgcgaaacttttagaaacctgaaatacgaagtgagaaacaaaaatgacctcactcgtgaggagatcgtggaactgatgcgagacgtgtccaaagaggaccatagcaagagatcgagtttcgtgtgtgtcctccttagtcatggggaagaaggtataatattcggcacgaacggacccgtagacctgaaaaagatcaccaattttttcaggggcgataggtgtaggtctctgaccggaaaacccaagctatttataatccaggcctgccgcggaacagaactcgattgcggcatcgaaacagac

SEQ ID NO: 249651 - DNA, 870 bp, synthetic construct
  misc_feature 1..870: note = Description of Artificial Sequence: Synthetic coding sequence
  source 1..870: mol_type = other DNA
atgatcgaaaccgattcgggtgtcgatgatgacatggcgtgccataagataccagtggaagcagattttctgtacgcctactcaactgcaccgggatattactcatggcgcaatagcaaggacggaagctggtttatccagtccctctgtgcaatgctcaagcaatacgcagacaagctcgaattcatgcatatactcactagagtgaatagaaaagtggccacggagtttgagagcttttcttttgatgcaacgtttcatgcgaaaaaacagattccgtgcatcgtctctatgctcacgaaagaactttacttttaccatgatgaggtggatggaggtagccctatggagaacaccgaaaatagcgtcgactcgaagagcatcaagaacctggaacccaagattattcatggctcagaatcgatggactcaggtatcagcctggataactcctacaaaatggactaccctgagatgggtctgtgtattatcattaacaacaagaatttccataagagcaccggaatgacttccagaagcggtaccgacgtggatgctgccaacctgcgcgaaacttttcgaaacctgaagtacgaggtcagaaacaagaacgatctcactcgcgaagaaattgtggagcttatgcgcgacgtttcaaaggaagatcatagcaagcggtcatcgtttgtgtgtgtgcttctctcgcacggtgaggaaggtatcattttcggcacgaacggtccagtggatcttaagaagataaccaacttcttcaggggagatagatgccgatcacttaccggaaaacccaagctgttcatcatacaagcctgtcgaggaaccgaactggattgtggaatcgagactgac

SEQ ID NO: 249652 - DNA, 870 bp, synthetic construct
  misc_feature 1..870: note = Description of Artificial Sequence: Synthetic coding sequence
  source 1..870: mol_type = other DNA
atgatcgagactgacagcggggtggatgatgacatggcttgtcataagattccggtggaagcggatttcctttacgcctatagcactgccccggggtactacagctggcgtaacagcaaagatggttcatggtttatccagtcactttgtgctatgctcaaacagtacgcagacaaacttgagttcatgcacattcttacccgggtcaacaggaaggtggcaactgagtttgagtcgtttagctttgacgccactttccacgcaaaaaagcaaatcccttgcatagtgtccatgctgaccaaggaactctacttttaccacgacgaagtggatggaggctccccaatggagaacacggaaaattccgtggattcaaaaagcattaagaacctggaaccaaagattatccacggatcagaatcgatggactccggaatctccctcgataactcctacaagatggattaccctgagatgggtctgtgcatcatcataaacaacaaaaactttcataaatctactggaatgacttctcgctcgggtaccgatgtggacgcagcaaatcttagggaaacgttccggaatctgaagtacgaagtgagaaacaagaatgacctgacgagggaagaaattgtggagctgatgcgtgatgtgagcaaggaagatcactctaagagatcctcgtttgtttgtgtcctgttgtcgcatggcgaagaaggcattatcttcggtaccaatggccctgttgatctgaagaaaatcaccaacttctttagaggggaccggtgtagatcccttaccggaaagccaaagctgttcatcatacaagcatgcagaggcactgaactggattgtggtattgaaaccgat

SEQ ID NO: 249653 - DNA, 870 bp, synthetic construct
  misc_feature 1..870: note = Description of Artificial Sequence: Synthetic coding sequence
  source 1..870: mol_type = other DNA
atgattgaaaccgattcgggggtggatgatgatatggcatgtcataagattcctgtggaagcagattttctttacgcatactccacggcaccagggtactactcatggcggaattcaaaggatggttcctggtttattcaatcgctgtgtgcaatgcttaaacaatacgcagacaaacttgagtttatgcatattctcacccgtgtgaaccgcaaggtggcgactgagttcgagagcttctcgtttgatgcaacttttcatgcaaagaaacaaatcccatgtatcgtgtccatgcttactaaggaattgtacttctaccatgatgaagtcgatggtggatcacccatggagaataccgaaaattccgtggacagcaagtccatcaagaatttggagcccaagattattcatggctcagaatcgatggactcgggtatttctcttgacaacagctacaaaatggattaccctgaaatgggactttgcatcatcattaacaataagaactttcacaaatcaaccgggatgacttctcgttcgggtactgacgtcgatgcagccaaccttcgggaaaccttcagaaacctcaagtacgaagtgaggaataagaatgacctgacccgagaggaaattgttgaactgatgcgggacgtgtcaaaggaagatcatagcaagcggagcagctttgtgtgcgtgctgctgtcgcacggtgaggaagggattatctttggtaccaacgggccagtggatctgaaaaagataacgaactttttccgtggggatcgttgtagatcccttacgggtaaacctaaactcttcattatccaagcgtgtcgcggaaccgagctggattgcggaattgagactgat

SEQ ID NO: 249654 - DNA, 870 bp, synthetic construct
  misc_feature 1..870: note = Description of Artificial Sequence: Synthetic coding sequence
  source 1..870: mol_type = other DNA
atgatcgaaaccgactccggggtggacgatgacatggcttgccataagatccctgtagaggcagatttcctgtacgcgtatagcaccgcgccagggtactactcatggagaaattcgaaggacggatcatggttcattcaatccctttgcgcgatgctgaagcaatacgcagataagctggagttcatgcatatcctgactcgggtgaaccggaaggtggctaccgaatttgaatcgtttagctttgatgcgacctttcatgcaaagaagcaaattccttgcatcgtgtcgatgctgaccaaagagctttacttttaccacgatgaggttgatggaggttccccaatggagaatactgagaattccgtggattcgaagtcgattaagaacctcgagcccaagattattcacggttcagaaagcatggattctggaattagcctggataactcttacaagatggattacccagaaatgggcctttgtattatcattaacaacaagaattttcataaatccactggaatgaccagcagatcgggcactgatgtcgatgctgcaaaccttcgcgaaacttttcggaatcttaagtacgaagtgagaaacaaaaacgatctgactagagaagagatagtggagcttatgcgcgacgtctccaaggaggatcatagcaagcggtcgtcttttgtgtgtgtcctgttgtcacatggtgaggaagggatcattttcggtactaacggtcctgtcgatctgaagaaaatcaccaatttcttcaggggtgatagatgccgttccctgactggtaaacctaaacttttcataattcaggcatgtcgagggaccgaactcgactgcggaatagagactgac

SEQ ID NO: 249655 - DNA, 870 bp, synthetic construct
  misc_feature 1..870: note = Description of Artificial Sequence: Synthetic coding sequence
  source 1..870: mol_type = other DNA
atgatcgagacggactctggcgtagacgacgacatggcctgtcataagattcccgtggaggctgattttctgtatgcttattcgaccgccccaggatattactcgtggcgcaacagcaaggatggttcgtggttcattcagtctctgtgtgcgatgctcaaacagtacgctgataaattggagttcatgcacatcttaaccagggtcaatcggaaagtcgctaccgagttcgagagcttctccttcgatgctacctttcacgccaagaagcaaatcccgtgcatcgtgagcatgcttaccaaggagctgtatttctaccacgacgaggtggatggaggcagcccaatggagaacactgagaattcggtcgacagcaaatccatcaagaacctggagcctaagattattcacggttcggagtcgatggacagcgggatctccctggacaatagctacaagatggactatcccgaaatgggtctttgcatcatcattaacaacaagaacttccacaagtcgactggcatgacctcccgttcgggcaccgacgtcgacgccgctaacctccgcgagaccttcaggaacttgaagtatgaggtcagaaataagaacgatctcacccgcgaggagatcgttgagcttatgcgtgacgtgtctaaagaggatcacagtaaacgcagttcgttcgtctgcgtgcttctcagtcatggcgaggaaggcatcatctttggcaccaacggtcctgtggatctgaagaagatcaccaatttctttaggggcgacaggtgccgctcactgacgggtaagcccaagttgttcatcatccaggcgtgtcggggtacggagctcgactgtggcatcgagacagat

SEQ ID NO: 249656 - DNA, 870 bp, synthetic construct
  misc_feature 1..870: note = Description of Artificial Sequence: Synthetic coding sequence
  source 1..870: mol_type = other DNA
atgatcgagaccgattctggtgtggatgacgatatggcgtgccacaaaatcccagtggaagctgacttcctgtatgcatacagcaccgctcccgggtattatagctggaggaactctaaagacggctcctggttcatccagtcgctgtgtgccatgttgaagcaatatgcagataaactggaatttatgcacatcctgacgcgggtgaatcgcaaggtggcgaccgaattcgagtcatttagcttcgacgcgaccttccatgcgaaaaagcagattccttgcattgtttcaatgcttacgaaagaactgtatttttaccacgatgaggtcgatggcggttccccgatggagaacaccgaaaattccgtggattctaaaagcatcaagaatctggaaccgaaaatcattcatggcagcgagtctatggatagcggaatctcactcgataactcttacaagatggactatccggagatgggtctgtgcattataatcaacaacaaaaattttcataaaagcaccggtatgacctctcgaagcgggaccgacgtcgatgctgccaacctgcgcgagactttccgcaatctaaaatacgaggttaggaataaaaacgaccttacccgcgaagagatagtggagctgatgcgagacgttagcaaggaggaccacagcaagcgcagctctttcgtctgcgtcctgcttagccacggagaggaaggcatcattttcggcaccaatggaccagtcgacctgaagaaaattactaatttttttcgtggtgaccgctgcagatccctgacgggcaaaccaaagctttttataattcaagcttgtcgtggcaccgagttggattgtggtatcgagacagac

SEQ ID NO: 249657 - DNA, 870 bp, synthetic construct
  misc_feature 1..870: note = Description of Artificial Sequence: Synthetic coding sequence
  source 1..870: mol_type = other DNA
atgatcgaaactgactcgggggtggacgacgacatggcctgtcacaaaattcccgtggaagcagactttctgtacgcatactccactgcccctggttactactcatggagaaactcgaaggatggatcctggtttatccaatcattgtgtgcaatgctcaagcaatacgcagacaaactcgaattcatgcatatccttacccgcgtgaatagaaaggtggctacggaattcgaatcattctcgtttgatgcaaccttccatgccaagaaacaaattccatgtatagtttcaatgctgaccaaggaactctatttctaccatgatgaagtggacggaggttcgcctatggagaataccgagaactccgtggattcaaaatcgatcaaaaacctcgaaccaaagattatacatgggtcggagtcgatggatagcgggatctcactggataattcgtacaaaatggattacccggagatgggactttgtattatcatcaacaacaagaactttcacaagtcaaccgggatgacttcgaggagcggcaccgatgtggatgcagcaaatcttcgggaaactttccgcaatctcaagtacgaagtcagaaacaagaatgatcttacgcgggaggagattgtcgagcttatgagggatgtctccaaggaagatcatagcaaaagaagctcatttgtgtgcgtgcttctttcccacggcgaagaaggtatcattttcggcactaacggaccagtggacttgaagaagattaccaacttttttcgcggcgatcgttgtagaagcctcactggaaaacctaaacttttcatcattcaagcatgtcgcggtactgaattggactgtggcatagaaactgac

SEQ ID NO: 249658 - DNA, 870 bp, synthetic construct
  misc_feature 1..870: note = Description of Artificial Sequence: Synthetic coding sequence
  source 1..870: mol_type = other DNA
atgatcgaaaccgactcgggtgtggacgacgacatggcctgtcataagatcccagtagaagcggatttcctctacgcgtactcaactgctccagggtactactcatggcggaactcgaaggatggatcgtggtttattcaatccctgtgtgccatgctgaagcagtacgcagataagctggagtttatgcacatcctcacgcgggtgaatagaaaggtggcaactgaattcgagagcttctctttcgacgctaccttccatgctaagaaacagattccctgcatcgtgtcaatgctgaccaaggagctgtacttctaccacgacgaagtcgatgggggatccccaatggagaacaccgagaactcggtcgactcgaagtcgatcaaaaaccttgagccgaaaatcattcacggttcagagtcaatggactccgggatcagcctggacaattcgtacaagatggattaccctgaaatgggcctgtgcatcatcatcaacaataagaacttccataagtcgaccggcatgacttcacgctcgggtactgacgtggatgcagcaaatctccgtgaaaccttccgcaatctgaagtacgaggtccggaataagaatgatctcacgcgcgaggaaatcgtggaactgatgcgggacgtctcgaaagaggatcactcaaagcggtcctctttcgtgtgcgttttgttgagccacggcgaagagggaattatcttcggcaccaacggcccggtggacctgaagaaaatcaccaatttcttccggggtgaccgatgcaggtccttgaccggaaaaccgaagctcttcattatccaggcgtgtcgggggactgagctcgactgtggaatcgaaactgat

SEQ ID NO: 249659 - DNA, 870 bp, synthetic construct
  misc_feature 1..870: note = Description of Artificial Sequence: Synthetic coding sequence
  source 1..870: mol_type = other DNA
atgatcgagactgactctggggtggacgacgacatggcctgccacaagattcccgttgaggccgacttcctgtatgcgtacagcactgctccgggatactatagttggcgaaactctaaggacggaagctggttcatccagagcctttgcgcaatgcttaaacagtacgccgacaagttggagtttatgcacatccttactcgggtcaatcgaaaggtagctacggaatttgagtctttttccttcgatgcaacgtttcatgctaagaagcagatcccatgcattgtgagcatgctgaccaaagagctgtacttctatcacgacgaggtggatggaggtagcccaatggaaaacacggaaaatagcgtggatagcaagtctattaagaatctggagcctaagatcatccacgggtctgagagtatggacagtgggatctccctggacaattcttataaaatggattacccagagatgggtctgtgcatcataattaacaataagaacttccacaaatctactgggatgacgtctcgctctggcactgacgttgatgctgctaacctgagagagactttcaggaatctgaaatacgaggtgagaaataagaacgacttgaccagggaagaaatagttgagcttatgcgggacgttagcaaggaagatcactctaaaagatccagcttcgtctgtgtacttctttcccacggcgaggaagggatcattttcggaacaaatggccccgtagacctgaagaaaatcaccaatttctttagaggtgatcgctgtcgaagtttgactgggaagcctaagctcttcataattcaggcctgtagaggaacagaactggattgtgggatagagacagat

SEQ ID NO: 249660 - DNA, 870 bp, synthetic construct
  misc_feature 1..870: note = Description of Artificial Sequence: Synthetic coding sequence
  source 1..870: mol_type = other DNA
atgatcgaaactgatagtggggtggatgatgatatggcatgccataaaatacctgtggaagcagatttcttgtacgcatattctacagcccctgggtactattcttggaggaattccaaagatgggagttggttcatccagtccttatgtgccatgctcaagcagtacgccgataaactcgaattcatgcacatccttacaagggtcaacaggaaggtcgccactgaatttgaatcattctctttcgatgccacttttcatgccaaaaagcagataccatgtatagtttctatgctcacaaaagaactctatttctatcatgatgaggtagacgggggatcacccatggaaaatacagagaactcggtcgattctaaaagtatcaaaaatctggaaccaaagataattcacggatcagaatcaatggacagtgggatctcccttgataatagttataaaatggattatcctgaaatggggctctgtataataatcaataataagaatttccacaaatccacagggatgacttctagatctggaacagatgttgatgcagcaaaccttagggaaacatttcgaaaccttaaatatgaggtgcggaacaagaatgatctgactagagaagagatagtggaattaatgcgcgatgtttccaaagaagatcatagtaaaaggtcctcgtttgtttgtgttcttttgtcacacggagaagaagggataatattcgggactaatggaccagtagacttaaaaaagataacaaacttctttcgaggggatagatgtcgaagtctgacaggaaaaccaaagctgttcataatccaggcttgtagagggactgagctggattgcgggattgaaacagat

SEQ ID NO: 249661 - DNA, 870 bp, synthetic construct
  misc_feature 1..870: note = Description of Artificial Sequence: Synthetic coding sequence
  source 1..870: mol_type = other DNA
atgattgaaaccgattccggtgttgacgatgatatggcgtgtcacaagatccctgttgaggccgacttcctttacgcatatagcactgccccagggtactattcgtggagaaattccaaggacggatcctggttcatacaatcgctgtgtgccatgcttaagcaatacgccgataagctggagttcatgcacattctcaccagggtgaatcgtaaggtggctaccgaatttgagagctttagctttgacgcaacctttcatgctaagaagcaaattccttgtatcgtgagcatgctgaccaaagagctctacttctaccatgatgaagtggacggtggtagccccatggagaataccgaaaacagcgtcgattccaaatccatcaaaaacctcgaaccaaagattattcacggttcggagagcatggatagcggaattagtcttgataattcatacaaaatggattacccagagatgggactgtgcatcattatcaataacaaaaactttcataagtcaaccggaatgacttcccggtcaggtactgatgtggatgcagcaaatctccgggagacttttagaaatcttaagtacgaagtgaggaacaagaacgacttgactagagaagaaattgtcgaacttatgagagacgtgtcgaaagaggatcattctaagagatcgagctttgtgtgcgtccttcttagccatggtgaggaggggattatctttggaaccaatggcccagtcgatctcaagaagattaccaatttcttccgtggagacagatgtcggtcactcactggtaaacctaagctcttcattatccaggcgtgtcgaggaactgaacttgattgtggcatcgagactgat

SEQ ID NO: 249662 - DNA, 870 bp, synthetic construct
  misc_feature 1..870: note = Description of Artificial Sequence: Synthetic coding sequence
  source 1..870: mol_type = other DNA
atgatagaaactgactctggagtggacgatgacatggcatgccacaaaattcccgtggaggccgactttctatatgcttattcaacagctcctggttactattcgtggaggaacagcaaggatggctcctggttcatccagagtctttgtgctatgttgaagcaatacgctgataagctggagtttatgcatatcttgaccagggtgaaccggaaggttgccactgaatttgagagcttcagctttgacgctacatttcacgccaagaagcagataccttgcatcgtgtccatgctcacaaaggaattgtacttctatcacgacgaggtcgatggaggaagcccaatggagaatacagagaacagcgtagattcgaaaagtatcaaaaatctagagccgaagatcatacatggcagcgaatctatggattcaggcatttctctggataattcttataagatggactaccccgagatgggcctatgtataattattaacaacaagaatttccacaagagtactggaatgacttccaggtctgggacagatgtcgacgctgctaatttgagggagacgtttcgtaatctcaagtatgaggtccgcaataagaacgacctaaccagagaagaaatcgtcgagctcatgcgtgatgtgtccaaggaggaccactccaagcgctccagcttcgtatgcgtgcttctgtcccatggggaggaaggcattatcttcgggactaacggacctgtcgatctgaaaaagattacaaactttttcaggggagacagatgtagatcccttacaggaaagccgaagctctttattattcaagcttgtcgaggaacagagctagactgtggtatagaaacggac

SEQ ID NO: 249663 - DNA, 870 bp, synthetic construct
  misc_feature 1..870: note = Description of Artificial Sequence: Synthetic coding sequence
  source 1..870: mol_type = other DNA
atgatcgagactgattcgggagtggacgacgatatggcttgccataagatcccggtcgaagcagacttcctctacgcctacagtaccgcccccggatactacagctggcgtaacagcaaggatggttcgtggtttattcagagcctctgcgcgatgctgaagcagtacgccgataagttggagtttatgcatattctcacccgggtcaatcggaaagtggcgaccgaattcgaatcgtttagcttcgatgctaccttccacgccaaaaaacaaattccctgcatcgtgtcgatgctcaccaaagagctctacttctaccacgatgaggtggacggcgggtcgcctatggagaatactgagaacagcgtcgactcgaaaagcatcaaaaacctggaaccgaagatcatccatggaagcgaatctatggactctggtatctcgcttgacaactcctacaaaatggattatccagaaatgggactgtgcatcatcattaacaacaagaattttcataagtcgacgggaatgactagccgctcgggtaccgacgtggacgcagcgaacctgcgggaaacttttagaaatttgaagtacgaggtgcgcaacaagaatgatctcacccgtgaagaaatcgtggagctcatgagagacgtgtccaaggaggaccactcaaagcgctcctccttcgtctgcgttctgttgtcgcacggagaggaaggcatcatattcggaaccaacggcccggtcgaccttaagaagattaccaacttcttccggggggataggtgcagaagtctcactgggaagcctaagctgttcatcatccaagcctgtcgcggcactgagctcgactgtggaatcgaaacggac

SEQ ID NO: 249664 - DNA, 870 bp, synthetic construct
  misc_feature 1..870: note = Description of Artificial Sequence: Synthetic coding sequence
  source 1..870: mol_type = other DNA
atgatcgaaaccgactcgggggtcgacgatgacatggcatgccacaaaatacccgtggaggctgacttcctctacgcctactcaaccgcacctggttactactcctggcggaactccaaggatggctcctggtttattcaatcactctgtgcaatgcttaagcagtatgcagacaagctcgaattcatgcatatactgactcgagtgaatcggaaagtcgcaacggaatttgaatccttctcgtttgatgcaactttccatgcaaagaagcagataccctgtattgtgtcgatgctcaccaaggaactgtacttttaccatgacgaggtcgacggaggttcgccaatggagaatacggagaactcggtggattctaaatccatcaagaatctcgaaccaaagattatccatggatccgagtcgatggattccggcatatcccttgataactcgtacaagatggattaccctgaaatgggcctgtgtatcatcattaacaacaaaaactttcataagagcaccggcatgacctcgcgatcaggcactgatgttgatgcagcaaatctgagagaaacctttcggaatctcaaatatgaagtgagaaacaaaaacgatctgactcgtgaggagatcgtggaacttatgagagatgtgtcgaaagaggaccatagcaaacggtcgtcattcgtgtgtgtcttgctttcgcacggagaggagggcatcatatttggtactaatggaccggtggatttgaaaaagatcaccaactttttcagaggagataggtgtcgaagcctgactgggaaacctaagctcttcatcatccaagcatgccgtggaactgaacttgactgcggaatagaaaccgat

SEQ ID NO: 249665 - DNA, 870 bp, synthetic construct
  misc_feature 1..870: note = Description of Artificial Sequence: Synthetic coding sequence
  source 1..870: mol_type = other DNA
atgattgaaactgattccggcgtggatgatgacatggcctgtcataagatacctgtggaagcggattttctgtacgcttacagcaccgcacccggatactactcatggcggaactcaaaggacggatcatggttcattcaatcgctctgtgcaatgcttaaacaatacgcagataaacttgaattcatgcatatcctgactcgcgtcaaccggaaggtggccaccgaattcgaatcgttttcattcgacgccacctttcatgccaagaagcagatcccttgtatcgtctcaatgcttaccaaggagctgtatttctatcacgacgaagtggacgggggttcgccaatggaaaataccgaaaactcagttgatagcaagagcataaagaaccttgaacctaagattatacatggatctgaatcaatggactcgggtatttcgctcgataattcctacaagatggattatcctgagatgggactgtgcatcatcatcaataacaaaaactttcataagtcgaccggcatgactagccgttccgggaccgacgtggacgcagcgaacctgcgagaaacctttcgtaatttgaagtacgaagtgcgtaacaaaaacgatttgaccagggaggaaattgtggaactgatgagggatgtctcgaaggaggatcactcgaagagatcctcgtttgtgtgtgtcctcctgtcccatggagaagagggaattatcttcggaacgaatggaccagtggatctgaagaagataaccaacttttttcggggagatagatgtaggagccttactggtaagccaaagctcttcatcattcaggcatgtcgtggaaccgaacttgactgtggaatcgaaactgac

SEQ ID NO: 249666 - DNA, 870 bp, synthetic construct
  misc_feature 1..870: note = Description of Artificial Sequence: Synthetic coding sequence
  source 1..870: mol_type = other DNA
atgatcgagaccgactccggagtggatgatgatatggcctgtcacaagattccagtggaagccgactttctgtacgcttattcaacagccccaggctattactcctggcggaattcaaaggatggcagctggttcattcagagcctgtgcgccatgctgaaacaatacgccgacaagctagagttcatgcacatcctgacaagggtcaatcggaaggttgccaccgagttcgaatctttttcatttgacgcaaccttccatgctaagaagcaaataccctgtattgtgtccatgctgacaaaggagctttacttctatcatgacgaggttgatggtggcagtccaatggaaaataccgagaattctgtggatagtaagagcatcaaaaacttggagccaaagattatccatggctcagagagcatggacagcggcatctctctggataactcttataagatggattatccagaaatggggctatgcattatcatcaacaacaagaacttccacaagagtaccggaatgacttccagatctgggaccgatgtggatgccgcaaatctaagggaaacctttcgcaacctgaagtacgaagttcgcaataagaacgatctgacaagggaggagatcgtggagttaatgagagacgtgtccaaggaagaccactccaagcgcagctctttcgtgtgcgtgctgctgagtcacggcgaagagggtattatatttggaaccaacggcccagttgatctgaagaagataaccaacttttttaggggcgaccgctgcaggagcctgactggcaaacctaagctgttcataatacaggcctgtagaggcactgaattagattgtggcatcgaaaccgac

SEQ ID NO: 249667 - DNA, 870 bp, synthetic construct
  misc_feature 1..870: note = Description of Artificial Sequence: Synthetic coding sequence
  source 1..870: mol_type = other DNA
atgatcgaaaccgattcgggcgtggatgacgacatggcatgtcacaagatcccggtcgaagctgacttcctgtacgcctactcgaccgccccagggtactactcttggaggaactcgaaggatggatcgtggttcattcagagcctgtgcgccatgttgaagcagtatgccgataaactcgaattcatgcacatcctgacccgcgtgaataggaaggtggccaccgagttcgaatccttctccttcgacgctacgtttcacgccaaaaagcaaattccgtgcattgtgtccatgctgaccaaggaattgtacttttaccacgacgaggtcgacggaggaagcccgatggagaataccgaaaactcagtggacagcaaatccatcaagaacctcgagccgaagatcattcatggctccgagtcaatggattcagggatctccctggataactcctacaagatggactaccctgaaatgggactttgcatcatcatcaacaataagaattttcacaagagcactggcatgacctcgagatcaggaaccgacgtggacgcggccaatctcagggagactttcagaaacctgaagtatgaagtgcgcaacaaaaatgatctgacgcgcgaagaaattgtggagcttatgcgcgatgtctcgaaagaggaccactccaagcgcagctccttcgtctgcgtgctgctgagccacggcgaagaggggatcattttcggaactaacggcccggtggacctcaagaagatcaccaacttcttccggggtgaccgctgccgttcactgactgggaagccgaaacttttcatcatccaggcgtgccgcggaacggaacttgattgcggcattgaaaccgac

SEQ ID NO: 249668 - DNA, 870 bp, synthetic construct
  misc_feature 1..870: note = Description of Artificial Sequence: Synthetic coding sequence
  source 1..870: mol_type = other DNA
atgattgaaactgactcaggcgtggatgatgatatggcctgtcataagattccggtggaagcagattttctttacgcgtactcaacggcccctggatactactcttggagaaattccaaggacggatcttggtttattcaatccctctgtgcaatgctcaagcagtacgcagacaaacttgaattcatgcacatccttactagggtgaatagaaaggtagcaacggaattcgagtcattttcgtttgatgcaaccttccatgctaagaaacagattccctgcattgttagcatgttgactaaggaattgtacttctatcatgacgaggtggatggcggcagcccaatggagaacaccgagaactcggtggacagcaaatcgattaagaatttggagcctaagattatccacgggtctgagagcatggatagtggaattagcctggataactcgtataagatggattaccctgaaatgggactgtgtattatcatcaataacaaaaactttcataagtcaactggaatgacctctcgctcgggcactgacgtcgatgcggccaacctgagagaaacctttcgaaatctcaagtacgaagtgcgaaacaagaatgacctcactcgcgaggaaatcgtggagttgatgcgcgacgttagcaaagaggatcactccaaacggtcatcctttgtgtgcgtgctgctgtcacatggagaagaagggatcatttttgggactaacggtccagtcgacctgaagaagattactaacttctttagaggggacaggtgtcgtagccttaccggaaagcccaaacttttcattatccaagcatgtagagggaccgaacttgattgcggaattgaaactgat

SEQ ID NO: 249669 - DNA, 870 bp, synthetic construct
  misc_feature 1..870: note = Description of Artificial Sequence: Synthetic coding sequence
  source 1..870: mol_type = other DNA
atgatcgagaccgattcaggagttgacgacgacatggcatgtcataaaattcccgtggaagctgactttctgtatgcttatagtacggcccctggatactactcatggcggaacagcaaggatgggtcatggttcatccagagcttgtgtgcaatgctgaagcagtatgcagataaactggaatttatgcacattcttacccgggttaatagaaaggtagctacagagttcgagagtttcagcttcgatgcaacttttcacgccaagaaacagattccctgtatcgtttcgatgttgactaaggagctttatttttaccacgacgaggtcgatgggggctctcctatggagaacaccgagaacagcgtcgactctaaatctattaaaaatcttgaacctaagatcattcacggcagcgagagtatggacagcgggatttcccttgacaattcttataagatggactaccccgagatgggcctgtgcataattattaacaacaagaattttcacaagagtacgggtatgactagccgctccggcaccgacgtagatgcagccaatttgcgagaaacctttcggaacttaaagtatgaggtccgaaacaagaacgatctgaccagggaagaaatcgttgagctgatgcgcgatgttagcaaagaggatcacagtaagcgtagcagctttgtgtgtgtgctcctcagtcacggcgaagaaggaattatattcggaacaaacgggcctgtcgacttaaagaagatcacgaattttttcagaggcgatcgttgcagaagcctgacaggaaagcccaaacttttcatcatacaggcttgtagaggaaccgagctggactgtggaatcgaaacagac

SEQ ID NO: 249670 - DNA, 870 bp, synthetic construct
  misc_feature 1..870: note = Description of Artificial Sequence: Synthetic coding sequence
  source 1..870: mol_type = other DNA
atgatcgaaaccgattctggcgtagatgacgacatggcctgccataagatccctgttgaagcagattttttgtacgcgtattccacagccccagggtattattcctggagaaacagcaaagacggatcttggtttattcagtctctctgtgctatgctgaagcagtacgccgacaaactggaatttatgcacattctcaccagagttaaccgaaaggtggccaccgagtttgaaagtttttcgttcgacgccactttccacgcgaaaaagcagattccttgcattgtgagcatgctgacgaaagaattgtatttctatcacgacgaggtggatggcggctctcctatggagaacacggaaaactctgtcgattcgaagtcaataaagaatctggaaccaaagataatccatgggtccgaatccatggacagcggcatttctctcgacaactcttacaaaatggactaccccgagatgggcctttgtatcatcatcaacaacaaaaattttcataagtctacgggcatgacctcgcggagtggtacagacgttgacgcagccaatttgcgcgagacctttcggaatcttaagtacgaggtaagaaataaaaatgacttgaccagggaagaaattgtggaattgatgagggacgtctctaaggaggaccatagcaagcggtcatccttcgtgtgtgttctgctctcacacggagaggagggcatcattttcggaacaaacggaccagtggatctaaaaaaaataacaaacttcttccgaggggatcgatgcagatccttaacaggtaagcctaagctgtttatcatacaggcttgtaggggaacagagctcgactgtggaattgaaactgac

SEQ ID NO: 249671 - DNA, 870 bp, synthetic construct
  misc_feature 1..870: note = Description of Artificial Sequence: Synthetic coding sequence
  source 1..870: mol_type = other DNA
atgatcgaaacggactctggggtcgacgatgatatggcctgtcataagatccccgtcgaggctgactttctgtatgcctactccacggctccgggatactactcttggcgcaattcaaaggacgggtcctggtttattcagtcgctctgtgccatgttaaagcagtacgctgacaagctggaattcatgcatatactgacccgggtgaaccgcaaggtcgcgacagagtttgagagcttcagttttgacgctactttccatgcaaagaagcaaattccatgtatcgtgtctatgttgactaaggagctttacttctaccacgacgaggtggacggcgggagtccaatggagaataccgagaattccgtggattccaaaagcattaagaatctcgaacctaaaatcatccacggaagcgagagcatggacagtggcatctcacttgataacagctataaaatggattacccagagatgggtctctgtattatcattaataacaaaaatttccacaagagcactgggatgacaagcagaagtggaacagatgtggatgcagctaatttgagagagacctttaggaaccttaagtatgaggtacgcaataaaaatgatctgactagggaagagatcgtggaactcatgcgagatgttagcaaggaggaccactcgaagcgctcttcttttgtgtgtgtgctgctgagccacggggaggaaggaattatctttgggacgaacggcccagtggacttgaagaagatcacgaatttctttcgtggcgatagatgtagatccttgacaggtaagcctaaactgttcataatccaagcgtgtcgaggaactgagttggactgtggaatcgaaactgac

SEQ ID NO: 249672 - DNA, 870 bp, synthetic construct
  misc_feature 1..870: note = Description of Artificial Sequence: Synthetic coding sequence
  source 1..870: mol_type = other DNA
atgatcgagacagattcaggggtggatgatgatatggcttgccacaagataccagtcgaggcagactttctttacgcctactcaaccgcaccaggatactattcttggcggaactccaaggatgggtcctggtttatacagtctctctgcgcaatgctcaaacaatacgcagacaagctggagtttatgcacatcctcactagggtgaatagaaaggttgcgaccgagtttgagagtttctcattcgacgcaaccttccacgctaaaaagcagatcccatgtatcgtgtccatgctcactaaggagctgtatttctaccacgatgaagtggacgggggatcccccatggaaaacacagaaaattctgtcgactctaaaagtataaaaaacctcgagcccaaaattatccatgggagtgagtccatggatagcggtatatctctcgataactcttacaaaatggattatcccgaaatgggattgtgtatcattataaacaataaaaatttccataagtctacaggcatgacttcaagaagtggaaccgatgtggacgcagccaacctgcgggaaacatttcggaatttaaagtatgaggtaaggaacaagaacgatctgaccagagaggagatagtggaactcatgagggatgtgagcaaggaggaccacagcaagcgaagttcatttgtatgtgttctactgagccatggtgaggaggggataattttcgggaccaacggtccggtggatttaaaaaagataaccaactttttccggggggatcggtgccgatccctgaccggaaaaccaaagctgtttatcattcaagcatgccgaggtactgagctcgactgtggtatcgagactgat

SEQ ID NO: 249673 - DNA, 870 bp, synthetic construct
  misc_feature 1..870: note = Description of Artificial Sequence: Synthetic coding sequence
  source 1..870: mol_type = other DNA
atgattgagacagatagtggggtggacgatgacatggcctgtcataagatccctgtggaggcagatttcctgtacgcctatagcacggccccagggtattactcctggcggaattccaaggatgggtcttggttcatacagagcctgtgtgcgatgctcaagcagtacgctgacaaactggagttcatgcatatcctgacacgggtcaataggaaagtcgcaacagagttcgaatcttttagcttcgacgccacctttcacgctaaaaaacagataccttgtatcgtttctatgctgactaaggagctgtatttctatcatgacgaagtggatggggggtctcccatggagaatactgaaaattccgttgactccaagagcattaaaaacctggagccaaaaatcatccatggctcagagtccatggattcagggatatcactggacaactcttacaaaatggactacccagagatgggactgtgcataattataaataataagaacttccataaatcgaccggaatgacgtccaggtccggcacagacgtcgacgccgctaatctcagagaaacctttaggaacttgaagtacgaggtacgaaacaaaaatgatctgacaagagaggaaatagtggagttgatgagggacgtgtctaaggaagaccactccaaaagatcctcattcgtctgtgttctgctgagtcatggagaggagggcattatatttggtacaaacgggccagtagaccttaagaagatcactaactttttccggggtgacaggtgccgctcattaaccggcaaacccaagctctttataatccaggcttgccggggaacagaactggactgcggaatagaaaccgac

SEQ ID NO: 249674 - DNA, 870 bp, synthetic construct
  misc_feature 1..870: note = Description of Artificial Sequence: Synthetic coding sequence
  source 1..870: mol_type = other DNA
atgatagaaactgattcaggagtggacgatgacatggcctgccataaaattcccgtggaagcagactttttatatgcttattctacagcacctggatattattcttggcgcaactccaaagacgggtcatggttcatccagagcttgtgcgcgatgctcaaacagtacgccgataaactcgagtttatgcatattctcaccagagttaatcggaaagtggccaccgagtttgagtcgttctccttcgacgccacatttcacgctaagaaacaaattccttgtatagtgtcaatgttgacaaaggaattatatttttatcacgacgaggtcgacggaggatcacctatggagaatacagaaaatagcgtggactctaaatcaattaagaacctggagcctaaaataatccatgggtcggaatccatggacagcggcatatccctggataattcgtacaagatggactaccccgagatgggactgtgcatcatcattaacaataaaaactttcataagtctacaggcatgacttcccgatcgggcactgacgtcgacgccgcgaatttacgggagacatttagaaacctgaagtacgaggtcaggaacaaaaacgacctcacacgtgaggaaatcgtggagctgatgcgtgacgtttctaaggaagatcatagtaagaggagttcttttgtatgcgtgctgttgtcgcacggcgaagaggggatcattttcgggacaaacggtcctgtggaccttaagaaaataactaacttctttagaggagataggtgtagaagtctgaccggcaaacccaaactgttcattattcaggcgtgtagaggaacggagctggattgcggaatcgagaccgat

SEQ ID NO: 249675 - DNA, 870 bp, synthetic construct
  misc_feature 1..870: note = Description of Artificial Sequence: Synthetic coding sequence
  source 1..870: mol_type = other DNA
atgatagaaacggattcaggcgttgacgacgatatggcatgccacaaaatcccagtcgaggccgactttctgtacgcatactccacagcacctggatactattcctggagaaattcaaaggatggcagctggttcatacagtccctctgcgcaatgttgaagcaatacgccgacaaattggaattcatgcatattctgacaagggtgaatcggaaagttgccacagagtttgagtcattctccttcgacgcaacatttcatgctaaaaaacagatcccctgcattgtctccatgctgacaaaagaactgtacttctatcacgatgaggtggacgggggctcccccatggagaatactgagaacagcgtagattctaaaagtatcaaaaacctggaacctaaaataattcacggtagcgaaagtatggactccggaatctccctggacaactcctataaaatggattatccggaaatgggcctgtgcattattattaacaacaaaaatttccacaaaagcacaggaatgacctcaaggtcagggactgatgtggacgccgctaatctgagagagactttcagaaacctgaaatatgaggttaggaataagaatgatctgacaagggaggagatagtggaactgatgagagacgtatccaaggaggatcattcaaagagatcctcctttgtctgtgtgctgctcagccacggagaggagggtatcattttcggaaccaacggacctgtggacctcaagaaaattacaaattttttccgaggtgacaggtgtcggtcccttaccgggaagcctaaactgttcatcattcaggcctgccgaggaacagagctggattgcgggatcgagacagac

SEQ ID NO: 249676 - DNA, 870 bp, synthetic construct
  misc_feature 1..870: note = Description of Artificial Sequence: Synthetic coding sequence
  source 1..870: mol_type = other DNA
atgatcgagactgacagcggagtagacgatgacatggcatgtcacaaaataccagtcgaggccgatttcctatatgcctacagtaccgccccgggatactactcctggaggaactccaaggacggctcctggttcattcagtcactctgtgctatgctgaaacagtatgcggacaagttagaatttatgcacatattgacaagagtcaatcgcaaggttgctaccgaatttgagagcttcagtttcgatgccacctttcacgcaaagaagcagatcccgtgtatagtttccatgctaaccaaggagctctatttttatcatgatgaggtcgacggcgggagcccaatggagaataccgagaatagcgtggacagtaaaagcataaaaaatctcgagccaaaaatcatacatggaagcgaatctatggacagcgggatatctctcgacaatagctacaagatggactatcctgaaatgggactgtgcatcattattaataataagaatttccataagagcacgggtatgacaagcagaagcgggacggacgtggatgccgccaacctcagggagacctttagaaatctgaagtatgaagtcaggaataagaatgatctgaccagggaggaaattgtcgaattgatgagagatgtgtctaaagaggaccacagtaaaaggtccagttttgtttgcgtgctgttgtcccacggagaagaggggattatcttcggtacaaacggccccgtggatctgaagaagatcacaaactttttccgcggggacagatgtcggtctctaacagggaagccaaagctattcataatacaagcatgtcgagggactgagctggattgtggaattgaaacggat

SEQ ID NO: 249677 - DNA, 870 bp, synthetic construct
  misc_feature 1..870: note = Description of Artificial Sequence: Synthetic coding sequence
  source 1..870: mol_type = other DNA
atgatcgagactgattccggcgtggacgatgacatggcctgccataagattcccgtggaggccgacttcctttacgcctatagcacggctccaggctactactcgtggcgcaattcgaaggatggcagctggttcatccaatcgctgtgcgcgatgcttaagcagtacgcagataagctggagtttatgcatatcctgactcgcgtgaaccgcaaggtggccactgaattcgaatcgttctcattcgacgccaccttccacgccaagaagcaaattccttgtatcgtgagcatgctgactaaggagctctacttctaccacgatgaagtggacgggggatcaccgatggaaaatacggagaattcggtggacagcaagtcaatcaagaatctggagcctaaaatcatccatggatccgaaagcatggacagcggcatctcccttgataattcctataagatggattaccctgaaatgggcctttgtatcatcatcaacaataagaatttccacaagtccaccgggatgacctcaagatcggggactgatgttgatgcagcgaacctgcgcgaaaccttccggaacctcaaatacgaggtcagaaataagaacgatctcacccgcgaagagatcgtggaactgatgcgcgatgtgtcgaaagaggaccattctaagcggtcatctttcgtttgcgtgctcctgtcccacggcgaagagggaatcattttcggaaccaacggtccggtggaccttaagaaaatcaccaatttcttccggggcgaccggtgccgctccctgaccggaaagccaaaactgttcatcatccaggcatgtaggggcactgagctcgattgcggaatcgaaaccgat

SEQ ID NO: 249678 - DNA, 870 bp, synthetic construct
  misc_feature 1..870: note = Description of Artificial Sequence: Synthetic coding sequence
  source 1..870: mol_type = other DNA
atgattgaaaccgactccggtgtcgacgacgatatggcttgccataagattcctgtggaagctgacttcctctacgcctatagcacggcgccgggatattactcttggaggaactcgaaggatggaagctggtttattcagtccctgtgtgccatgctgaagcagtacgctgataagttggaattcatgcatattctgacgagagtgaacaggaaggttgccaccgaattcgaatctttcagcttcgacgcgactttccacgccaagaagcaaattccatgcatcgtgtcgatgctgaccaaggagctgtacttctaccacgacgaggtcgacggaggatcaccgatggagaacaccgaaaactccgtggacagtaagagtatcaagaacctcgaaccgaagatcatccacggttccgaaagcatggactcgggcatctccctggataattcgtacaaaatggactacccagaaatggggctttgcataatcatcaataacaagaatttccataagagcactggaatgacgtcccggagcggcaccgatgtggacgcagcaaacttgagggaaacctttcggaatctgaagtacgaagtgcgaaacaagaacgatctcactcgcgaagagatcgttgagttgatgcgcgatgtctccaaggaggaccattccaaacgttcgtcatttgtgtgcgtgcttctgtcacacggcgaagaaggaatcatattcggaacgaacggacctgtggatctgaagaaaatcaccaatttcttccgaggggatcgctgcagatccctcactggaaagcccaaactgtttatcatccaggcgtgtcgcggaacggaattggactgcgggatcgagactgac

SEQ ID NO: 249679 - DNA, 870 bp, synthetic construct
  misc_feature 1..870: note = Description of Artificial Sequence: Synthetic coding sequence
  source 1..870: mol_type = other DNA
atgattgagaccgattccggagtggacgacgatatggcttgccacaaaatcccagttgaagcagacttcctgtacgcttactcaacagctccaggctactacagctggagaaacagcaaggatggaagttggttcatccaatcactgtgcgccatgctgaaacaatatgcagataagttagagtttatgcatatcctgacccgtgtcaacagaaaggtcgctaccgagttcgaaagctttagctttgatgcaacatttcacgccaagaagcagatcccatgcatagttagtatgctgaccaaagaactgtatttttaccacgacgaagtcgatggcggctcccctatggagaacaccgagaactccgttgactccaagtcaatcaaaaacctggagccaaaaattatccatggcagcgagagtatggacagtggaataagccttgacaacagttataaaatggattatcctgagatgggcttgtgcattatcatcaacaacaaaaacttccacaagtctactggaatgaccagccgcagcggaaccgacgtggacgcggcaaacctgcgggagaccttccgaaacctcaagtacgaggtgcgtaataagaacgatcttacgagagaagagatagtcgagctcatgcgcgatgtgagcaaagaagaccatagtaaacgctcttcgtttgtttgcgtgctgctgtcacatggagaggagggaatcatctttggcacgaacggacccgtggatctgaaaaaaattacaaatttcttccggggggatcgatgcagatcattgacggggaagccgaaactgtttataatccaggcttgcaggggtactgaactggattgcggcatagagacagat

SEQ ID NO: 249680 - DNA, 870 bp, synthetic construct
  misc_feature 1..870: note = Description of Artificial Sequence: Synthetic coding sequence
  source 1..870: mol_type = other DNA
atgatagagactgattcgggggtggacgatgacatggcctgtcataagatcccggtggaagcagactttctctacgcctactcgaccgcgccgggatactacagttggagaaacagtaaagatgggtcatggttcatccagtcactgtgcgcgatgctcaagcagtacgccgacaaactggagtttatgcatatcttgacccgcgtgaaccgcaaagtagcaacggaattcgagtccttctcattcgacgctacgttccacgccaagaagcaaatcccatgcatcgtatctatgctgactaaagaactgtacttttatcacgacgaggtcgatggcggttcccctatggaaaacacggaaaattccgtggattcgaaaagcattaagaacttggagcctaagatcattcacggatccgagagcatggacagcggtatctcactggacaatagctacaagatggactacccggaaatggggctctgcatcatcatcaacaacaagaacttccataagtctaccggtatgactagccgcagcggaaccgatgtcgacgctgcgaacctgcgggaaactttcagaaatcttaagtacgaggtgcgcaataagaatgacctgactcgcgaggaaatcgtcgagcttatgcgagatgtgtccaaggaggatcactcgaaaagatcatcctttgtctgcgtgctgctttcgcacggtgaagagggcatcattttcggaaccaacggacccgtggatctcaagaagatcaccaacttcttccgtggagatcggtgtagatctctcactggcaagccaaagttgttcattatccaagcctgccggggaaccgaactggactgcggcatcgaaaccgac

SEQ ID NO: 249681 - DNA, 870 bp, synthetic construct
  misc_feature 1..870: note = Description of Artificial Sequence: Synthetic coding sequence
  source 1..870: mol_type = other DNA
atgattgaaaccgattcaggcgtggacgacgacatggcttgtcacaagattcccgttgaggcggattttctctacgcatactctactgcacctgggtactactcgtggagaaactcaaaagatgggtcgtggtttatccaatcactttgcgcgatgcttaaacagtacgcagacaaattggagttcatgcatattcttactagagtgaatcgtaaggtcgctactgaatttgaatccttttcgttcgacgccacctttcatgcgaagaagcagatcccgtgtattgtgagcatgctgaccaaggagctgtacttttaccatgatgaggttgatggaggatcgcctatggaaaatacggagaattccgtagacagcaaatccataaagaatcttgaaccaaagataattcatggctcggaaagcatggatagtggaatctcgctcgataactcgtacaaaatggactaccctgaaatgggtctttgcatcataatcaacaacaaaaactttcataagtcgaccggtatgactagccgttcgggtactgacgtcgacgcagcgaatctgcgggaaacttttaggaatctgaagtatgaagtgagaaacaaaaacgacttgaccagggaggaaattgtggaactgatgcgcgatgtgtcaaaggaggatcactccaaaaggtcatccttcgtctgcgtgctcctttcacacggagaagaagggatcatttttggaaccaacggccccgtagatcttaagaagataaccaacttcttcagaggggaccgctgtaggtccctgactggaaaaccaaagctctttatcattcaagcatgtcgaggcaccgaattggattgtgggatcgagactgat

SEQ ID NO: 249682 - DNA, 870 bp, synthetic construct
  misc_feature 1..870: note = Description of Artificial Sequence: Synthetic coding sequence
  source 1..870: mol_type = other DNA
atgattgagacagactccggggtcgacgatgacatggcttgtcacaagatcccagtggaagccgactttttgtacgcctattctaccgctcccgggtactattcgtggaggaattctaaagatggcagctggttcatacagagcctttgtgccatgttgaagcaatacgctgataaactcgagttcatgcacatcctgactagggtcaaccgaaaggtggcgacggagttcgagagtttcagtttcgatgccacttttcatgccaaaaaacagatcccctgtattgtatcaatgttgactaaagaactgtatttctatcatgatgaagttgatggagggagtcctatggaaaacactgaaaattctgttgactcgaaatctattaaaaacttggagccaaaaataatccacgggtccgaaagcatggattccggtatctcactcgataactcttacaaaatggattacccggagatgggtctgtgcattattatcaataacaagaacttccacaagtcaactggaatgacatccaggagcggcactgacgtggatgccgctaacctccgcgagacatttcgcaaccttaagtatgaagttcgaaataagaatgatttaaccagagaggagatagtagagcttatgcgggacgtatctaaggaagaccattccaaacggtcgtctttcgtctgtgtattactgtctcatggagaagaggggataattttcggcacgaatggaccggtcgatttaaagaaaattactaatttcttcaggggcgaccgatgtagatccctgacgggcaagcccaagctttttatcatccaagcttgccgagggaccgagttggattgtggcattgaaaccgat

SEQ ID NO: 249683 - DNA, 870 bp, synthetic construct
  misc_feature 1..870: note = Description of Artificial Sequence: Synthetic coding sequence
  source 1..870: mol_type = other DNA
atgatagaaaccgattcaggcgtcgacgatgatatggcctgtcataaaatccccgtggaagccgacttcctctacgcgtactccaccgcccccggctactattcctggcggaatagcaaggatggctcttggttcatccagtcattatgtgcgatgctcaaacaatatgcagacaagctagaatttatgcatattctgacaagggtcaaccggaaggtcgccactgagtttgaatcctttagttttgacgctaccttccacgccaaaaaacagattccatgcatcgtaagcatgcttactaaggagctgtacttctaccacgacgaggttgacggagggtcccctatggagaacacggagaacagtgtggactcaaagtccattaaaaacctcgaaccgaagataatccacggcagcgagtccatggactctgggatctcactcgataacagctacaagatggattaccctgaaatggggctatgtatcatcataaacaataaaaacttccacaagagcaccggaatgaccagccgatcggggaccgacgttgatgcagctaaccttcgagagacatttagaaatttgaaatacgaggtacgcaacaaaaatgatttaactcgtgaagaaatcgtggagctcatgcgtgatgtgtctaaagaggaccactcaaaaaggtcttctttcgtgtgcgtgctgctgtcgcatggcgaggagggtattatatttgggactaatgggcctgtggatcttaagaaaatcaccaatttcttcaggggagacagatgcaggtctttgacagggaaaccaaaactattcataatccaggcctgcagggggacggagctggattgtggaatcgagacagac

SEQ ID NO: 249684 - DNA, 870 bp, synthetic construct
  misc_feature 1..870: note = Description of Artificial Sequence: Synthetic coding sequence
  source 1..870: mol_type = other DNA
atgatcgaaaccgactcaggagtggacgacgacatggcttgccacaaaatcccagtcgaggccgatttcttgtacgcctactcaaccgctccgggctactactcctggcggaactccaaggacgggtcctggttcatccagagcctctgtgccatgctgaagcaatatgctgataagctggagtttatgcatatcctcactcgggtcaatagaaaagtggcaactgagtttgagtctttctcattcgatgccacgttccatgctaagaagcagatcccatgcattgtgtcgatgctgaccaaagaactgtacttctaccacgatgaggtggacggcggatcaccgatggaaaatactgaaaactccgtggactcaaagagcatcaagaatctggagccaaagatcatccacggtagcgaatcgatggattccggcatttcgctggacaactcgtacaaaatggactacccggaaatggggctctgtattatcatcaataacaagaattttcataagtcaactggaatgacgagccgctcgggaaccgatgtcgacgccgccaatctgcgcgaaaccttccgcaacctcaagtacgaggtgagaaacaagaatgatttgacgagagaagaaattgttgaactcatgagagacgtgtcaaaggaggatcactcgaagagatcgtcgtttgtgtgcgtgctgctgtcccacggtgaagagggaatcatcttcggaaccaacggcccggtcgacttgaaaaagatcaccaacttcttccggggcgacaggtgccggtcgctgactggaaagcctaaacttttcataatccaggcttgcagaggaacggagttggattgtggaatcgagactgac

SEQ ID NO: 249685 - DNA, 870 bp, synthetic construct
  misc_feature 1..870: note = Description of Artificial Sequence: Synthetic coding sequence
  source 1..870: mol_type = other DNA
atgatagaaacggattcgggtgtagatgatgatatggcgtgtcataaaataccggtagaagcggattttttatatgcgtattcgacggcgccgggttattattcgtggcgtaattcgaaagatggttcgtggtttatacaatcgttatgtgcgatgttaaaacaatatgcggataaactagaatttatgcatatactaacgcgagttaatcgtaaagtagcgacggaatttgaatcgttttcgtttgatgcgacgtttcatgcgaaaaaacaaataccgtgtatagtatcgatgctaacgaaagaactatatttttatcatgatgaagttgatggtggttcgccgatggaaaatacggaaaattcggttgattcgaaatcgataaaaaatctagaaccgaaaataatacatggttcggaatcgatggattcgggtatatcgttagataattcgtataaaatggattatccggaaatgggtttatgtataataataaataataaaaattttcataaatcgacgggtatgacgtcgcgatcgggtacggatgtagatgcggcgaatttacgtgaaacgtttcgaaatttaaaatatgaagtacgaaataaaaatgatttaacgcgtgaagaaatagtagaactaatgcgagatgtatcgaaagaagatcattcgaaacgttcgtcgtttgtttgtgttctactatcgcatggtgaagaaggtataatatttggtacgaatggtccggtagatttaaaaaaaataacgaatttttttcgtggtgatcgttgtcgttcgttaacgggtaaaccgaaattatttataatacaagcgtgtcgtggtacggaactagattgtggtatagaaacggat

SEQ ID NO: 249686 - DNA, 870 bp, synthetic construct
  misc_feature 1..870: note = Description of Artificial Sequence: Synthetic coding sequence
  source 1..870: mol_type = other DNA
atgatcgagacggacagcggggttgacgacgatatggcctgtcacaaaattcctgttgaagctgatttcctttacgcctattccactgctcctggttactactcctggaggaattcaaaggatggaagctggttcattcagtcactgtgcgccatgttgaaacagtacgcagataagctcgaattcatgcacatactgaccagggtgaaccggaaggtggctactgagtttgaaagtttcagttttgacgccacctttcatgctaagaagcagattccttgcatcgtgagtatgttgaccaaagaactgtatttctaccacgacgaggttgacggcggcagccccatggagaatacagagaattccgtcgatagtaagagtattaaaaatctcgagcccaagatcattcacggctcagaaagcatggacagcggcatctccctggataattcctataaaatggactatcctgagatgggactgtgcattattatcaataataagaatttccataagagcacaggaatgacttcaagatctggcactgatgtcgacgcagcgaacctccgagagacgtttagaaacctcaagtatgaggtcaggaataaaaacgacctcacccgggaggagattgtcgagttgatgcgcgacgtgagcaaagaggaccatagcaaacggtcatccttcgtgtgcgtgctcctgtcccatggtgaagaagggatcatatttggcaccaatggaccggtagacctgaagaagataaccaacttcttcagaggggatcggtgtaggtccttgaccggcaaacccaagcttttcattatacaagcctgccgcggaacagagctcgattgcggcatcgagacagac

SEQ ID NO: 249687 - DNA, 870 bp, synthetic construct
  misc_feature 1..870: note = Description of Artificial Sequence: Synthetic coding sequence
  source 1..870: mol_type = other DNA
atgattgaaaccgactccggggtggacgatgatatggcgtgtcacaaaattcctgtggaggcagactttctgtacgcgtactctaccgcacctggctactactcctggagaaattccaaggatggatcatggttcattcagtccctgtgcgccatgcttaagcaatacgcggataaactcgagttcatgcatattcttactcgagtgaacagaaaggtggccactgaattcgaatctttctcttttgacgcaacctttcacgcaaagaagcagattccttgcattgtgtctatgctcactaaggaactttacttttaccatgatgaagtggacggaggatccccaatggaaaataccgaaaattcggtggattccaagtccattaagaatctggaaccaaagatcatccatggttccgaatcaatggattcgggcatttcgttggataactcctataagatggattaccccgagatggggctgtgcattatcattaacaataagaactttcataagtcgactggcatgacctcacgctcaggtaccgatgtcgatgcagcaaacctgcgggagactttccggaatcttaagtacgaggtccgaaacaaaaacgatttgactagagaggaaatcgtggaactcatgagggacgtcagcaaggaggatcatagcaaacgaagctcctttgtgtgtgtcctgcttagccatggtgaggaaggaattatcttcggaactaacggaccagtcgacctcaagaagataactaatttctttcggggtgatcggtgtagatcattgaccggcaagccaaaacttttcattatccaagcatgcagaggtaccgaactcgattgtgggattgagactgat

SEQ ID NO: 249688 - DNA, 870 bp, synthetic construct
  misc_feature 1..870: note = Description of Artificial Sequence: Synthetic coding sequence
  source 1..870: mol_type = other DNA
atgatcgaaactgatagcggagtggatgacgacatggcgtgccataagatcccagtcgaagcggactttttgtacgcctactccaccgcccctggctactattcctggcgcaacagcaaggatggatcatggttcatccagtcactttgtgcgatgttgaagcagtacgccgacaaactggaattcatgcatatcctgacccgcgtgaacaggaaagtcgccactgagttcgaatcgttcagcttcgatgctacctttcatgcaaaaaagcagatcccttgcatcgtatcaatgctgaccaaagaactgtacttttaccacgacgaggtggacgggggatcgccaatggagaacactgaaaattcggtggactcaaagtcaatcaagaatctcgagccgaagatcatacatggttcggagtcaatggactctggtatctcgctggataatagctacaagatggattaccccgagatgggcctgtgtatcattatcaacaataagaattttcataaaagcaccggcatgacttcgcgctcgggaaccgacgtggatgcagccaacctgagagagactttccggaatctcaagtacgaggtgcgcaacaagaacgatctgacccgcgaagaaatcgtggaactgatgcgcgacgtctccaaggaggatcactctaagcgctcgtcattcgtgtgtgtgttgttgtcccacggagaagaaggaatcatcttcggcactaatggcccggtggatcttaagaagattaccaacttcttccgcggggatcggtgccggagcctgaccggtaaaccaaagctcttcatcatccaggcctgcagaggaaccgagctcgactgcggaatcgaaactgac

SEQ ID NO: 249689 - DNA, 870 bp, synthetic construct
  misc_feature 1..870: note = Description of Artificial Sequence: Synthetic coding sequence
  source 1..870: mol_type = other DNA
atgattgagacagactccggagtggacgacgatatggcatgtcataagatcccagtcgaggcagatttcttatatgcatacagtaccgccccgggatactattcgtggcgcaactcaaaggacgggtcttggtttattcagagcctgtgcgccatgctgaagcagtatgccgataaattggagttcatgcacatcctcacaagagtgaataggaaagttgccacagagtttgaaagtttctcattcgatgccaccttccacgccaagaagcagattccctgtatcgtttccatgttgactaaggaactgtatttctaccacgacgaggtggacggcggtagtcccatggagaacaccgagaactctgtagattcaaagtccatcaagaatctcgagccaaaaatcattcatggttcagagtcgatggactctggtatcagccttgacaactcatataaaatggactaccccgagatgggcctgtgtataattatcaacaacaaaaatttccacaaaagtaccggcatgacatctcgctccggtactgacgtggacgccgcaaaccttcgggaaacattcagaaacctgaagtacgaggtgaggaataagaatgatctgacgcgagaggagatcgtggaactcatgagagacgtctctaaagaggatcacagtaagaggtcttcttttgtgtgtgtgttgctgagtcatggcgaagaggggataattttcggtacgaatggacccgtagacttgaaaaagatcaccaacttctttaggggcgacaggtgcaggtcgctgaccggaaaacctaagctctttatcatccaggcgtgtaggggcactgaactggattgtggcattgagaccgac

SEQ ID NO: 249690 - DNA, 870 bp, synthetic construct
  misc_feature 1..870: note = Description of Artificial Sequence: Synthetic coding sequence
  source 1..870: mol_type = other DNA
atgatcgaaacggattcaggagtcgacgacgacatggcatgtcacaagatcccggtggaagcggacttcctgtacgcctatagcacggccccggggtactactcctggcggaattccaaggacggatcgtggtttatccaatcgctctgtgcgatgctcaagcagtacgccgataagctcgaattcatgcacatcctgactcgggtgaacagaaaggtggcaactgaatttgagtccttcagcttcgacgctactttccacgccaagaagcagatcccgtgcattgtgtcaatgctcaccaaagagctgtacttctaccacgacgaagtggatggcggaagtccaatggaaaacaccgaaaattccgttgactcgaaaagcatcaagaacttggaacctaaaattatccacggaagcgagagcatggatagtgggatctcgctcgacaactcatacaaaatggactaccccgaaatggggctgtgcatcatcattaacaataagaattttcataagtcgaccggcatgacctcgcgatccggcactgacgtggacgcggccaacctgcgggaaaccttccgcaacctgaaatacgaggtgaggaataagaacgacctcactcgcgaggagattgtggagctgatgcgggatgtgtccaaggaggaccattcaaagcgctccagcttcgtctgcgtcttgctgtctcatggagaggaaggtatcatattcggaaccaatggaccagtcgatcttaaaaagatcaccaactttttccgcggagatagatgcagatcgctgactggcaaacctaagctgttcatcatccaggcttgcaggggaaccgaacttgattgcggtatcgagactgat

SEQ ID NO: 249691 - DNA, 870 bp, synthetic construct
  misc_feature 1..870: note = Description of Artificial Sequence: Synthetic coding sequence
  source 1..870: mol_type = other DNA
atgatcgagaccgattctggcgtcgacgacgatatggcctgccataagattcctgtagaggccgatttcttgtatgcttatagcaccgcacccggctactactcttggcgtaactcaaaggatggctcctggttcatccagtctttgtgcgcaatgctcaagcagtacgcagacaagctcgagtttatgcacattttgactagggtaaaccgtaaagtggcaacagagtttgagagcttcagtttcgacgctacattccatgcaaagaaacagattccttgtatcgtctctatgttgactaaagagctctatttttatcacgacgaagtcgacggcggtagtcccatggagaacactgaaaattccgtcgactccaagtctatcaaaaacttggagcctaagattatccacggtagcgaatccatggatagcggtatctctcttgacaactcctacaagatggactacccagagatgggtctgtgcatcatcataaacaataagaattttcacaaatctaccggcatgacttctcgcagcggtactgatgttgatgctgctaaccttcgcgagactttcaggaacctgaaatacgaagtgcgcaataagaatgatttgactcgtgaagagatcgtcgagcttatgagggatgtttccaaggaagaccactccaagagatctagtttcgtgtgcgtattgttgtctcacggtgaggaaggtatcatttttggaaccaacggaccagtggacctcaagaagatcaccaatttttttcgcggagataggtgtaggagtctgaccggcaagcctaagctgttcatcatccaggcatgccgcggaactgaacttgactgcggcatcgagacagac

SEQ ID NO: 249692 - DNA, 870 bp, synthetic construct
  misc_feature 1..870: note = Description of Artificial Sequence: Synthetic coding sequence
  source 1..870: mol_type = other DNA
atgattgaaactgattcaggagttgacgatgatatggcttgtcataaaattcctgttgaggcagattttctttatgcatattcaacagctcctggatattatagttggagaaattcaaaagatggatcatggtttattcaatcattgtgtgctatgcttaaacaatacgctgataaacttgaatttatgcacatacttacaagagttaatcgtaaagttgctacagaatttgaatctttttcatttgatgcaacatttcatgctaaaaaacaaattccatgtattgttagtatgttaacaaaagaattatacttttatcatgatgaagtagatggaggtagtccaatggaaaatactgaaaattcagtcgatagtaaaagtattaaaaatcttgaaccaaaaattatccatggatcagaatcaatggattcaggaatttctttagataatagttataaaatggattatccagaaatggggctttgtattattataaataataaaaattttcataaatctactggtatgacttctagatcaggaacagatgttgatgccgcaaatttaagagaaacatttagaaatttaaaatatgaagttagaaacaagaacgatttgacaagagaagaaattgtggaattaatgcgtgatgtttctaaagaagaccacagtaaaagaagttcatttgtatgtgtacttcttagtcatggagaagaaggtattatttttggaactaatggtccagttgatttaaagaaaattacaaatttcttcagaggagatagatgcagatcattgactggaaaaccaaaattatttattattcaagcttgtagagggacagaacttgattgcggtatagaaactgac

SEQ ID NO: 249693 - DNA, 870 bp, synthetic construct
  misc_feature 1..870: note = Description of Artificial Sequence: Synthetic coding sequence
  source 1..870: mol_type = other DNA
atgatcgaaacagattcaggtgtggacgacgacatggcctgtcacaagatcccagtggaggcagattttctgtacgcatatagcacagcccccggctattatagttggaggaatagtaaagacggctcatggtttatccagagcctttgcgccatgctgaagcagtacgctgacaagttagaatttatgcatatattgacccgggtgaatcgcaaggtggctaccgagttcgagtccttctcctttgacgctaccttccacgccaaaaagcaaatcccttgcatagtgagtatgctcactaaagaactgtatttctatcacgacgaggtggatggaggatcaccgatggagaacacagagaattctgtcgactctaagagcattaaaaatctcgagcccaaaatcatccacggctctgaaagcatggacagtggaatatccctcgacaattcatacaagatggactaccctgagatgggtctctgcattatcattaataataagaacttccacaagagcacaggcatgactagtaggtctggcactgatgtcgacgcggccaaccttcgcgagactttcaggaatctcaagtacgaggtgaggaacaagaatgatctaactcgtgaagagatcgtggaactgatgcgggatgtttctaaggaggaccattcgaagcggagttctttcgtgtgtgtgctgttaagccacggcgaggaggggatcatctttggcaccaatggcccagtggatctgaagaagatcaccaacttttttaggggagatcggtgtcgcagcctgacaggcaaaccgaaactcttcataatacaagcttgccgcgggacagagcttgattgtggaatcgagacagac

SEQ ID NO: 249694 - DNA, 870 bp, synthetic construct
  misc_feature 1..870: note = Description of Artificial Sequence: Synthetic coding sequence
  source 1..870: mol_type = other DNA
atgatcgagactgattctggcgtggatgacgacatggcctgccacaaaatccccgtggaggcagatttcctgtatgcatactcgactgctccaggatactactcctggcgtaactcgaaggatggatcctggtttatccaatcgctgtgtgcaatgctcaagcagtacgcagacaaactcgaattcatgcacatcctcactcgcgtgaatcggaaggtcgccaccgaattcgaatctttctccttcgatgctactttccacgccaagaagcagattccgtgcatcgtgagtatgctcaccaaagagctgtacttttaccatgatgaggtggatggcggatccccaatggaaaacaccgagaattccgtggactccaagtcgatcaagaatctggagccgaagataatccacggaagcgaatcgatggactccggaatttcgctggacaacagctacaaaatggactaccctgagatgggactttgcattatcatcaataacaagaacttccacaaatcaacggggatgacctctcgctcgggaaccgatgtggacgctgcgaatctcagggaaactttcagaaacctgaagtatgaggtccggaataagaacgacctcacccgtgaagaaatagtggaactgatgcgggacgtgtccaaggaggatcattcaaaacggtcatcgtttgtttgcgtccttctgtcccatggcgaggagggtatcatttttgggaccaatggtccagtcgacctgaagaagatcaccaacttctttcgaggcgacaggtgtcgcagccttactggcaagccgaaattgttcatcatccaggcatgccgcggtaccgaactggattgcggtatcgaaactgat

SEQ ID NO: 249695 - DNA, 855 bp, synthetic construct
  misc_feature 1..855: note = Description of Artificial Sequence: Synthetic coding sequence
  source 1..855: mol_type = other DNA
atgatcgagaccgacagtggggtcgatgacgatatggcttgccacaaaatccctgtggaagccgactttctttacgcttatagtaccgccccaggatattatagctggcgcaacagtaaggacggatcatggttcatacaaagtctttgcgccatgttgaaacagtatgctgacaagctggaattcatgcacatcctcactcgggtgaaccggaaagtggcaaccgaattcgaaagtttttcttttgatgcgacttttcacgctaagaagcagatcccctgcatcgtgagcatgttgactaaagagctgtacttctatcacggatccccaatggaaaataccgaaaactccgtggccagtaagtccattaagaacctggaacctaagatcattcatggctcggagtctatggcctccggtattagcctggacaactcgtataaaatggattaccccgagatggggctctgcattatcatcaataacaaaaatttccataagtccacgggcatgaccagccgcagtggcaccgacgtcgatgccgctaacctgagggagacatttcgcaacctcaagtatgaggtaaggaataagaacgatctgacgcgggaggagatcgtggaattaatgagagatgtttcaaaagaggatcatagtaaacgatctagtttcgtgtgcgtactgctcagccacggcgaggagggaatcattttcggcaccaatgggcctgtggatctgaaaaaaatcaccaattttttccgaggtgaccgttgtcggtccctcaccggcaaaccgaaactcttcatcattcaagcttgccgcggcacagagttggattgtggaatcgagaccgat

SEQ ID NO: 249696 - DNA, 855 bp, synthetic construct
  misc_feature 1..855: note = Description of Artificial Sequence: Synthetic coding sequence
  source 1..855: mol_type = other DNA
atgattgagaccgattccggtgttgatgacgacatggcctgccataagatccccgtcgaagcagatttcctttacgcctatagcaccgcccccggttactactcctggcggaactcaaaggacggaagttggttcattcagtcactgtgcgcaatgttgaagcaatacgccgataaactcgagttcatgcacattttaactcgtgttaaccggaaggtcgcaaccgaattcgagagtttctccttcgacgccaccttccacgcaaaaaaacagattccttgcatcgtttcgatgctgaccaaggagctgtacttctaccatggatcccccatggaaaacactgaaaattccgtggcatctaaaagcattaaaaatctcgagcctaagatcatacatggaagtgagtccatggcaagtggcatctccctcgacaacagctataaaatggattacccggaaatggggctgtgcattatcattaataacaagaattttcacaaatcaacaggcatgaccagcaggtctggaactgacgttgacgctgccaatcttcgtgaaacattccggaatctcaaatacgaagtcagaaataaaaacgacttaactagagaggaaatcgtcgagctgatgcgtgacgtgtccaaggaggatcacagtaaacgttcctctttcgtgtgtgtgttattgtcacacggagaggagggtattatttttggcaccaacgggccagtggacttgaagaaaattacgaatttcttcaggggtgaccggtgtcggtctctgactggcaaacctaaattgttcatcatacaagcatgcagaggcaccgagctagattgtggcatcgaaactgac

SEQ ID NO: 249697 - DNA, 855 bp, synthetic construct
  misc_feature 1..855: note = Description of Artificial Sequence: Synthetic coding sequence
  source 1..855: mol_type = other DNA
atgatagaaacggattcgggtgtagatgatgatatggcgtgtcataaaataccggtagaagcggattttttatatgcgtattcgacggcgccgggttattattcgtggcgtaattcgaaagatggttcgtggtttatacaatcgctatgtgcgatgttaaaacaatatgcggataaattagaatttatgcatatattaacgcgtgttaatcgaaaagtagcgacggaatttgaatcgttttcgtttgatgcgacgtttcatgcgaaaaaacaaataccgtgtatagtttcgatgctaacgaaagaactatatttttatcatggttcgccgatggaaaatacggaaaattcggtagcgtcgaaatcgataaaaaatttagaaccgaaaataatacatggttcggaatcgatggcgtcgggtatatcgttagataattcgtataaaatggattatccggaaatgggtctatgtataataataaataataaaaattttcataaatcgacgggtatgacgtcgcgatcgggtacggatgtagatgcggcgaatctacgagaaacgtttcgaaatttaaaatatgaagttcgtaataaaaatgatctaacgcgagaagaaatagttgaactaatgcgtgatgtatcgaaagaagatcattcgaaacgatcgtcgtttgtttgtgtactactatcgcatggtgaagaaggtataatatttggtacgaatggtccggttgatttaaaaaaaataacgaatttttttcgtggtgatcgttgtcgttcgttaacgggtaaaccgaaattatttataatacaagcgtgtcgaggtacggaattagattgtggtatagaaacggat

SEQ ID NO: 249698 - DNA, 855 bp, synthetic construct
  misc_feature 1..855: note = Description of Artificial Sequence: Synthetic coding sequence
  source 1..855: mol_type = other DNA
atgattgagacggatagcggggtggatgatgatatggcttgccataagattcccgtggaagcagattttctctacgcatacagcactgctcccggatactactcatggcgaaacagcaaagacggatcgtggttcattcagtccctttgcgccatgctgaaacaatacgcagataagctggaattcatgcatattctgacccgcgtgaaccggaaggtggcaaccgagttcgagagcttctcgtttgacgccacgtttcatgcaaaaaagcaaatcccatgtattgtgtccatgctcaccaaggaactgtacttttaccacggttcccctatggagaatactgagaatagcgtcgccagtaagtccattaagaatctggaacctaagataatccatggctcggaatcaatggcatccggaatttcacttgataattcgtacaaaatggattaccctgaaatgggactgtgtataatcatcaataacaagaactttcataaatcgaccggcatgacctcccggagcggtaccgatgtggatgcagcaaacttgcgcgaaacctttcggaatctcaagtacgaagtgaggaataagaacgatctcactcgggaggagatcgtggaactcatgagggatgtctcaaaggaggaccattccaagcggtcgagctttgtttgcgtgcttctgtcacacggggaggaaggaattatcttcggcactaacggacctgtcgatctgaagaaaatcactaatttctttcggggagatcgttgtagatcgctcaccggaaagccaaaattgtttatcatccaggcatgtcgcggaaccgagcttgattgtggtatcgaaaccgat

SEQ ID NO: 249699 - DNA, 855 bp, synthetic construct
  misc_feature 1..855: note = Description of Artificial Sequence: Synthetic coding sequence
  source 1..855: mol_type = other DNA
atgattgagactgactcaggagtcgacgatgacatggcttgccataagattccagtggaagcagacttcttgtacgcgtactctaccgcgcctggatactactcatggcggaattcgaaggacgggtcttggttcatccagagcctgtgtgctatgctcaaacaatacgccgacaagctggaattcatgcatatcttgactagagtcaaccgcaaggtggccaccgaatttgagtcgttctcattcgatgcgaccttccacgccaagaagcaaatcccttgcatcgtgtcaatgttgaccaaggaactctacttctaccacgggtcgccaatggagaatactgaaaattcggttgcctcgaagagcatcaagaatctggagccgaaaatcatccatggatcagaaagcatggcgtcaggcatttcactggataactcatacaaaatggactatccggaaatgggactgtgcatcatcatcaacaacaaaaacttccacaagtccacggggatgactagccgatccggaactgacgtggacgccgctaatctccgcgaaacgttcaggaatctcaaatacgaggtccgtaacaagaacgacctgaccagggaagaaatcgtggaactgatgcgggatgtctcgaaggaagatcactccaagaggtcgtcttttgtatgcgttctgctgtcccacggtgaagaggggatcatttttggcaccaacggaccggtggatttgaagaagatcactaacttttttcgaggtgaccggtgccggtcccttaccggcaaaccgaagctgtttatcatccaggcgtgccggggtaccgagctggattgcggaatcgaaaccgat

SEQ ID NO: 249700 - DNA, 855 bp, synthetic construct
  misc_feature 1..855: note = Description of Artificial Sequence: Synthetic coding sequence
  source 1..855: mol_type = other DNA
atgatcgaaaccgactcaggcgttgatgatgacatggcctgtcacaaaatccctgtggaggcagacttcctctacgcctacagcactgcgccgggatactactcgtggcggaattcaaaagacgggagctggttcatccagtccctgtgtgcaatgctcaagcaatacgccgataaactggagttcatgcacatcctgaccagagtcaaccgtaaggtggctaccgaatttgagagcttctccttcgatgccaccttccacgccaagaaacagatcccttgcatcgtctcgatgctgactaaagagctctacttctaccacggatccccaatggaaaataccgaaaattcagtggccagcaaatccatcaaaaacctggagcccaagatcattcacggatcagagtccatggcatcaggcatctcgctggacaactcgtacaaaatggactaccctgaaatgggcctgtgtatcatcataaacaataagaacttccataagtctacgggaatgacgtcgaggtccggaactgatgtggatgcggctaacctcagggaaacctttcggaatctgaagtatgaagtgcgcaacaaaaacgacctgacccgcgaggaaatcgtggagctgatgcgcgacgtgtctaaggaggaccattccaagcgatcgtcgtttgtctgcgtcctcctctcacacggagaagaagggatcatcttcgggactaatgggccagtcgatttgaagaagattactaacttttttcgcggggaccgctgccgctcccttacgggaaagccgaaattgttcataatccaagcctgtagaggcacggagcttgattgtggtattgaaaccgac

SEQ ID NO: 249701 - DNA, 855 bp, synthetic construct
  misc_feature 1..855: note = Description of Artificial Sequence: Synthetic coding sequence
  source 1..855: mol_type = other DNA
atgattgagactgacagtggcgtggacgacgatatggcttgtcataagattccggtagaagccgactttctgtacgcctatagcacagcccccggctattacagttggagaaattccaaggacggatcatggttcatccagtctctgtgtgccatgttgaaacaatatgccgacaagctcgaattcatgcatatcctcactagggtgaaccgtaaggtggcaacagaatttgagtcatttagctttgacgccacgttccacgctaaaaagcaaataccctgtatcgttagtatgctgacaaaagaactctacttctaccacggctccccaatggagaatacagagaattcagtggcgtctaagagtataaagaatctggaaccgaagatcattcatggatccgagtccatggcgtccggcatcagtctggataacagttataaaatggactacccagaaatgggactgtgcatcatcataaataacaagaacttccacaaatccaccggtatgacttcacgcagcggcacggacgtggacgcagccaatttgcgagagacgtttaggaacttaaaatacgaggttagaaataaaaacgatctgacaagagaggagattgtggaactaatgcgagacgtctccaaagaggaccacagcaaaagaagttcctttgtttgtgtgctactctctcacggggaggaaggcataatcttcggcacaaacgggcctgtggatctgaaaaaaatcacaaacttttttcgtggggaccgatgccggtccctcacaggcaaaccaaagctattcataatccaggcttgccggggcaccgagctagactgtggcatcgagacggat

SEQ ID NO: 249702 - DNA, 855 bp, synthetic construct
  misc_feature 1..855: note = Description of Artificial Sequence: Synthetic coding sequence
  source 1..855: mol_type = other DNA
atgatcgaaactgacagcggtgttgatgacgacatggcatgtcacaaaatccctgtcgaagctgactttctgtacgcttacagcacagctccaggatactactcatggaggaactctaaggacggcagttggtttatccagtcattgtgtgcgatgctcaaacagtacgctgacaagctggaatttatgcatatccttactagagttaacaggaaggttgccaccgagttcgagtctttcagtttcgacgctacctttcacgctaaaaaacaaatcccctgtatagtctctatgctcacgaaagaactttacttttaccacggtagtccgatggagaacacagagaattccgttgcctctaagagtatcaagaatctggaaccaaagatcatacacggctccgaatccatggcctccggtatttccttggacaatagctacaagatggactaccccgagatgggtctctgcataatcataaataacaagaatttccacaagtcaacaggaatgactagccgctcaggaacagatgtggacgctgcgaatctgagagagacttttcgcaacttgaagtatgaagttaggaacaagaacgatcttacccgcgaagaaattgtcgagctgatgagagacgtgtcaaaagaagatcactctaagagatcaagttttgtgtgtgtgcttttgtcccacggagaggagggcattatcttcggtaccaacggccctgttgatttgaagaaaatcactaacttctttcgcggagatcgctgcaggagtctgacgggaaagccaaagctctttatcatccaggcctgtaggggtaccgagctggattgtggtatcgagacagat

SEQ ID NO: 249703 - DNA, 855 bp, synthetic construct
  misc_feature 1..855: note = Description of Artificial Sequence: Synthetic coding sequence
  source 1..855: mol_type = other DNA
atgatcgagacagattcaggcgttgatgacgatatggcttgtcacaagattcctgtggaggcggacttcctatacgcttactcaaccgccccaggatattacagctggaggaactcgaaggatgggtcgtggttcattcagagcctgtgtgctatgcttaagcaatatgctgataagctcgagttcatgcatatactcacaagggtgaatcgaaaggtagccaccgagtttgagagcttcagcttcgacgctactttccacgcgaagaaacagataccttgcatcgtttcaatgctgacaaaagagctgtatttctatcatgggtcacctatggagaataccgaaaattctgtcgcttccaaatccataaaaaatttagagcccaagatcatacacggctccgagagtatggcctcaggaatatctctggataactcatacaaaatggactatccagagatgggactgtgtattatcataaacaataaaaattttcacaagagtacaggcatgacttcgcggtctgggaccgatgtcgacgccgctaacctgcgggaaacgtttaggaacttgaaatacgaagtcagaaacaagaacgatcttacgcgggaagagatcgtcgagctaatgagggatgtctcgaaggaggaccactccaagcgctcttcctttgtctgtgttctgctgagccacggagaggagggaattattttcggtacgaacggaccggtcgatttaaagaaaattactaatttcttccggggagatcgctgtcgctcgttaaccggaaagcccaaactattcattatccaggcatgcagaggtaccgagctggactgtggcatcgagaccgat

SEQ ID NO: 249704 - DNA, 855 bp, synthetic construct
  misc_feature 1..855: note = Description of Artificial Sequence: Synthetic coding sequence
  source 1..855: mol_type = other DNA
atgatcgaaaccgactcgggagtggatgatgatatggcctgccataagatacccgtggaagcagatttcttgtacgcatactcaactgcgcccggatattacagctggagaaacagcaaggacggatcgtggtttatccaatctctctgcgctatgttgaaacagtacgcagacaagctcgagttcatgcacattcttacgagagtcaatagaaaagtcgctactgaattcgagtccttttcgttcgatgcaaccttccatgcaaagaagcagattccttgtattgtgtccatgcttaccaaggaactttacttctaccatggatccccgatggagaacactgaaaattcggtggcgagcaagtccattaagaatctggagcctaagataatccacggtagcgagagcatggcatcaggaatttcgctggataattcgtacaagatggactacccagaaatgggtctttgtatcatcattaacaacaagaactttcataaatcaaccggaatgaccagccggtctggaacggacgttgatgccgctaacctgcgggaaaccttcagaaacctgaaatacgaggtgcggaacaagaacgacctgactcgagaggaaatcgtcgagctgatgagggatgtgtcgaaggaagatcactcgaagagatcctcgtttgtgtgtgtcctgcttagccatggagaggagggcatcatttttggaaccaacggaccagtcgatctgaagaagattactaacttttttcgtggtgacagatgtcgctcgctgaccggaaagccgaaacttttcattatccaagcatgccgcgggactgaactggactgtggcatagaaactgac

SEQ ID NO: 249705 - DNA, 855 bp, synthetic construct
  misc_feature 1..855: note = Description of Artificial Sequence: Synthetic coding sequence
  source 1..855: mol_type = other DNA
atgatagagacagactctggcgttgatgacgacatggcgtgtcacaagatccccgtggaggccgacttcctatacgcctattctactgctcctggctactacagttggcggaattcaaaggacggatcatggtttatccagtctctgtgtgccatgctcaagcaatatgcagataaactggaatttatgcacatccttacacgcgtgaataggaaggtcgcaactgaatttgagagcttttctttcgatgctacatttcatgcgaaaaagcagattccctgcattgtgtccatgcttaccaaagaactttacttctatcacgggagtcccatggagaatactgagaatagcgtggcatccaaatcaattaagaatctggaaccaaagattattcatgggtccgagtctatggcatcgggtatcagtctggataatagttacaagatggactacccagaaatggggctgtgtataattattaacaacaagaacttccacaagagtactggaatgactagccggtccgggaccgatgtagacgctgctaatctgcgcgagaccttccgcaaccttaaatacgaagtacggaataaaaacgacctgacgcgggaggaaatcgtagagctaatgcgggacgtctcgaaagaggaccactctaagaggagcagttttgtatgtgtgcttctgagccacggggaagagggcataatctttgggaccaatggccccgtggatctcaaaaagattacaaacttctttcgcggcgatcgatgtcgcagcctcacgggaaagcctaagctgttcatcattcaggcctgtagaggaacagaattggattgcgggatagaaaccgat

SEQ ID NO: 249706 - DNA, 855 bp, synthetic construct
  misc_feature 1..855: note = Description of Artificial Sequence: Synthetic coding sequence
  source 1..855: mol_type = other DNA
atgatcgagactgactcaggtgtggacgacgacatggcatgccataagataccagtggaggccgatttcttgtacgcatattctacagctcccggatattattcttggcgcaactccaaggatggctcatggttcatccaaagtctgtgtgccatgctcaagcagtatgccgataagctggaattcatgcatatcctgacaagagtgaacagaaaggtggccacagagttcgaatccttttcctttgacgctacctttcatgccaagaaacagatcccttgcatcgtctccatgctgaccaaagagctttatttttaccacggttcccctatggaaaacaccgaaaacagtgtggcttctaaaagcatcaagaacctggagcccaagatcatccacggctctgagagcatggcctccggcatatctttggataactcatacaaaatggactatcccgaaatgggtctctgcattatcatcaataacaagaacttccataaaagtactggaatgacctctagatccggtaccgatgttgatgcagctaacctgcgcgagacatttaggaacctgaagtatgaggtgcgtaataagaacgacctcacacgtgaagaaattgtcgagctgatgcgcgatgtctccaaggaagatcattctaaaaggtcctcctttgtttgcgtccttctgtcccacggtgaggagggtataatcttcggcaccaatggtccagtggacctgaagaagattaccaacttcttccgtggagatcgctgccgctcccttacaggtaaacctaagctgttcatcatccaggcctgtcgtggaacagagctggactgcggtatcgaaaccgat

SEQ ID NO: 249707 - DNA, 855 bp, synthetic construct
  misc_feature 1..855: note = Description of Artificial Sequence: Synthetic coding sequence
  source 1..855: mol_type = other DNA
atgatagaaacagactccggtgttgacgacgatatggcctgccacaaaattcccgtagaggccgatttcctctatgcgtactccacagctccgggctattactcctggcgcaattcaaaggacgggtcttggttcattcagtccctatgtgcaatgctcaagcaatacgctgataaacttgagttcatgcatatattaacccgggtgaaccgcaaagtagcaacagaattcgagtccttttcatttgacgctactttccacgccaaaaaacagatcccttgcatagtcagtatgctgacaaaagaactctatttctatcacgggtctcctatggaaaatactgagaattccgtcgcttcaaagtctattaagaaccttgagcctaagattattcacggatctgaaagtatggctagcggcatcagccttgataactcatataaaatggactatccagagatggggctgtgtataattattaacaataaaaactttcacaagtcaaccggaatgaccagccggtccggcaccgacgtcgacgccgccaatcttagggagacatttcgcaacttgaaatatgaggttagaaacaagaacgatttgacccgcgaagagatcgtggagctgatgcgggatgtgtcaaaggaggaccattccaagcggagtagcttcgtatgtgtgcttctatcccacggagaagagggcatcattttcggtaccaacgggccagtagacctaaagaagatcaccaatttcttccggggagatcggtgcagaagtttgaccgggaagccaaaactgttcatcattcaggcgtgccgcggaaccgaactcgattgtggcatagagactgat

SEQ ID NO: 249708 - DNA, 855 bp, synthetic construct
  misc_feature 1..855: note = Description of Artificial Sequence: Synthetic coding sequence
  source 1..855: mol_type = other DNA
atgatcgagactgactccggcgtggatgatgatatggcctgccataagatcccggtcgaagcagattttctttacgcctactcgaccgcccccggctactactcctggcggaatagtaaggacggcagctggtttatccaaagcctgtgcgcaatgctcaagcagtacgcggacaaactcgaattcatgcatatcctgactcgtgtgaaccgaaaagtggcaaccgagtttgagtcctttagctttgatgcgacctttcacgcgaaaaagcaaatcccctgtattgtctcgatgctgactaaggagctgtacttttaccatggttcacctatggaaaataccgaaaattcagtggcttcgaagagcataaagaatcttgaacccaagataattcatggttcggagtcgatggcctcggggatctcgctcgataactcctacaagatggactaccctgaaatgggattgtgtattatcatcaacaataagaactttcataagagcactggaatgacgagccgctccggtactgatgtcgacgccgcaaacctgagagaaacctttcgcaacctgaagtacgaggtccgaaataagaacgatctcaccagggaagagattgtggagttgatgcgggacgtcagcaaggaggatcattccaagagaagctcctttgtatgtgtcctgctttctcacggagaagaaggtataatctttggaaccaatggaccagtggatctgaagaagattacgaacttctttagaggtgaccggtgccggtcactcaccggcaagcccaaactgttcattatccaggcttgccgcggaaccgaactcgattgtggaattgaaaccgat

SEQ ID NO: 249709 - DNA, 855 bp, synthetic construct
  misc_feature 1..855: note = Description of Artificial Sequence: Synthetic coding sequence
  source 1..855: mol_type = other DNA
atgattgaaacagattctggtgttgatgatgatatggcatgtcataaaattccagttgaagctgatttcttatatgcatactcaacagccccaggttattattcatggagaaattcaaaagacggttcttggtttattcaaagtttatgtgctatgcttaagcaatatgcagataaacttgaatttatgcatatattaactcgtgttaatcgaaaagtcgctactgaatttgagtcattttctttcgatgcaacattccatgctaaaaaacaaattccatgtatagtatcaatgcttacaaaagaattgtatttctatcatggatcgccaatggaaaatacagaaaattcagtggcaagtaaaagtataaaaaaccttgaaccaaaaattattcatggaagtgaatctatggcttcaggtattagtcttgataactcatataaaatggattatccagaaatgggtttatgtattataattaacaataagaattttcataaatcaactggtatgactagtagatcaggaactgatgttgatgctgcaaatctaagagagactttcagaaatttaaaatatgaagttagaaacaaaaacgatttaacaagagaagaaattgttgaattaatgagagacgtttcaaaagaagatcattcaaaacgttcatcatttgtttgtgtccttttatctcatggtgaagaaggaattatttttggaacgaatggaccagttgatcttaaaaaaattactaatttctttagaggagatagatgtagaagtttaacaggaaaaccaaaactcttcataattcaagcatgtagaggaacagaattagactgtggaattgaaacagat

SEQ ID NO: 249710 - DNA, 855 bp, synthetic construct
  misc_feature 1..855: note = Description of Artificial Sequence: Synthetic coding sequence
  source 1..855: mol_type = other DNA
atgattgaaaccgatagcggcgtggatgacgatatggcctgccataagattcctgtggaagccgattttctctacgcctactcgacggcgcccggatactactcgtggagaaattccaaggacggctcctggtttatccaatcactttgcgcaatgttgaaacaatacgcagataagctcgaattcatgcacattttgacccgggtgaataggaaggtggcaaccgaattcgaatctttttcttttgatgcaactttccatgccaagaagcagatcccatgtatcgtctccatgctcacgaaagagctctacttctaccacggatcgcccatggaaaacaccgagaatagtgtggcgtcgaaatccatcaagaaccttgaaccaaagattattcatggaagcgagtccatggcgtcgggcatttctctcgataactcatacaaaatggattaccctgagatgggactgtgtatcatcataaacaacaaaaacttccataagagcaccggaatgacttcgcgctccgggacggacgtcgatgccgcaaatcttcgagaaacttttcgcaaccttaagtacgaagtcaggaacaaaaacgatctcactagggaagagattgtggaactcatgagagacgtctcgaaggaagatcattcgaaacgttcatcgtttgtctgcgtgcttctgtcacatggtgaagagggtataatctttggcactaacggaccggtcgatctgaagaagattactaacttttttcgtggggatcggtgtcgcagccttactggtaaaccaaagctcttcatcatacaggcatgtcgtggtactgaactggattgtggtattgagactgac

SEQ ID NO: 249711 - DNA, 855 bp, synthetic construct
  misc_feature 1..855: note = Description of Artificial Sequence: Synthetic coding sequence
  source 1..855: mol_type = other DNA
atgatcgagaccgatagcggtgtggacgacgacatggcatgccataagatccctgttgaggcagatttcttgtatgcctattccaccgctcccggctactactcatggcgaaatagtaaggacggatcttggttcatccagtccctgtgtgccatgttaaagcagtacgccgataaactcgaattcatgcatatcctcactagggtgaatcgtaaagtggcaactgagtttgaatccttttctttcgatgctacatttcacgctaagaaacagatcccgtgcatcgtttccatgctgacaaaggaactttacttctaccacgggtcacccatggaaaatactgagaattctgtggctagtaaatctatcaagaacttagaaccaaagatcatacacggctccgagtcaatggcctccggcatcagtctcgataatagctataaaatggactatcccgagatgggactgtgcataattatcaacaataagaactttcataaatccacaggcatgacatctcgatccggaacagacgtggatgcggctaatctgcgagaaaccttcagaaaccttaagtacgaggtgagaaacaaaaacgacctgactcgcgaggaaattgtcgaacttatgagggatgtcagcaaggaggaccatagtaagcgctcttcgttcgtatgcgtcctattgagtcatggcgaggagggaattattttcgggaccaacggcccggttgacctgaagaagattaccaacttctttaggggagacagatgtcggtctttgaccggtaaaccaaagctattcattattcaagcctgcagagggactgagctcgactgcggcattgagactgat

SEQ ID NO: 249712 - DNA, 855 bp, synthetic construct
  misc_feature 1..855: note = Description of Artificial Sequence: Synthetic coding sequence
  source 1..855: mol_type = other DNA
atgatcgaaaccgacagcggcgttgacgatgacatggcctgccacaaaatcccggtggaggcagacttcctgtacgcgtactctacggccccggggtactactcatggagaaactccaaggatgggtcatggttcatccaatctctgtgcgccatgctcaaacagtacgcggataagctggagttcatgcatatcctgactagggtgaaccggaaggtcgccaccgagttcgagtcattctcatttgatgcaacttttcacgccaaaaaacaaatcccgtgcattgtctcgatgctcacgaaggagttgtacttctaccacggatcaccgatggaaaatactgaaaattccgtggcgagcaaaagcatcaagaatctggagccaaagatcattcatgggtccgagtccatggcgtcgggaatatcgttggacaattcatacaagatggattatcccgaaatgggcctgtgcatcatcatcaataacaaaaactttcacaagtcaacggggatgacctcgcgcagcgggactgacgtggatgccgcaaacctgcgcgaaacttttaggaacctgaagtacgaagtccggaataagaacgacctcactcgggaggaaatcgtggaactgatgagggacgtgtcaaaggaggaccactctaaacggtcatccttcgtctgcgtcctcctgtcccatggggaagaaggcatcatcttcggaactaacgggcccgtggatcttaagaagattactaacttcttccgcggcgatcgctgtcggtcgttgacgggcaagccgaaactgttcattatccaggcttgtcgcggaactgagctggactgcggaatcgaaactgac

SEQ ID NO: 249713 - DNA, 855 bp, synthetic construct
  misc_feature 1..855: note = Description of Artificial Sequence: Synthetic coding sequence
  source 1..855: mol_type = other DNA
atgattgaaaccgattcgggagtcgatgatgatatggcgtgtcataagattcctgtcgaagcggatttcctgtacgcatactcaaccgcgccaggctactactcttggagaaattcaaaggatggatcctggtttatccaaagtctgtgcgcaatgttgaagcagtacgcagataaactggagtttatgcacatccttactcgagtcaatcgaaaagtcgcgaccgaatttgaatcgttctcctttgatgcaacttttcatgctaagaagcagatcccatgtatagtgtcgatgcttaccaaggaactttacttttaccatgggtcaccgatggaaaatactgaaaactcggtggcctccaagtcgataaagaaccttgaaccaaagattatccacggatcagaatctatggcatcgggaattagccttgataattcgtacaagatggactaccctgagatgggactctgcatcattatcaacaacaagaattttcacaaaagcacgggaatgacctcaaggtcgggtaccgacgttgatgcggcaaatcttagagaaacttttcggaacctgaaatacgaagtgcggaacaagaacgatctcacccgcgaagaaattgtggagcttatgcgcgatgtctccaaggaagatcattctaaacggagcagctttgtgtgtgtgctgctttcgcacggtgaagaagggattatctttggcactaacggtccagtggatctgaagaaaatcactaacttttttcgaggtgacagatgccgtagcctgactgggaagcctaaactctttatcatacaagcatgcagaggtaccgaacttgactgtggaattgagactgat

SEQ ID NO: 249714 - DNA, 855 bp, synthetic construct
  misc_feature 1..855: note = Description of Artificial Sequence: Synthetic coding sequence
  source 1..855: mol_type = other DNA
atgatcgagaccgattccggcgttgacgatgacatggcctgccacaagatccccgtggaggctgacttcctttatgcttactctaccgcacccggctactattcttggaggaactccaaggacggctcatggttcatccagagcctttgtgctatgttgaagcagtatgccgacaaactcgagttcatgcacatcctgaccagagtgaatcggaaggtcgctaccgagttcgagtctttttcttttgatgccaccttccacgcaaagaagcagatcccatgcatcgtgagtatgcttaccaaagaactgtatttttatcacggcagtcctatggaaaacactgagaactctgtcgccagcaagagcattaagaacctggaacccaagatcattcatgggtcagagagcatggcctctgggatctcccttgacaactcttataagatggattaccccgagatggggctgtgtatcattattaacaataaaaacttccacaagagcacaggcatgactagccggagtgggaccgatgtggacgctgcgaatttgcgagaaactttcaggaaccttaagtacgaggtgcgaaacaagaatgatttgactcgcgaggagatcgtagagttgatgcgggacgtttcaaaagaggaccactccaaacgctccagtttcgtatgtgtcctcttgagccacggagaggaaggcatcatattcgggactaatggccctgtcgacctgaaaaagatcactaacttctttagaggcgaccgctgtagatccctgactgggaaacccaagctgttcatcattcaggcatgtcggggaacagagctcgactgtggcattgagacagat

SEQ ID NO: 249715 - DNA, 855 bp, synthetic construct
  misc_feature 1..855: note = Description of Artificial Sequence: Synthetic coding sequence
  source 1..855: mol_type = other DNA
atgatcgagactgacagcggtgtcgacgacgacatggcgtgccacaagatcccggtcgaggcagatttcctgtacgcgtactccacggcgccagggtactactcctggcgcaattccaaggacggttcctggtttatccagtcgctgtgcgctatgctgaagcagtacgctgataaactcgagttcatgcacatcctcactcgggtcaatcggaaggtcgccaccgagttcgagtcgttcagcttcgatgcaacctttcacgcaaagaaacaaatcccgtgcatcgtcagcatgttgacgaaagaattgtatttctaccacggatcgccaatggaaaatactgaaaattctgtggccagcaagtccatcaaaaacctggaaccaaagatcatacatggatcagagtcgatggcctccggaatttcactggacaacagctacaaaatggattacccggagatgggactgtgcattatcatcaacaacaagaactttcataagtccactgggatgacctcgaggagcggaacggacgtcgatgctgctaacctgcgcgaaaccttccggaacttgaagtatgaagtgcggaacaaaaacgacctcaccagagaggaaatcgtggagctgatgagggacgtcagcaaagaagatcactccaagcggtcctccttcgtgtgtgtgctgttgagccacggagaggaaggcatcatcttcggcaccaatggaccagtggatctgaagaagattaccaactttttcagaggcgaccgctgcagatcgctcactggcaagccaaagctctttatcatccaagcgtgtcgcggcactgaactggactgcggaatcgaaaccgac

SEQ ID NO: 249716 - DNA, 855 bp, synthetic construct
  misc_feature 1..855: note = Description of Artificial Sequence: Synthetic coding sequence
  source 1..855: mol_type = other DNA
atgatagaaaccgattcgggggtggatgacgatatggcatgtcataagattccagtggaagctgactttctttatgcatacagcactgcacctggatactactcctggcggaacagcaaggatggatcctggtttatccaatccctgtgcgcaatgcttaaacagtacgcggataagctggaattcatgcatattctgacgagagtcaataggaaggtcgcaaccgagtttgaatccttttcattcgacgccacgttccatgcaaaaaagcaaatcccctgtattgtgtcaatgcttactaaggaactgtacttttaccacggatcgccaatggagaacaccgaaaattcggtggccagcaaatccattaagaacttggaaccaaagataattcatggcagcgagtccatggcatcggggattagcctggataattcgtacaaaatggactacccagagatgggtctttgtatcataatcaataacaagaatttccacaagagcaccggaatgacgtctcggtccggcaccgacgtagacgctgcaaatctcagagaaacctttcggaacctcaaatacgaagtgagaaacaaaaatgatttgacccgggaggaaatcgtggaacttatgcgggatgtgtcgaaagaagatcactccaagaggtcatcattcgtgtgtgttctgctttcgcatggagaggaaggtatcattttcggtaccaacggtccagtcgatctgaagaagatcaccaactttttccggggtgatcgttgccggtcgcttaccggcaaacccaagctgtttatcatccaggcctgtcgaggtaccgaattggactgtggcatcgagactgat

SEQ ID NO: 249717 - DNA, 855 bp, synthetic construct
  misc_feature 1..855: note = Description of Artificial Sequence: Synthetic coding sequence
  source 1..855: mol_type = other DNA
atgatagaaactgactccggagttgatgacgatatggcttgtcataagatacctgtggaagctgatttcctttatgcctattctacagctcctgggtactattcctggcggaacagtaaggatgggagttggtttatccagtccctgtgtgccatgctgaaacagtatgcagataagctcgaattcatgcacatcctaacacgcgttaacaggaaagtagctactgagttcgaaagtttctccttcgatgctacttttcacgccaaaaaacagatcccatgtatcgtctcaatgttaactaaagaactgtatttctatcacgggtctccaatggagaacacagaaaattccgttgctagtaaaagtatcaagaatctagaacctaaaataatccacggatcggaatctatggcttcagggatctccctcgataactcttacaaaatggattacccagaaatgggattgtgcatcatcatcaacaataaaaacttccacaaatctacaggaatgacaagtcggagtgggactgacgtcgatgcagcaaatcttcgggagacattccgaaatttgaagtatgaagtgcgcaacaaaaacgatctcacacgcgaggaaatagtcgaactaatgagagacgtctctaaagaggatcactctaaaaggtcttcttttgtgtgcgtgctactatcacacggggaagaggggataatctttgggactaacgggcccgtagacctaaaaaaaatcactaatttctttagaggggatagatgtcggtccctaacagggaaaccaaaattatttataatacaggcctgtagggggacagaactagactgtggaatcgaaactgac

SEQ ID NO: 249718 - DNA, 855 bp, synthetic construct
  misc_feature 1..855: note = Description of Artificial Sequence: Synthetic coding sequence
  source 1..855: mol_type = other DNA
atgatcgaaacggactccggtgtggatgacgacatggcctgtcataagattccagttgaggccgactttctgtacgcctactctaccgccccgggttactattcatggcggaattccaaggacggatcttggttcatccagagcctctgcgccatgctgaagcagtatgctgataagctcgaattcatgcacatattgactagggtgaacagaaaagtggcaacagaattcgagagctttagtttcgacgccacatttcatgctaaaaagcagatcccctgcattgtgtccatgctgacaaaggaactctatttttatcatggttcacccatggaaaacacggaaaatagcgtagcgagcaaatctattaagaaccttgagcctaagatcatccatggctcagagagtatggccagcggaataagcttggataactcctataagatggattatccagaaatgggcctgtgtataatcattaataataaaaacttccacaagagtactggaatgacctcacgctctgggacggatgtggatgccgccaatcttcgggagactttccggaaccttaaatacgaggtgcgaaacaaaaatgacctgactcgcgaggagattgtcgaactgatgcgcgacgtttccaaagaggaccactccaagcggtccagtttcgtgtgcgtgcttcttagtcatggggaagagggtatcatattcggaaccaatgggccggtggatctcaaaaaaatcaccaacttcttccgaggcgacaggtgtcgcagtcttactgggaagcctaaactttttatcattcaggcgtgcaggggcacagaactcgactgtggcattgaaactgat

SEQ ID NO: 249719 - DNA, 855 bp, synthetic construct
  misc_feature 1..855: note = Description of Artificial Sequence: Synthetic coding sequence
  source 1..855: mol_type = other DNA
atgatcgagacagactctggggtcgatgatgatatggcttgtcacaaaattcctgtagaagccgacttcctttatgcttatagtaccgcccctggctattatagttggcgcaacagcaaagacggcagctggtttatccagtcactgtgcgccatgctgaagcagtatgctgataaacttgaatttatgcacattcttactagggttaatagaaaggtagcaacggaattcgagtcattttccttcgatgctacattccatgccaagaagcagattccgtgtattgtctctatgctgaccaaggaactgtatttctatcatggatcccctatggaaaacacagagaacagcgtagcttccaagagtatcaaaaacctggaaccaaagatcatccacggcagcgagagcatggcctccggcatttcactggacaatagctacaaaatggactacccagagatgggactctgtataatcatcaacaacaagaacttccataagagcacaggcatgacttctagatccggaacagacgtggatgccgctaacctgcgcgaaacctttagaaacctgaaatacgaagtgaggaacaagaacgatctcacccgcgaggagattgtggagctgatgcgggacgttagtaaagaagaccatagcaaacgatcctccttcgtttgcgtcctgctcagtcacggcgaagagggcatcattttcgggacaaacggcccagtggatttgaagaagattaccaatttctttcggggggataggtgtagatcccttaccggtaagcccaaactgtttataatccaggcctgtcgcggcactgagctggactgcggtattgaaacagat

SEQ ID NO: 249720 - DNA, 855 bp, synthetic construct
  misc_feature 1..855: note = Description of Artificial Sequence: Synthetic coding sequence
  source 1..855: mol_type = other DNA
atgatcgaaaccgactccggtgtggacgacgatatggcctgtcataagatacctgtggaagcagactttctttacgcgtactcgactgcacccgggtactactcgtggcgaaattcaaaggacgggtcatggtttattcaaagcctgtgtgccatgcttaagcaatacgctgataaactggagtttatgcatattctgacgcgagtgaacaggaaggtggccactgagtttgaatccttttcgttcgatgctacttttcatgcgaaaaagcaaattccatgtatcgtctctatgcttaccaaagaactgtacttctaccatggatccccaatggagaacactgaaaattcggtggcatcgaagtccatcaaaaaccttgagcctaagataattcatggttccgagtccatggcatcgggtatctcactggataattcatacaagatggattaccccgaaatgggtctgtgcatcataatcaacaacaagaatttccacaagtcaactggaatgacttcacgatccggaaccgacgtggacgccgcaaaccttagagagacttttagaaacttgaagtatgaagtcagaaataagaatgatcttacccgggaagagatagtcgagctgatgagggacgtctcaaaggaggaccactccaagcgcagttccttcgtgtgtgttcttttgtcccacggagaagaaggtatcatttttggaactaacggacccgtggatctcaagaagataactaacttcttccggggtgatcggtgtcgttcacttaccggaaagcctaagctgttcatcattcaggcctgtcgtggaaccgagctggactgtggcattgagactgac

SEQ ID NO: 249721 - DNA, 855 bp, synthetic construct
  misc_feature 1..855: note = Description of Artificial Sequence: Synthetic coding sequence
  source 1..855: mol_type = other DNA
atgatcgagactgattcgggggtcgatgacgacatggcttgccacaagatccctgtggaagcagactttctctacgcgtactccaccgcgcctggatactactcatggcggaacagcaaggacgggtcgtggttcattcaatccctttgtgcgatgcttaaacaatacgcagacaaacttgagtttatgcatatcctgacccgagtgaatagaaaggtggccactgaatttgaatccttctcctttgatgccacgttccacgcaaagaagcagattccatgtattgtctcaatgctgaccaaggaactttacttttaccatgggtcgcccatggagaacactgagaactctgtcgcctcaaagtcgatcaagaaccttgagccaaagattattcacggaagcgagagcatggcttcaggaatatctctcgataattcctataagatggattaccctgagatgggcctttgcatcatcattaacaacaagaattttcacaagtcaactggtatgacttcgagatccggtaccgatgtcgatgcagcaaacctgagggaaacgtttaggaatctgaagtacgaagtccgcaataagaatgacctgacgcgagaggaaattgtggaactcatgagagacgtgtcgaaggaagatcattcaaagagatcctcgtttgtgtgcgttctcttgtctcacggagaagaaggaattatcttcgggactaatggtcccgtggatctgaagaagattaccaatttcttccggggggatcgctgtagaagccttaccggaaagcccaaactgtttatcatacaggcttgtcgcggcaccgaactggattgtggtatcgagacggat

SEQ ID NO: 249722 - DNA, 855 bp, synthetic construct
  misc_feature 1..855: note = Description of Artificial Sequence: Synthetic coding sequence
  source 1..855: mol_type = other DNA
atgattgaaactgactcaggtgtcgatgatgacatggcctgtcataaaatcccggtggaggccgatttcctctacgcctactctacggccccaggctactactcgtggcgaaatagcaaagatggaagttggttcattcaaagtttatgtgccatgctcaaacagtatgctgataaactagagttcatgcatatcctgacaagggtcaatcggaaagtggctacagaattcgagtcgttcagctttgatgccactttccacgccaaaaaacagattccatgtatcgtgtcgatgttaaccaaggaactgtatttttatcatggttcaccgatggagaatactgaaaatagcgttgctagcaagagcattaagaacctcgagccaaagattatccacggctccgaatcgatggccagcgggatctcactggacaacagctataaaatggattaccctgagatgggactgtgcatcataatcaacaataaaaatttccataagagcaccggcatgaccagccgctctggaaccgatgtggacgcggccaacctgagagagaccttcaggaatctgaaatatgaggtcagaaacaagaatgatctgacaagagaggaaatcgtggaacttatgagggatgtgtctaaggaggaccacagcaagagatcttcattcgtgtgtgtgctgctgtcccacggagaggaggggatcatattcggcaccaacggaccggtagacttaaaaaagattacgaatttctttagaggagatcgatgtaggtcccttaccgggaagccgaagctcttcattatccaggcctgccgcgggacggaactggattgcggtatcgaaactgat

SEQ ID NO: 249723 - DNA, 855 bp, synthetic construct
  misc_feature 1..855: note = Description of Artificial Sequence: Synthetic coding sequence
  source 1..855: mol_type = other DNA
atgatagagaccgactcaggagtcgatgacgacatggcctgtcacaaaattccggtcgaggctgactttctctacgcttactctactgcaccaggatactattcttggcggaattcgaaggatggcagctggtttatacaatctctgtgcgcaatgttgaaacagtacgctgacaaacttgagtttatgcatatcctaacacgggtcaacaggaaagtggccactgagttcgaaagttttagtttcgatgccacattccatgccaagaagcagattccttgcatcgtgagcatgctcacaaaggagctgtacttttatcacggaagccctatggaaaataccgagaactcagttgcatcaaaatccattaaaaacttggagccgaagatcattcatgggtccgaatcaatggcaagtggtattagtttagacaattcatataagatggattatcccgaaatgggactctgtataataataaataacaagaactttcataaatccaccggtatgaccagtcgatctgggaccgacgttgacgccgcaaatctgcgggaaacatttcggaatctcaagtatgaggtgcgcaacaagaacgacctaactcgcgaagaaattgttgagctgatgcgggacgttagcaaggaggaccactctaagaggagctcatttgtttgtgttcttctgagtcacggcgaggagggcatcattttcggcaccaatggacctgtagacctgaaaaaaatcactaactttttccggggggatcgctgccgaagcctaactgggaagcctaagctgtttataatccaggcgtgtcgcggtaccgagcttgactgtggcatcgagactgat

SEQ ID NO: 249724 - DNA, 855 bp, synthetic construct
  misc_feature 1..855: note = Description of Artificial Sequence: Synthetic coding sequence
  source 1..855: mol_type = other DNA
atgatcgaaaccgatagcggagtggacgacgacatggcatgtcataagatccctgtggaagctgactttctgtatgcgtactccaccgcaccaggttattatagctggcgcaattctaaagatggctcctggttcatccagagcctgtgtgctatgctgaaacagtacgctgataagctggaatttatgcatattttgacacgagtgaatagaaaggtggcgactgaatttgaatccttctcttttgacgcaaccttccacgccaaaaaacaaatcccctgcatcgtgtcaatgttgacaaaagagctgtatttctaccacggcagccctatggaaaacactgaaaatagtgttgcttctaagtccattaaaaaccttgagcctaagattattcacgggtctgagtcaatggcatccgggattagtctggataactcctacaagatggattatcccgagatggggctctgtattatcattaacaataagaatttccacaaatctaccgggatgacatcaagaagtggaaccgacgtggatgctgcaaacttgcgtgaaacctttcgcaacttgaagtacgaggtgcgcaacaaaaacgacctaactagagaggagatcgtcgagttaatgcgggatgtgagcaaggaagatcattcaaagcgcagttccttcgtgtgcgtgctccttagccatggagaagagggaatcattttcggtaccaatggaccagtggacttgaaaaagataacaaacttctttcgtggcgaccgttgcagatctttgacgggaaagcccaagctgtttattatccaagcttgtcgcggaacagagcttgactgcggcattgagaccgat

SEQ ID NO: 249725 - DNA, 855 bp, synthetic construct
  misc_feature 1..855: note = Description of Artificial Sequence: Synthetic coding sequence
  source 1..855: mol_type = other DNA
atgattgagactgatagcggagttgacgatgacatggcctgtcataagattccggtcgaggcggacttcctgtacgcttactcaactgcacccggctattattcttggcgcaattcgaaagatgggtcatggttcattcagagtctatgtgctatgcttaagcagtatgcagacaaactggaatttatgcacattttgaccagagtaaatcgcaaggtggccactgaattcgaatcgttcagtttcgatgcgacctttcacgcaaagaaacagattccctgcatcgtgagcatgttgaccaaggagctctacttttatcatggcagtcccatggaaaacaccgagaattcagtcgcctcaaagtctattaaaaaccttgaacctaaaattatacatgggtccgagagtatggcaagtgggattagtttagataattcgtacaaaatggattacccagaaatgggcctgtgcatcatcattaataataagaacttccacaagtccaccggtatgacctctcgatccggaacggacgtggatgctgctaatctgcgcgagacctttcggaacctgaaatacgaagttcggaataagaatgacctgacgcgagaggaaatcgtggaactcatgagggatgtaagtaaagaagaccatagtaagcggagttcttttgtgtgtgtgctgctgtctcatggcgaggagggaattattttcggaacaaacggcccagtagatctcaaaaagatcaccaatttctttcgcggagataggtgccggtctctgaccgggaagccaaagttattcatcattcaggcgtgcaggggtaccgaactcgattgcggcatcgagactgat

SEQ ID NO: 249726 - DNA, 855 bp, synthetic construct
  misc_feature 1..855: note = Description of Artificial Sequence: Synthetic coding sequence
  source 1..855: mol_type = other DNA
atgattgaaaccgactcaggagtggacgatgacatggcctgtcacaaaatccccgtcgaggcagactttctgtatgcatactcaaccgccccgggctactatagctggaggaatagcaaagacggtagctggtttattcagagcctttgcgccatgttgaaacagtacgctgacaaactggaattcatgcacatccttacaagggtgaaccggaaggtggctacagaatttgagtctttttcattcgacgctacattccacgccaaaaaacagatcccttgcattgtaagcatgttgacgaaggagctatacttttaccacggtagtcccatggagaacaccgagaatagtgttgcatccaagtccattaagaatcttgagcctaagattattcatggctctgagagtatggccagcggcataagcctggataatagctataagatggattatccggagatggggctgtgcatcataatcaacaacaaaaattttcataaatctaccggaatgacctcacggtcagggaccgatgttgatgctgccaacctgcgagaaacatttagaaatctgaaatatgaggtacggaataaaaacgatctgacaagagaagaaattgtcgagctgatgcgagatgtttctaaggaagaccattcgaaaagatcatccttcgtgtgtgtgctcctttcccatggagaagagggcatcatatttggaaccaacggacccgtggacttgaagaagatcactaattttttccgtggtgataggtgcagatccctgaccgggaagccaaaactgtttataattcaggcttgccgggggacagaacttgattgcggcattgaaacggat

SEQ ID NO: 249727 - DNA, 855 bp, synthetic construct
  misc_feature 1..855: note = Description of Artificial Sequence: Synthetic coding sequence
  source 1..855: mol_type = other DNA
atgatcgaaacagattcgggtgtggatgatgacatggcctgtcataagattcctgttgaagcagactttctctatgcttactccacagcccccgggtactattcctggcggaacagcaaagacggcagttggttcatccaatctctgtgtgccatgctaaagcagtacgccgacaaattagagtttatgcacatactgacccgggttaatcggaaggtggccacagagttcgaaagcttcagttttgatgccaccttccacgccaaaaaacagattccatgcatcgtctcaatgctaacaaaggagctgtacttctatcacgggagccctatggagaatacagaaaattctgtggcaagtaaaagtattaaaaatctggaacccaagattatacatggatccgaaagcatggcatccggaatcagcttagataattcttataagatggactacccagaaatggggctctgcattataattaataacaaaaattttcacaaatcaacagggatgaccagtaggtctggcaccgatgtcgatgccgctaatctcagagaaaccttcaggaacttgaagtatgaggtgcgcaataaaaatgatctaaccagagaggagattgtggagcttatgagagatgtgagcaaggaggatcatagcaaaagatcctcatttgtctgcgtcttactgtcccacggagaagaaggcatcatttttggaaccaacggtcctgtagacctcaaaaagataaccaacttctttaggggcgataggtgccgatccctcacggggaagcccaaactttttattattcaagcctgcaggggcacagagctcgactgcgggattgagactgac

SEQ ID NO: 249728 - DNA, 855 bp, synthetic construct
  misc_feature 1..855: note = Description of Artificial Sequence: Synthetic coding sequence
  source 1..855: mol_type = other DNA
atgatcgagactgactcgggggtggatgacgacatggcttgccacaagatcccagtggaagccgatttcctgtacgcctactccacggccccgggatactattcctggcgcaactccaaggacggaagctggtttatccagtctctctgtgcgatgctgaagcaatacgccgataaacttgagttcatgcatattctgacccgcgtcaatcgaaaagtggcaaccgaattcgagagcttttccttcgacgcgacgttccacgcgaaaaagcagatcccgtgcattgtgagcatgcttacgaaggaactgtacttttaccatggcagcccaatggagaatactgagaactccgtggcatcgaagtcgatcaagaatctggaaccgaagatcatccacggatcagagtctatggccagcggtatctcgttggataactcatacaaaatggattaccctgaaatgggtttgtgtatcatcatcaacaacaagaacttccataaatcgactggtatgacgtcccggtcagggactgatgtggacgcggccaatctgagggaaaccttccggaacctgaagtacgaagtgcgcaataagaacgatttgactcgggaagaaattgtcgagctgatgagggacgtctccaaagaggaccattctaaacgcagctcgttcgtgtgcgtgctcctgagtcatggagaagaaggcatcatttttggaaccaacggcccagtggatctgaagaagattaccaacttcttccgcggtgaccgctgccggagtctgactggaaagcccaagttgtttatcatccaggcttgtaggggtaccgaactggattgcggcattgagactgat

SEQ ID NO: 249729 - DNA, 855 bp, synthetic construct
  misc_feature 1..855: note = Description of Artificial Sequence: Synthetic coding sequence
  source 1..855: mol_type = other DNA
atgattgaaactgattcaggggtggacgatgatatggcgtgtcataagatccccgtggaggctgattttctctatgcctactcaaccgccccggggtactatagctggcgcaattctaaagatggatcctggttcatccagtccctgtgcgccatgctgaaacagtacgcggataagctagagtttatgcacatcctcaccagggtaaacaggaaggtggccaccgaattcgagagcttctcgttcgatgccaccttccacgcaaaaaaacagatcccatgtatcgtgagcatgctgacaaaagagctgtatttttatcatggcagtccaatggagaacaccgaaaattcagttgcgagcaagtccatcaaaaatctagagccgaagatcattcatggcagcgaaagcatggcaagtggaatcagcctggacaattcttataagatggattaccctgagatggggctatgcatcatcataaataacaagaattttcataagagtacgggtatgaccagtcgatccggcacagacgtcgacgcggcaaatttacgagaaacatttaggaatctaaaatatgaggtccggaataagaacgatttgaccagggaggaaatcgtagagctgatgcgggacgtgagtaaagaagaccactccaagagatcctccttcgtgtgcgtgctcctgagccatggtgaggaaggcattattttcgggactaacggtcccgtagatttgaagaagatcaccaacttcttcaggggagatagatgtagatcgctgaccggaaagcccaaactgtttatcattcaggcctgtcgagggacggagctggactgtgggattgagacagat

SEQ ID NO: 249730 - DNA, 855 bp, synthetic construct
  misc_feature 1..855: note = Description of Artificial Sequence: Synthetic coding sequence
  source 1..855: mol_type = other DNA
atgatcgagaccgactcaggtgtggacgacgatatggcttgccacaaaatccccgtggaggcagattttctgtacgcctacagtacagcacctggttattactcttggaggaatagtaaggatggcagttggtttatacagtccctttgcgccatgttgaaacagtacgctgacaaactggaattcatgcacatcctcactcgagtcaatcgaaaggttgccaccgaatttgagtccttctctttcgacgccacgttccacgctaagaaacagatcccgtgcattgtgtctatgttaaccaaagagctttacttttatcatggctcccctatggagaacacagagaatagcgtggcgtctaaatcaatcaagaatctcgagcccaaaattatccacgggagtgagagcatggcctccgggatttcacttgataatagctataagatggactaccctgaaatgggcctgtgcatcattatcaataacaagaacttccataaatctactgggatgaccagtcgctccgggaccgacgtcgacgcagcaaacctgagggaaacgtttagaaatcttaagtatgaggtacgaaataagaacgaccttactcgcgaggagatcgtggagctcatgagggacgtgagcaaggaggaccatagtaaaagaagttctttcgtatgcgtgcttctgtcccatggggaagaaggcattatctttgggacaaacggacccgtggatctcaaaaagataacaaacttcttcagaggagacaggtgccggagcctgacaggtaagccaaaattgttcatcattcaggcctgtcgggggaccgaacttgactgcggaattgaaaccgat

SEQ ID NO: 249731 - DNA, 855 bp, synthetic construct
  misc_feature 1..855: note = Description of Artificial Sequence: Synthetic coding sequence
  source 1..855: mol_type = other DNA
atgatcgagaccgattctggcgttgacgatgatatggcttgccacaaaatcccagtggaggcggactttctgtacgcctattccactgcgccaggttactatagctggcgcaattccaaggatggatcatggtttatccagtccctgtgcgccatgctcaaacagtacgccgacaagctggagtttatgcacattttgaccagagtcaacaggaaagtggctaccgaatttgaaagcttttcctttgacgccaccttccacgccaaaaagcagatcccctgtatcgtctccatgctaaccaaagaactttatttttaccacggttctccaatggaaaacaccgagaattctgttgcctctaaatctattaagaaccttgaacccaaaatcatacatggctcggaaagcatggcatctgggatcagcctcgataattcctacaaaatggattaccccgaaatgggcttgtgtatcatcatcaataacaaaaatttccacaaaagcacagggatgacttctcggtcaggtactgacgtggacgctgccaatctccgcgagacgttcagaaacctcaagtacgaagtgaggaataagaatgacctgacaagggaagaaatagtggaactgatgcgggatgtgagcaaggaagatcattccaaacggtctagcttcgtttgcgtgctcttgtcacatggggaggaaggcattatctttggaaccaatgggccggtggacctgaagaaaattactaacttttttcgcggtgaccgatgtaggagcctcaccggcaagccaaaactcttcattattcaggcctgccggggcaccgagctggattgcgggatcgaaactgat

SEQ ID NO: 249732 - DNA, 855 bp, synthetic construct
  misc_feature 1..855: note = Description of Artificial Sequence: Synthetic coding sequence
  source 1..855: mol_type = other DNA
atgatcgagaccgattcgggagtcgacgacgacatggcgtgccacaaaataccggtcgaagcagactttctgtacgcctactccactgcgccaggttactattcttggcgcaattccaaggacggttcttggtttattcagtccctgtgcgccatgctgaaacagtatgccgacaagctggagttcatgcatattctgacccgtgttaacagaaaggtcgcaactgagtttgagtcattttcctttgacgccaccttccacgcgaaaaagcagatcccctgtatcgtgtcaatgcttacgaaggaactgtacttctaccacgggtctccgatggaaaacactgagaactccgtggcgagcaaaagcattaagaatcttgaacccaaaattattcacggctctgaatccatggcgtcaggaatttcattggataattcttacaagatggactatcccgaaatgggcctgtgtattataatcaataataaaaacttccacaagagtacggggatgacttcaaggtcaggcacagacgtggacgcggctaacctgcgcgagacgtttagaaatcttaagtatgaggtgcgcaacaaaaatgacctgacgcgcgaggaaatcgtggagctgatgagagatgtgagtaaagaggatcatagcaagcgtagtagcttcgtgtgcgtcctgctgtctcatggcgaagagggaataatcttcgggacaaatgggcccgttgacctgaagaagataaccaattttttccggggggaccgttgccggagcttgaccggaaagccgaagctgtttatcatacaggcatgccgtggaactgaacttgattgtggaatcgagaccgac

SEQ ID NO: 249733 - DNA, 855 bp, synthetic construct
  misc_feature 1..855: note = Description of Artificial Sequence: Synthetic coding sequence
  source 1..855: mol_type = other DNA
atgatcgaaaccgattccggagttgatgacgatatggcatgtcacaagattcccgtggaagcagactttctttacgcctactccactgcaccgggttactacagctggcgcaattcgaaagatggttcgtggtttatccaatcactgtgcgcaatgcttaaacaatacgccgataagctcgaattcatgcacatcctgaccagagtgaaccgaaaagtggcaaccgaattcgaatcgttttcctttgatgcaacttttcatgccaaaaagcaaatcccatgtatcgtgtccatgcttaccaaagaactgtacttctatcatggctctcctatggagaatacggaaaattcagtggcatccaaatccattaagaatcttgagccaaagattatacatgggtcagagagcatggcgtccggaataagcctggacaatagctacaaaatggactaccctgaaatgggactgtgcatcataatcaacaacaagaacttccataagtcaaccggtatgacgtcgaggtccgggaccgatgtcgacgcagcgaatctgagagagactttccgaaacctcaagtacgaagtcagaaacaaaaatgacctgactcgggaggagatagtggagctcatgagagacgtgtcaaaagaagatcactccaagagatcgtcattcgtctgcgtgttgttgtcgcatggtgaagaaggcatcatttttggtactaacgggccagtggaccttaagaagattacgaacttttttcgtggggaccgctgtcggtccctgactggtaaacccaaacttttcatcatccaggcgtgtagaggaaccgagctggattgtgggattgaaactgac

SEQ ID NO: 249734 - DNA, 855 bp, synthetic construct
  misc_feature 1..855: note = Description of Artificial Sequence: Synthetic coding sequence
  source 1..855: mol_type = other DNA
atgattgagactgattctggcgtcgacgacgacatggcatgtcataaaattccggttgaagccgactttctgtatgcgtatagcacggcccccggctactattcctggcgaaacagtaaggacgggtcatggttcattcagtcactttgtgctatgcttaaacagtacgccgataaactggagtttatgcatatcctgacccgtgttaacagaaaggtggccaccgaatttgagagcttctcttttgacgccacctttcacgcaaaaaaacagataccatgcattgtgtcaatgctaacgaaagaactttacttttaccatggcagccctatggagaacactgagaattccgtggcttccaagagtattaagaacctggaacctaagatcatccatggttccgaatctatggcctcaggcatttcccttgataattcttataaaatggattaccccgagatgggcctgtgtataatcatcaacaataaaaactttcacaaatccaccggcatgacgagccgaagtggaacagatgtggacgcggccaacctccgtgaaaccttcagaaacttgaagtatgaagtaaggaataaaaatgatctcacaagggaggagattgtcgagcttatgagagacgtaagcaaggaggatcatagtaagaggtccagtttcgtgtgcgtgttgctatctcacggggaagaaggcatcatctttgggaccaacggtccggtggacctgaagaaaatcacgaattttttcagaggggataggtgcagatctctgactggaaaacctaaactgtttattattcaggcatgccgcggcaccgaactcgattgtggcatcgagaccgat

SEQ ID NO: 249735 - DNA, 855 bp, synthetic construct
  misc_feature 1..855: note = Description of Artificial Sequence: Synthetic coding sequence
  source 1..855: mol_type = other DNA
atgatcgagactgatagcggggtggatgacgatatggcgtgccataagatccctgtggaagccgattttctgtacgcatactcgactgcacctggttactacagctggcgcaactcgaaggatgggtcatggtttatccaatcattgtgtgcaatgcttaagcagtacgccgacaagctcgaattcatgcatatcctcaccagggtgaacagaaaggtggcgaccgaattcgagagcttctcgttcgacgctacctttcatgcaaagaagcaaataccttgtattgtgagcatgctgaccaaggaactctacttttaccatggttcaccgatggagaacaccgaaaactccgtcgcatccaaaagcattaagaatttggaacccaagattatacatggcagcgaaagcatggcatccggtatttcccttgacaactcctataagatggactacccagagatgggtctgtgtatcatcattaacaacaagaacttccataagtcaaccgggatgacctcgcgttcagggactgatgtcgatgctgcaaaccttcgcgagacttttagaaaccttaagtacgaggtgagaaataagaatgatcttacccgggaagagattgtggaacttatgagagatgtgtctaaagaagatcactccaagcgtagcagctttgtgtgcgtgctgctgtcacatggagaggaaggaatcatttttggcactaacggccccgtcgatctcaagaagattaccaatttctttcgaggtgataggtgccgctccctgactgggaagcccaaactgtttatcattcaggcatgtagaggcactgaactggattgcggaattgaaactgat

SEQ ID NO: 249736 - DNA, 855 bp, synthetic construct
  misc_feature 1..855: note = Description of Artificial Sequence: Synthetic coding sequence
  source 1..855: mol_type = other DNA
atgattgagaccgacagtggcgtcgacgatgacatggcctgccataagatacctgttgaagccgactttctctacgcctactccactgccccaggctattacagttggcggaatagtaaggacggttcttggtttatccagtccctctgcgctatgttaaaacaatatgctgacaaattagagtttatgcatatactgacacgggtgaatcggaaggtcgctaccgaattcgagtccttctcattcgacgccacttttcacgccaaaaagcagatcccttgcatcgttagcatgcttacgaaagagctctacttttatcatggcagtccaatggagaacactgaaaatagtgttgcaagtaaatccatcaagaatctggagcctaagatcatacacgggagcgagagcatggcgtccgggatatccctggacaactcctataagatggactacccagaaatgggactgtgtatcatcatcaataataaaaacttccacaaaagcactggaatgacctcacggtctggcaccgacgttgacgccgcaaacctgagggagacctttcgaaaccttaaatatgaggttcgaaacaaaaacgatttaacccgggaagaaattgtggagctgatgcgggacgtgagtaaagaagatcacagtaaaaggagcagctttgtttgcgtgctgctctcgcacggcgaggaaggaatcatctttggtacaaacggacctgtggacctcaagaagataactaatttctttagaggggacagatgccgcagcctgacaggcaaacctaagctctttatcatccaggcttgccgggggactgaactggattgtgggatagaaacagat

SEQ ID NO: 249737 - DNA, 855 bp, synthetic construct
  misc_feature 1..855: note = Description of Artificial Sequence: Synthetic coding sequence
  source 1..855: mol_type = other DNA
atgatcgaaactgactcaggtgtggatgatgatatggcgtgtcacaagatcccagtagaggcggacttcctgtacgcctactccactgcacctggatactattcatggagaaatagcaaggacggctcatggtttatacagtcgttgtgcgcgatgctgaaacagtacgcagacaagctggagttcatgcatattctgacccgggtgaatcgcaaggtggcaactgaattcgaatcttttagcttcgacgccaccttccacgccaagaagcaaatcccttgcatagtgtcaatgctgaccaaagaactgtacttttaccacggctcgccgatggagaacacggaaaattcagtcgcctcgaaatccattaagaatttggaacctaagatcattcatggttccgaaagcatggccagcgggatcagcctcgacaattcctacaagatggattacccggaaatgggactgtgcatcattatcaacaataagaacttccacaagtcgactggaatgacctcacggtccggcaccgacgttgacgctgctaacctccgggaaactttccggaacctcaagtacgaggtgcggaacaaaaacgacctgacccgagaagagattgtggagctcatgagagatgtctcgaaagaagatcattcgaagaggtcgtcatttgtgtgtgtccttttgtcccatggtgaagagggtatcatcttcggaacgaacggcccggtggatctcaagaagatcactaatttctttcgcggagatcgctgcaggagcctgaccggaaaaccgaagctcttcataatccaagcatgccgcggaaccgagcttgactgcgggatcgaaacggac

SEQ ID NO: 249738 - DNA, 855 bp, synthetic construct
  misc_feature 1..855: note = Description of Artificial Sequence: Synthetic coding sequence
  source 1..855: mol_type = other DNA
atgatcgaaaccgactccggagtagacgacgatatggcctgccacaagataccggtcgaagcggattttctgtacgcctactcgactgcacccggttattacagctggcgcaacagtaaggacggctcctggttcatccagtctctttgcgccatgttgaaacaatacgctgacaagctggaattcatgcacatcctgaccagagtgaaccggaaggttgcgaccgagttcgaatcgttctcatttgacgccaccttccacgcgaaaaagcaaattccttgtatcgtgagtatgcttacgaaggaattgtatttctaccacggatccccaatggaaaataccgagaattcagtggcctcgaaatcaatcaaaaacctcgagccgaaaatcatccatggatccgagagtatggcaagcggaatctcgctcgacaactcgtacaaaatggattacccggagatggggctctgcatcattatcaacaataagaactttcataagtccaccgggatgacttcgcggagcgggactgatgtcgacgcagctaacctgcgtgaaaccttcagaaacctgaaatacgaggtgagaaacaagaacgacctcactcgcgaagagatcgtggagcttatgcgcgatgtgtccaaggaagatcactcaaagagatcctccttcgtgtgtgtgcttctcagccatggtgaagagggaattatcttcggaacgaatggaccggtcgacctgaaaaagatcactaatttctttcgcggcgatcggtgccggtcactcaccggtaagccaaagctgttcatcatccaggcgtgccgcggaactgaactggattgtggtatcgagactgac

SEQ ID NO: 249739 - DNA, 855 bp, synthetic construct
  misc_feature 1..855: note = Description of Artificial Sequence: Synthetic coding sequence
  source 1..855: mol_type = other DNA
atgatcgaaaccgacagcggggtggacgacgatatggcctgccacaagatccctgtggaggctgacttcctctacgcttattcaactgctcctggttattatagctggcggaactctaaggatggctcctggtttattcagtccctctgcgctatgctaaaacaatacgccgataagttggagttcatgcacatcctcacaagagtgaatcgtaaggtggctaccgaattcgagtctttctcgtttgacgccacatttcatgccaaaaagcagatcccatgtatagtatccatgttgaccaaggaattatacttttaccacggctctcctatggagaatacagagaatagtgtggcctccaaaagcatcaaaaatctggagccgaaaataattcatggcagtgagagcatggcttcaggtatttccctggataactcttataagatggattatcctgagatgggattatgcattattattaataacaaaaattttcataagtcaaccgggatgaccagcaggagcggcacagacgtcgatgcagctaacctgagagagacctttcggaacttgaagtatgaggtgaggaacaagaacgaccttacaagggaagagattgtcgaactaatgagggatgttagcaaggaggaccattctaaacggagttcttttgtgtgtgtcctgttgtcgcacggtgaagagggcataatcttcggaaccaacgggcccgtggacctgaagaagatcactaacttttttagaggcgacagatgcagaagcttgacaggaaagccaaaactgtttatcatccaagcttgtaggggcaccgagctggactgcggcattgagacggac

SEQ ID NO: 249740 - DNA, 855 bp, synthetic construct
  misc_feature 1..855: note = Description of Artificial Sequence: Synthetic coding sequence
  source 1..855: mol_type = other DNA
atgattgaaacagattcaggggttgacgatgatatggcttgtcataaaatccccgttgaggcagatttcctttatgcttactctacagctcctggttactattcctggagaaacagtaaagatgggagttggtttatccagtcattatgcgccatgcttaaacagtacgccgataagttggagtttatgcacatattaaccagagtcaatcgtaaagtagccacagaattcgaaagcttctcgttcgacgccacctttcatgccaagaaacagattccatgtattgtgtctatgcttaccaaagaactatatttttatcacggctcgcctatggaaaatacagaaaacagcgtcgcatctaaatcaattaagaatcttgagccaaagattatacatgggtcagagtcaatggcttccggtatcagtctggacaattcctataaaatggattatcctgaaatggggctctgtatcatcatcaacaataagaactttcataagtctacaggtatgacgagtaggtcagggaccgatgttgatgctgcaaacctcagggaaacttttaggaatcttaagtatgaagtccgcaacaagaacgaccttactcgcgaagaaattgttgaactaatgagagacgttagcaaggaggatcattccaagcgtagtagcttcgtttgtgttctcttgagccatggtgaagaaggcattattttcggtaccaacggtccagttgatttgaagaagattaccaattttttcagaggcgacaggtgccgctcccttactggcaagcccaagttattcatcattcaggcttgcagaggcacagaattagattgcggtatcgagactgat

SEQ ID NO: 249741 - DNA, 855 bp, synthetic construct
  misc_feature 1..855: note = Description of Artificial Sequence: Synthetic coding sequence
  source 1..855: mol_type = other DNA
atgatcgagaccgattctggagtcgacgatgacatggcctgtcacaaaatacctgtcgaagccgattttctgtacgcctattccacagcccccggttattacagctggcgaaattccaaggatggcagctggttcatccagtctctgtgcgcaatgctgaagcagtacgctgataaactggaatttatgcatattctgacccgcgttaaccggaaggtggcgacagaattcgagagcttttcttttgacgcgacctttcatgcaaaaaagcagatcccgtgcatcgttagcatgttgacaaaggagctatatttctaccacggcagcccaatggaaaataccgaaaatagtgtagcgtctaaaagcatcaaaaacctggaaccgaagattattcacggtagcgagagcatggcatcgggtatcagcctggacaatagctataagatggattacccagagatggggctgtgtattatcatcaacaataagaacttccataagtccaccggcatgaccagcagatcaggcaccgacgtcgacgcagcaaacctgagagagaccttcaggaacttaaaatatgaagtgcgcaataagaatgaccttacacgggaggagattgtggaattgatgcgcgacgttagcaaagaggatcacagcaaacgtagcagcttcgtgtgcgtattgctaagccatggggaagagggcatcatattcggtaccaacggtccagtcgacctcaaaaagataactaacttcttccgaggtgatcgctgtcgttctctgaccggtaaaccaaagttgtttataattcaagcgtgtcgtggcaccgagctggattgtggcattgaaactgac

SEQ ID NO: 249742 - DNA, 855 bp, synthetic construct
  misc_feature 1..855: note = Description of Artificial Sequence: Synthetic coding sequence
  source 1..855: mol_type = other DNA
atgattgaaactgactcaggagtggatgatgacatggcctgccataagatcccagtcgaggcagactttctgtacgcctactccactgcgcccggatactacagttggcgcaattcgaaggacggctcctggttcattcagagcctctgcgcaatgttgaagcaatacgcagacaaactggagttcatgcacattctgactcgggtgaatcgcaaggtggctactgaattcgagtcgttctccttcgatgcaacctttcatgccaagaagcagatcccgtgcatcgtgtccatgctcaccaaggagctgtacttctaccatgggagcccgatggagaacactgaaaactctgtcgcctccaagtcaatcaagaatcttgagcccaaaatcattcacggttcagagtctatggcctcaggaatctcactggacaactcttacaaaatggattacccggaaatggggttgtgcatcatcatcaataacaaaaacttccacaagtcgaccgggatgacctccagaagcggaactgacgtggatgccgcgaatcttcgcgaaacctttagaaacttgaagtacgaagtgaggaacaaaaacgatctgacccgggaagaaattgtggaactgatgcgcgatgtgagcaaagaggatcattcaaagagatcctcctttgtgtgtgtgctgctgtcccatggagaggaaggaatcatcttcggaaccaacggtccggtggatctgaagaagatcacgaactttttccgcggagatcgctgtcgctcgcttacgggaaagccgaagctctttatcattcaagcatgcagggggactgaattggattgcggcatcgaaactgac

SEQ ID NO: 249743 - DNA, 855 bp, synthetic construct; identical to SEQ ID NO: 249734
  misc_feature 1..855: note = Description of Artificial Sequence: Synthetic coding sequence
  source 1..855: mol_type = other DNA

SEQ ID NO: 249744 - DNA, 855 bp, synthetic construct
  misc_feature 1..855: note = Description of Artificial Sequence: Synthetic coding sequence
  source 1..855: mol_type = other DNA
atgatcgagacggatagcggggttgatgacgatatggcctgtcacaagatcccggtcgaggcggatttcttgtacgcctactccaccgcgcccggatactacagctggcgtaattcgaaagatggttcctggttcattcagtcgctatgcgcaatgctgaagcagtatgccgacaagcttgagttcatgcacatcctgactcgcgtcaaccggaaagttgcaacggaattcgagtcgttcagcttcgacgcaacattccatgccaagaagcagataccctgcatcgtcagcatgcttaccaaggagctttatttctatcacgggtcgccgatggaaaatactgaaaacagcgttgcttcgaagagcatcaaaaatctggagccgaagattatccacggttccgagtccatggccagcggaatctccttggataacagctacaagatggattatcctgaaatgggcctctgcatcatcatcaacaacaagaactttcataagtcaaccggaatgacctctcgctcaggcacggacgttgacgcagctaacttgcgagagacattccgcaacctgaagtatgaagttcggaacaagaatgaccttacccgcgaagagatcgtcgagctaatgcgtgacgtgagcaaggaggatcactcaaagaggtcctcgttcgtgtgcgtactgctatctcacggagaggagggcattatattcgggaccaacggtccagtggacttgaaaaagattaccaactttttccgtggagaccgctgtcgctctcttactggaaagcctaagctgtttatcatccaggcctgcagaggtaccgagctcgactgtggcattgaaacagac

SEQ ID NO: 249745 - DNA, 855 bp, synthetic construct
  misc_feature 1..855: note = Description of Artificial Sequence: Synthetic coding sequence
  source 1..855: mol_type = other DNA
atgattgaaactgattccggagttgatgatgacatggcatgtcacaagatccctgtggaggcagatttcctgtacgcatacagcaccgcgccgggctactactcatggcgcaatagcaaggatggtagctggtttattcagagcctctgtgcaatgcttaagcagtacgcagacaagctggaattcatgcatattctgacccgggtgaaccgcaaagtcgcaactgaatttgagtcgtttagctttgacgcgaccttccatgcaaagaagcaaattccttgcattgtgtccatgctgactaaggaattgtacttctaccacggctcccctatggaaaataccgaaaattccgttgcctcgaagtccattaagaaccttgaacctaagatcattcatggatcggaatcaatggcatcgggtatttcgctcgacaattcgtacaagatggactacccagaaatgggtctttgtatcattatcaacaacaagaatttccacaagtcgactgggatgacctcccgttcaggtaccgatgtcgacgcagcgaacctgcgcgaaacctttagaaacctgaaatatgaagtgcgcaacaagaatgaccttacccgcgaggaaattgtggagttgatgcgagatgtgtccaaggaagatcattcaaagcggtcgtcgtttgtgtgtgttcttctgtctcatggagaggaaggcatcatattcggcaccaacgggccagtcgatctgaagaagattaccaactttttcagaggcgatagatgtaggtcgctgactggaaagcccaaacttttcatcatccaggcatgcaggggaactgagctcgattgtggaattgaaaccgac

SEQ ID NO: 249746 - DNA, 855 bp, synthetic construct
  misc_feature 1..855: note = Description of Artificial Sequence: Synthetic coding sequence
  source 1..855: mol_type = other DNA
atgatcgagaccgacagtggagtcgatgacgacatggcttgccacaagataccagtggaggccgattttctatatgcctattccaccgcaccgggctattacagctggagaaatagcaaggatggtagctggttcatccagtcattgtgcgcgatgcttaagcagtatgccgataagctggaatttatgcacattctcacccgtgtgaaccgcaaggttgcgacggagtttgaaagtttcagtttcgatgcaacctttcatgctaagaaacagatcccatgtattgtaagtatgttgacgaaggaactgtatttctaccatggaagccccatggaaaatacagagaacagcgtggcctccaagtcaattaagaatttggagccaaagattatccatggcagcgagagcatggctagcggcattagcctggacaattcctacaagatggactaccccgagatgggcctgtgtatcatcattaacaataagaattttcataagtcaaccggtatgacatccaggagcggtactgatgtcgatgccgcaaacctgcgtgagacattcaggaacctcaagtacgaggtgcgcaataaaaacgacctcaccagggaagaaatagtcgagcttatgcgtgatgtgtccaaggaggaccattccaaacggagcagctttgtctgcgtcttgttgagtcatggagaggagggtatcatttttggaacaaatggcccagttgatctgaagaagattaccaatttctttcgaggcgatcgttgtagatcgttgaccggaaagcccaagttgtttatcatccaggcttgtcgcggcactgagctcgactgcggaatagagaccgac

SEQ ID NO: 249747 - DNA, 855 bp, synthetic construct
  misc_feature 1..855: note = Description of Artificial Sequence: Synthetic coding sequence
  source 1..855: mol_type = other DNA
atgattgagactgattcgggagtggatgacgacatggcatgccacaaaatccccgttgaagcagattttctttacgcttactcaaccgcacccggttactactcgtggcgtaacagcaaggatggatcgtggtttattcagagcctgtgcgcaatgcttaaacagtatgccgacaagctcgagttcatgcacatcttgactcgggtgaacagaaaggtcgctaccgaatttgagtcgtttagcttcgacgcgacctttcatgcaaagaagcaaatcccttgtatcgtgtcaatgcttaccaaggaactttacttctaccatgggtcacctatggaaaatactgaaaattccgtcgcgtccaaatcgattaagaacctggaaccaaagatcattcatggcagcgagtcaatggcgtcaggaatttccctggataattcgtataagatggattaccctgagatgggactgtgtatcatcattaacaataagaattttcacaagagcactggcatgacgtccagatccggaaccgacgtggatgcagcaaacctccgcgaaacctttcgcaatctgaaatacgaggtccgcaataagaacgacctgactagagaagaaattgtggaactgatgagagacgtctccaaagaagatcatagcaaacgctcctcgtttgtgtgtgtcctgcttagccatggtgaagaaggtatcatttttggaactaacggacccgtggatttgaagaagattaccaacttttttcgaggagatcgttgccgtagccttactggaaagccgaaactgttcataattcaagcctgtaggggtaccgaactggattgtggtatcgaaaccgat

SEQ ID NO: 249748 - DNA, 855 bp, synthetic construct
  misc_feature 1..855: note = Description of Artificial Sequence: Synthetic coding sequence
  source 1..855: mol_type = other DNA
atgattgaaacggattctggcgttgacgatgatatggcctgccataaaataccagtggaggcggatttcctttacgcctacagcaccgcccccgggtattactcctggcgcaactccaaggacggctcttggtttattcagtctctctgcgccatgctcaagcagtatgccgacaaacttgagttcatgcacatcctgacgagagtgaataggaaagttgcaactgagttcgagtctttctcgtttgacgcgacatttcacgcaaagaaacagatcccttgcatcgtttctatgctgacgaaggaactctacttctaccacgggtctcctatggaaaacaccgagaatagcgtggcgtccaagtccattaagaatctggagcctaaaatcatccacggaagcgaatctatggcgagcggcatctccctcgacaatagctacaagatggattatccagaaatgggtttgtgcattattattaataacaaaaacttccacaagtcgacgggtatgactagccgctccggaaccgatgtggacgctgccaacctacgggagactttccgcaaccttaagtatgaggtccgtaataagaatgatctgactagggaggagatcgtagagctgatgcgggacgtgtccaaggaagaccactcaaaacggagtagcttcgtgtgcgtgctcctcagccacggtgaggaggggatcatcttcgggacaaatggccccgtggacctgaagaagattacaaatttttttcgcggcgataggtgcagaagcctcaccggtaaacccaagctattcattatacaggcctgcaggggcaccgagctggactgtggtatcgagaccgac

SEQ ID NO: 249749 - DNA, 855 bp, synthetic construct
  misc_feature 1..855: note = Description of Artificial Sequence: Synthetic coding sequence
  source 1..855: mol_type = other DNA
atgatcgaaactgattctggagttgatgatgacatggcttgccacaaaatacctgtggaagctgattttttatacgcttatagtacagcgccaggatactattcatggcgcaattccaaagatgggtcttggttcatccagtcactttgtgcaatgttaaaacagtatgccgataaactagaattcatgcacatactcactcgcgtgaataggaaggtggccactgaatttgaatctttctcttttgacgccacttttcacgctaaaaaacagataccctgtatagtgtccatgttaactaaagaactctatttctatcatggaagtcctatggagaacactgagaactcggtggcctcaaaatcgataaaaaacctagaacccaaaatcattcatgggtctgaatctatggcttctggaatcagtcttgataattcatacaaaatggactaccccgagatggggctctgcatcatcattaataataagaacttccacaagtctacagggatgacaagtcggtccgggactgatgtagacgcagcaaacctgagagaaacttttaggaatctgaagtatgaagtccgcaataaaaatgaccttactcgggaagaaattgttgagctcatgcgcgatgtgtcgaaggaagaccacagtaagaggtcttctttcgtgtgcgtcctcctctcccacggagaggaaggaattatcttcggaactaatgggcctgtggatctgaaaaaaattacaaatttctttaggggggatcgctgccgatccctgactgggaaaccaaagctgttcattatccaggcttgccgcggaacagaactggattgtggaattgaaactgat

SEQ ID NO: 249750 - DNA, 855 bp, synthetic construct
  misc_feature 1..855: note = Description of Artificial Sequence: Synthetic coding sequence
  source 1..855: mol_type = other DNA
atgattgagactgacagcggagttgacgatgatatggcatgccacaagattcctgtggaagcagatttcctgtacgcatattctactgcaccgggctactacagctggagaaacagtaaagatggatcttggttcatccaaagcctgtgtgccatgctgaagcagtacgccgacaaacttgagtttatgcatatacttactagagtcaatcggaaagtcgctaccgaattcgaatcattttcatttgatgcgaccttccacgccaagaaacaaatcccttgcatagtctcaatgctcactaaagaactgtacttctatcatggcagccccatggagaacaccgaaaattccgtggcatcaaagtcgataaagaatctggaaccaaagattatccacggatccgaatcgatggcaagtgggatttccttggataacagctacaagatggattatcctgagatgggcctttgtatcattatcaataacaagaacttccataagtccactggcatgacgtcacgttcgggaacggatgtggacgccgcgaatctcagagaaacgtttcgtaaccttaagtatgaggtgcgcaacaagaacgatctgactagagaagaaatcgtggaactgatgcgggacgtgagcaaggaggatcattccaagcgctcctcgtttgtgtgtgtacttctctcacatggcgaagaaggaattatctttggaacgaacgggccggtggacctgaaaaagattaccaactttttccggggggatcggtgtcggtcgcttactggaaagcctaaactgtttatcatccaggcgtgtcgaggtaccgagctggactgcggtattgaaactgac

SEQ ID NO: 249751 - DNA, 855 bp, synthetic construct
  misc_feature 1..855: note = Description of Artificial Sequence: Synthetic coding sequence
  source 1..855: mol_type = other DNA
atgatcgaaaccgattcaggagtggatgatgacatggcctgccacaagatcccggtggaagcagacttcctgtatgcgtacagcactgcaccgggatactactcttggaggaactcgaaagatggatcatggttcatccagtcattgtgcgccatgcttaagcagtacgcggacaaactggaattcatgcatattctgacgagagtgaacagaaaggtggcgactgaatttgagtccttctcgttcgatgcgactttccacgccaagaaacagatcccctgtatcgttagtatgctcactaaggagctctacttctaccacggctcccctatggaaaacaccgagaactctgtggcgagcaagagtatcaagaatctcgaaccgaaaatcatccatggctcagagtccatggcttccggaataagcctggacaactcgtacaaaatggactaccccgagatgggtttgtgtatcatcattaacaacaagaacttccacaagtctactggaatgacttcccggtcgggcaccgatgtggatgcagccaacctgagagagactttccgcaatctgaaatacgaagtccgcaacaagaacgatcttacccgcgaggaaatcgtggaactgatgcgcgacgtgagcaaggaagatcactcgaagcgctcatcgttcgtgtgcgtcctgctgtcccatggagaagaaggaattatcttcggcaccaacgggccggtggatctgaaaaagattaccaactttttcagaggagatcgctgccggtccctgaccgggaaaccaaagctgttcatcatccaggcctgccgcggaaccgagctggactgcggaattgagactgac

SEQ ID NO: 249752 - DNA, 855 bp, synthetic construct
  misc_feature 1..855: note = Description of Artificial Sequence: Synthetic coding sequence
  source 1..855: mol_type = other DNA
atgatagaaacagactcaggagttgatgacgatatggcttgtcacaagattccagtcgaggctgactttttgtatgcttacagcactgccccaggctattacagttggcgtaactccaaggacggatcttggttcatacagagtctgtgcgctatgctgaagcagtacgccgataaactggagttcatgcacatattaacacgcgttaataggaaggtagcaaccgagtttgagtccttctcatttgacgccacctttcacgccaagaagcagattccctgtattgtgtccatgctgactaaggagctttacttctatcacggaagccccatggagaacacagagaattccgtggcatccaagtctattaagaatttggaacccaagataatacacggtagcgaatcaatggcctccgggatctccctggataactcttacaagatggactatcctgagatgggcctgtgcataatcatcaataacaagaatttccacaaaagtaccggaatgacatctcgatcaggtaccgacgtagatgccgccaacctgcgggagacctttcggaacttaaaatacgaggtgcggaacaagaacgacttgaccagggaggagatcgtcgaactgatgagagacgtctccaaagaggatcattccaaacgcagtagctttgtgtgcgtgctgctgtcccatggagaggagggcataattttcggcactaacggcccggtcgacctgaaaaagataaccaatttcttccggggtgaccgctgtcgctcactgacagggaaacctaaactgttcattatccaagcctgccgaggcacagagctagattgcggaatagagacagac

SEQ ID NO: 249753 - DNA, 855 bp, synthetic construct
  misc_feature 1..855: note = Description of Artificial Sequence: Synthetic coding sequence
  source 1..855: mol_type = other DNA
atgatagaaaccgacagcggagtcgacgacgacatggcctgccacaagattcctgtggaagccgacttcctgtacgcatattccacggccccgggatactactcatggcgcaactcaaaagacggatcgtggttcatccagtcgctctgcgcgatgctgaagcagtacgccgataagttggagtttatgcatatcctcactcgcgtgaacagaaaggtggcgaccgagtttgagtcattcagcttcgatgcaaccttccacgcaaagaagcagatcccctgcattgtctcgatgttgaccaaagaactgtacttctaccatggctcgccgatggaaaataccgaaaattcagtcgcatccaagagcatcaaaaatctggaacccaagatcatccacggatcagagtccatggcatcgggaatctccctggacaattcatacaagatggactacccggagatgggcctttgcatcatcatcaacaacaaaaactttcacaaatctactggcatgacttcgagatccggaaccgacgtcgacgccgctaacttgcgggaaactttccgcaatctcaagtacgaggtgcgtaacaagaacgacctgaccagagaggagatcgtggaactcatgagggatgtgtcgaaggaggatcattccaagcggtcctcgttcgtgtgcgtgctgctctcgcatggcgaggaaggcatcatcttcggcaccaacggtccggtggacctgaagaagatcactaacttcttcaggggggatcgctgccgctcccttaccggaaagccaaaactgttcatcattcaagcctgtcgcggaacggaacttgactgtgggatcgaaaccgac

SEQ ID NO: 249754 - DNA, 855 bp, synthetic construct
  misc_feature 1..855: note = Description of Artificial Sequence: Synthetic coding sequence
  source 1..855: mol_type = other DNA
atgattgagaccgactctggggtggatgacgatatggcctgtcacaaaatccctgtcgaggccgatttcctgtacgcatactccacagctccgggctactatagctggcggaattcgaaagatgggagctggttcatacagagcctttgtgccatgctgaagcagtacgcggataagctggagttcatgcacatattgacacgggtgaatcgcaaagtggctactgaattcgaatccttctctttcgatgcaacgtttcatgcgaaaaagcagatcccctgtatcgtgtccatgttgacaaaggagctctatttctaccatgggtctccgatggagaacacagaaaactccgtcgcttcgaaaagcatcaaaaacctggaacccaaaatcatccacggttctgaaagtatggccagcgggatctccttggataactcatacaagatggattatcctgaaatgggcctctgtatcattatcaacaacaagaatttccataagagcacaggcatgaccagtcggtcaggaaccgacgtggacgccgccaacctgcgggagaccttcagaaacctgaaatacgaggtgcgcaataagaatgatctgaccagagaagaaatcgttgagctgatgcgagacgtgtctaaagaggatcacagcaagcggtccagctttgtgtgtgtcctactatctcatggcgaagaaggtatcatattcggaactaacggccccgtggacctcaaaaaaattaccaatttcttccgcggcgatcgttgccgatctctgaccggcaagccaaagctcttcataattcaggcctgcaggggcacagagctcgattgtggtatcgagacagat

SEQ ID NO: 249755 - DNA, 855 bp, synthetic construct
  misc_feature 1..855: note = Description of Artificial Sequence: Synthetic coding sequence
  source 1..855: mol_type = other DNA
atgatcgaaacggacagcggggtggatgacgacatggcctgccacaaaattcccgtagaagccgattttctgtacgcatattcgactgcccctggctactactcctggcgaaattccaaagacgggtcttggtttatccagtcgttgtgtgccatgctgaagcaatatgccgataagctggagtttatgcatattctgaccagagtgaataggaaagtggctacagagtttgagagcttctccttcgatgcgacctttcatgcaaaaaaacagatcccctgtattgtctccatgctgacaaaggagctgtacttctaccatggctctcccatggaaaacaccgaaaacagcgtggccagcaagtcgattaagaaccttgagcccaaaatcatacacggatctgagagtatggctagcggcatatccctagacaattcctacaagatggactatcctgagatgggcctctgcattataattaacaataagaatttccataagagtactggtatgacctcacgctccggcaccgatgttgacgccgccaacctccgagaaacgttcaggaatctaaaatacgaggtgcgaaataagaatgacctgacaagggaggaaattgttgagcttatgcgcgatgtgagcaaggaggaccatagcaaacggagttcgtttgtgtgtgtgctgctcagtcacggagaggagggcatcattttcgggactaacggccctgttgacctcaaaaagatcactaacttttttcggggtgaccgttgtcggagcctgaccgggaagccaaagctctttataattcaggcatgtagaggtacggaactggactgtgggattgagaccgac

SEQ ID NO: 249756 - DNA, 855 bp, synthetic construct
  misc_feature 1..855: note = Description of Artificial Sequence: Synthetic coding sequence
  source 1..855: mol_type = other DNA
atgatagaaaccgattcaggtgtcgatgatgatatggcgtgtcataagattccagtggaagccgatttcttgtacgcatactcgaccgcaccaggttactacagctggcggaacagcaaggatgggtcgtggtttattcaaagcctttgcgccatgctgaagcaatacgcagataagctggagtttatgcatattcttacccgcgtcaatagaaaggtcgcaaccgaatttgaatcgttttcattcgatgccaccttccacgcgaaaaagcagataccttgtattgttagcatgctgacgaaggaactttacttctaccatggttcgccaatggaaaacaccgaaaactcggtggcctccaaatctatcaaaaaccttgaacctaagattatccacggatcggaatcgatggcatcaggcatttcgcttgataactcttacaaaatggattaccctgaaatgggactctgtataatcattaacaataagaattttcataagtcaaccggaatgacttccaggtcaggtaccgatgtcgatgcagccaacctgcgggaaaccttcaggaatctgaagtacgaggttaggaacaagaatgacctcactagagaagaaatcgtggagctgatgcgggatgtgtcaaaggaggaccattcgaaaaggtcctccttcgtgtgtgtgttgctctcgcatggggaagaagggattatctttggtactaatggtcccgtggacctcaagaaaatcactaactttttccggggagatcgttgtcgcagccttaccgggaagccaaagctgttcatcatacaagcatgcagaggaaccgagttggactgcggaatagaaactgat

SEQ ID NO: 249757 - DNA, 855 bp, synthetic construct
  misc_feature 1..855: note = Description of Artificial Sequence: Synthetic coding sequence
  source 1..855: mol_type = other DNA
atgatagaaaccgacagcggcgttgatgatgatatggcttgtcataagatcccagtggaagcggactttctgtacgcatattccaccgcccccggatactactcgtggcgtaatagcaaagatggaagctggtttatccagtcactttgtgccatgctcaagcaatacgcagataagctcgagttcatgcatattctcactcgtgtcaataggaaagtggcaactgaatttgagagcttctcctttgacgctacctttcatgccaagaaacagataccatgtatcgtctcgatgcttaccaaagagttgtacttttaccacggatctccgatggagaatacggaaaacagcgttgcctcaaaatccatcaagaatttggaaccgaagataattcatggttcagaatcgatggcttcgggaatctctctggacaactcctacaagatggattacccagaaatggggctttgcatcatcataaacaacaagaattttcataagagcaccggcatgacttcgcgctccggcactgatgtggatgcagccaacctgcgcgaaacctttagaaatcttaagtacgaggtgagaaacaaaaacgaccttactcgcgaagagatcgtggagcttatgcgtgacgtgtcaaaggaggatcactccaagcgctcgagcttcgtctgcgtgctgctctcgcacggtgaggaggggataatcttcggtactaacggcccagtcgatctgaagaagattactaacttctttcggggtgatagatgcaggtcgctgaccggtaagcctaaactgttcatcattcaagcgtgtcggggaacggaacttgattgtggcattgaaaccgac

SEQ ID NO: 249758 - DNA, 855 bp, synthetic construct
  misc_feature 1..855: note = Description of Artificial Sequence: Synthetic coding sequence
  source 1..855: mol_type = other DNA
atgattgagactgactctggggtggatgacgatatggcctgtcataaaatcccagtggaagctgacttcctatatgcatatagtaccgctccggggtattacagttggagaaactcgaaggacggcagctggttcatccagtccctctgtgctatgcttaagcaatacgctgataagcttgaattcatgcacattttaactcgagtaaaccgcaaggttgccacagaatttgagagtttttcttttgacgcaacctttcatgctaagaagcagatcccatgcatcgtctccatgttgaccaaagaactatacttttatcatgggtccccgatggagaacacggaaaactctgttgcctcaaagtcaatcaagaatctagagccgaagatcatccacggctcagagtcgatggcttcagggatctcactggacaactcctataagatggattatcctgagatgggcctctgcattattataaacaataaaaactttcacaagtctacgggtatgactagtcgctctggaactgacgtcgatgccgccaacttgcgtgaaacctttaggaatttgaaatacgaagtgcgcaacaagaatgatctgactcgggaggagattgtcgagctcatgagggacgtttctaaggaagaccactccaagcgtagctcgttcgtctgcgttctcctctcacatggagaggagggtataatattcgggaccaacggccccgtcgatctgaaaaaaattaccaactttttccgaggcgatcggtgtcgttctctgaccggtaagcccaagctgtttataatccaagcatgccgcggcacggaactcgactgcggtatcgagacagat

SEQ ID NO: 249759 - DNA, 855 bp, synthetic construct
  misc_feature 1..855: note = Description of Artificial Sequence: Synthetic coding sequence
  source 1..855: mol_type = other DNA
atgattgagactgactcaggagtggacgatgatatggcctgccacaagatccctgtggaggccgattttctctacgcttacagcaccgccccgggctactactcgtggcggaatagtaaggatgggtcttggttcatccagtcactgtgtgctatgttgaagcagtacgcagataagctggagttcatgcatatccttaccagagtgaatcgcaaggtcgccaccgaattcgaatccttttccttcgacgcgactttccacgcgaaaaagcagatcccttgcatcgtcagcatgcttaccaaggaactgtacttttaccacggatcaccaatggagaacacggaaaattccgtggcctcgaagtcgatcaagaacttggaaccgaaaatcattcatggatcagagtcgatggcaagcggaatctccctggacaactcgtacaaaatggactatccggagatggggctgtgtatcatcatcaacaacaagaacttccacaaatccaccggaatgacttccagaagcggaaccgacgtggatgccgcgaacctgcgcgaaaccttccggaacctgaaatacgaggtgaggaataagaatgacctcactcgcgaagaaatcgtggaactcatgcgggatgtttccaaggaggaccactcaaaaaggtcgagcttcgtctgcgtgctcctgtcgcatggtgaggaagggattatctttggcacgaacggtcccgtcgatctgaaaaagataaccaatttcttccgaggcgacagatgccgcagcctcactggaaagccaaagctcttcatcattcaagcatgccggggcactgaactggactgcggaatcgaaactgac

SEQ ID NO: 249760 - DNA, 855 bp, synthetic construct
  misc_feature 1..855: note = Description of Artificial Sequence: Synthetic coding sequence
  source 1..855: mol_type = other DNA
atgatcgaaacagattctggagttgatgacgacatggcgtgccataaaattcccgtggaggcagattttctttatgcatattcaacagcgccgggttattattcttggcgtaatagcaaggatgggagttggtttattcaatctttgtgcgcaatgttaaaacaatatgcggataagcttgagttcatgcacattttaaccagagtgaatcgcaaagtggccaccgagtttgagtcattcagttttgacgccacctttcatgcgaagaaacaaattccatgcatagtgtcaatgctgacgaaggagttgtatttctatcatggctcacctatggaaaacacggagaacagtgtagcgtccaaatcaataaaaaacctagaacctaaaatcatacacggatctgagtccatggcctccggaatttcccttgataactcctataaaatggattatccggaaatggggttatgcatcatcattaataataagaattttcataagtcgacaggtatgacatcaagatctggtactgatgtcgatgcagccaatcttcgagagactttccggaacttaaaatatgaagttcggaataaaaacgatttgacacgggaggagatcgtcgagctgatgagggacgtaagcaaagaggatcatagtaaacgtagttcttttgtgtgcgtactgttaagccatggtgaagaaggaatcatcttcggcacgaatggaccggtcgatttgaaaaaaattacgaatttttttcgtggcgatcgttgcagatctcttacggggaagcctaaattgtttatcattcaggcatgcagaggcacggaattggattgtggtatagagaccgac

SEQ ID NO: 249761 - DNA, 855 bp, synthetic construct
  misc_feature 1..855: note = Description of Artificial Sequence: Synthetic coding sequence
  source 1..855: mol_type = other DNA
atgatcgagactgactcaggagtggacgacgacatggcatgccacaaaattccggtcgaggccgactttctttatgcttattcgacggcccccgggtattactcgtggaggaactcaaaggatggatcttggttcatccagagcctgtgtgccatgcttaaacagtacgcagataagctggaattcatgcacatcctcaccagagtgaacagaaaagtggcgactgaattcgaatcattcagcttcgacgcaactttccatgccaaaaagcaaatcccatgtatcgtttccatgcttaccaaggaactgtacttctaccacggatccccaatggagaataccgagaactccgtcgcgtcaaagtcaatcaaaaacctggaacctaaaatcatccacggatccgaatcgatggcctcgggtatctcactggacaactcgtacaaaatggactacccggaaatgggactctgcatcattatcaacaataagaacttccacaaatccactggaatgacttcgcggtccggaactgacgtggatgcggccaaccttcgggagacgtttcgcaacctgaagtacgaggtgaggaataagaacgacctgacccgcgaagagattgtcgagcttatgagagacgtgagcaaagaggaccatagtaagaggtcgtcgtttgtgtgtgtgctcctgtcacacggtgaagaggggatcatcttcgggactaatggacctgtggacctcaagaaaatcaccaatttctttcgcggggatcgctgccgatcactgactggcaagccgaagctgttcatcatccaagcgtgccgcggtactgagctggactgcgggatcgaaaccgat

SEQ ID NO: 249762 - DNA, 855 bp, synthetic construct
  misc_feature 1..855: note = Description of Artificial Sequence: Synthetic coding sequence
  source 1..855: mol_type = other DNA
atgatcgaaactgattctggtgttgacgacgacatggcttgtcataaaatcccagtggaggccgattttctctacgcttacagcactgcacctggatactactcatggagaaattccaaggatgggtcgtggttcattcaaagtctctgtgcgatgttgaaacagtatgcagataaattggaatttatgcatatactcactcgtgttaatagaaaggtagcaacggagttcgaatcattctcgtttgacgcaacttttcatgcaaagaagcagattccatgtatcgtcagtatgctcacgaaagaattgtatttctaccatggcagtccaatggagaacacagagaattcagttgcatccaagtctatcaagaatttggaaccaaaaattatccatggaagtgaatcaatggccagtggaatttctctcgataattcatataagatggattatccagagatgggactttgcatcatcatcaataataaaaatttccacaagtctactggaatgacctcccgctcagggacagatgttgatgcagcgaatttaagagaaacctttcgtaatttgaagtacgaagtgaggaataaaaatgatttgactcgagaagaaattgttgaactgatgagagacgtctcaaaagaagatcattcgaagaggtcatcttttgtttgtgtacttctttcacatggtgaagaaggaattattttcggtactaatggaccggttgatctgaaaaaaatcacgaattttttcagaggagatagatgccgaagcttgacgggcaaaccgaagctctttatcatacaagcttgtcgaggaactgagttggattgtggaattgagactgac

SEQ ID NO: 249763 - DNA, 855 bp, synthetic construct
  misc_feature 1..855: note = Description of Artificial Sequence: Synthetic coding sequence
  source 1..855: mol_type = other DNA
atgatcgagactgatagcggcgtggacgatgacatggcctgccacaagataccagtggaggccgacttcctctatgcctactcgaccgctccggggtactattcctggaggaacagtaaggacggatcctggttcattcaaagtctgtgtgctatgctcaagcagtatgccgacaaacttgaattcatgcacatcctgacacgtgttaatcggaaggtagccacagagtttgagagtttttcattcgatgcaacattccacgcaaaaaagcaaattccatgtatagtttcaatgctgaccaaagagctctacttttaccatggtagtcccatggagaatactgagaatagcgtcgcatcaaaatccataaaaaacttggaaccgaaaatcatccacggatccgaaagtatggcctccgggatatctttggacaattcgtataaaatggactatccggaaatgggtctatgtattatcatcaacaataaaaatttccataagagcaccggtatgactagccgcagcggcacggatgtggacgccgctaacttgagggagacattccgaaatttgaaatacgaggttcggaataagaatgatctgacccgggaggagatcgttgaactgatgcgagatgtgagtaaggaggaccactcgaagcgcagcagcttcgtgtgcgttcttttgagccatggggaggaaggcattatattcggaacgaatggacctgtggatttgaaaaaaattactaatttctttcggggggacagatgtaggtccctgaccggcaagcccaagctgttcatcatacaagcctgcagaggcacagagctggattgtggaattgaaacagac

SEQ ID NO: 249764 - DNA, 855 bp, synthetic construct
  misc_feature 1..855: note = Description of Artificial Sequence: Synthetic coding sequence
  source 1..855: mol_type = other DNA
atgatcgaaactgactccggagtggatgacgacatggcctgccataagatacccgtggaagctgattttctttatgcttattcgactgcgccaggatactacagttggcggaattccaaggacggaagttggttcattcaatccctgtgtgctatgcttaagcagtatgcggacaaattggaattcatgcatatcctcacccgcgtgaatcgtaaagtcgccacagaattcgagtccttctcttttgatgcaaccttccatgcaaaaaaacaaatcccctgcatagtcagcatgctcactaaggagttgtacttctaccacggatccccgatggaaaataccgaaaacagcgtggccagcaagtcgatcaagaatctggaacctaagattatccatggatctgaatcaatggctagcggcatcagcctggacaactcctacaagatggactaccctgagatgggtctgtgcataataattaataataagaattttcataagtcgaccggaatgactagtcgctccgggacagacgttgatgcggcgaacctcagagagactttccgtaacttgaagtacgaagtgcgcaacaagaacgacctcaccagggaagagattgtggaactgatgcgggatgttagtaaggaggatcactcaaagcggtcttctttcgtgtgcgtcttactctcccacggagaggaggggatcattttcggcactaacggccctgtcgacttaaagaagataacgaattttttcaggggggaccgttgcagatccttgactgggaagcctaagttgtttataatacaggcatgcaggggcaccgagctggactgcgggattgagaccgat

SEQ ID NO: 249765 - DNA, 855 bp, synthetic construct
  misc_feature 1..855: note = Description of Artificial Sequence: Synthetic coding sequence
  source 1..855: mol_type = other DNA
atgatcgagacagatagcggagttgacgacgatatggcctgccacaaaatcccagtcgaggcagactttttatatgcatacagcaccgccccagggtactatagctggaggaattcaaaggacggctcctggtttatccagagtctttgtgcgatgctgaagcagtacgcagacaagctggagtttatgcacatcttgactcgagtcaataggaaggtggccaccgagtttgagtcgttcagcttcgatgctacatttcatgccaagaaacagatcccctgcatcgttagcatgctaacaaaggaactctacttttatcacgggtctcccatggaaaacaccgaaaattccgttgcctccaagtcgattaaaaacctggagccaaaaataattcacggctctgagagcatggcttcaggtatcagccttgacaattcctacaagatggactacccggaaatgggcttgtgtattatcatcaataacaagaacttccacaagagtaccgggatgacgagcaggagcggcactgatgtcgatgcagcaaacctgcgagagaccttccggaatctgaaatacgaagttaggaacaaaaacgatctgacccgcgaggaaattgttgagttgatgcgcgatgtctccaaggaggatcattccaagcggtcctcattcgtgtgtgtgttgctgagccatggcgaagaaggtattatttttggaactaatggccctgtagaccttaagaaaatcacaaatttctttagaggtgatcggtgccggtcccttaccggcaagcccaagctgttcatcattcaagcgtgtagaggaaccgaactcgactgcggtattgaaacggac

SEQ ID NO: 249766 - DNA, 855 bp, synthetic construct
  misc_feature 1..855: note = Description of Artificial Sequence: Synthetic coding sequence
  source 1..855: mol_type = other DNA
atgatcgagactgactcaggagtggacgacgatatggcctgtcacaaaattccggtcgaggcagactttctttacgcttactcgaccgctccaggatactatagctggaggaacagcaaggacggatcgtggtttatccagtccctgtgtgccatgcttaaacagtacgccgacaaacttgaattcatgcatatcctcacccgggtcaatcggaaagtggctactgaattcgaatcattttcatttgacgcaactttccacgctaagaagcagattccctgcatcgtgagcatgttgacgaaggaactgtacttctaccacgggtcgccgatggagaacaccgaaaattccgtggcatccaagtcaattaagaacctggaaccaaagatcatccacgggtcagagtccatggctagcggaatctcgcttgataattcatacaaaatggactacccagagatgggcctgtgcattatcatcaacaacaaaaacttccataagtccacgggaatgacttccaggagcggcaccgacgtggatgcggccaatcttcgcgaaactttccggaacctgaagtatgaggtgcggaataagaacgacctgaccagggaagagatcgtggagctgatgcgggatgtcagcaaggaagatcatagcaagcgctcctcgttcgtttgcgtgctcctgtcccacggcgaagaggggatcatctttggaacgaacggaccggtggatctcaagaaaatcactaatttctttcggggagacagatgcaggtcgctgacgggcaaacctaaactctttatcatccaggcctgccggggaaccgagctggactgtggaatcgaaactgat

SEQ ID NO: 249767 - DNA, 855 bp, synthetic construct
  misc_feature 1..855: note = Description of Artificial Sequence: Synthetic coding sequence
  source 1..855: mol_type = other DNA
atgattgagacagatagcggggtagatgatgacatggcttgtcacaagatcccagtggaagctgatttcttgtatgcctactccacagcacctgggtactatagctggcggaactccaaagacggctcttggttcattcagtctctgtgcgcaatgctgaaacagtatgccgataagcttgagttcatgcatatcctcacccgagtaaaccggaaagtggctacagaatttgagagtttcagtttcgacgctacattccacgcaaagaagcagatcccttgtatcgtctctatgctgacaaaggaactttacttttaccatggctcaccaatggaaaatacagagaatagtgtggcttccaagagcattaaaaacctggaacctaaaattatacacggatccgaatccatggcctctgggattagtttagataatagttataagatggattatcctgaaatgggcctgtgtatcatcatcaataacaagaactttcataagtcaactgggatgacctccaggtctggcacagatgtagatgccgccaatctccgtgaaacgtttagaaatttaaaatacgaagtacggaacaagaacgacctaacccgggaagaaatagtagagctgatgcgagacgtctccaaagaggatcattctaagagatccagttttgtgtgtgtactcctgagccatggcgaggaaggaattatttttggcaccaacggcccggtggatctgaagaagatcaccaactttttcaggggcgatcggtgtcgctccctgaccgggaaaccaaagcttttcattatccaggcctgtcgaggtacagagctggactgtggaattgagactgat

SEQ ID NO: 249768 - DNA, 855 bp, synthetic construct
  misc_feature 1..855: note = Description of Artificial Sequence: Synthetic coding sequence
  source 1..855: mol_type = other DNA
atgatcgagacagacagtggagtggacgatgacatggcttgccataagattccagtggaagccgacttcttgtatgcttatagcactgcgcccggttattacagttggagaaattcaaaggacgggagttggtttatacagtccctgtgtgctatgcttaagcagtacgctgacaaattagagtttatgcacattctcaccagggtgaaccgcaaggtggctactgagttcgaatcattctcatttgacgctacattccacgccaaaaagcagattccttgtatagtatccatgctgactaaggagctgtatttctatcatggttctccaatggagaacaccgagaacagtgtggcctccaaaagcataaaaaacctggaaccaaagatcattcatggcagtgaatccatggcctcaggcatcagcttggataattcttacaaaatggattacccagaaatgggtctgtgcatcatcattaataataaaaatttccacaagagtactgggatgacctctcgaagcggcacggacgtggacgccgcaaacctgcgagaaacctttaggaatctaaagtacgaggtgaggaataagaatgacctcacacgcgaagagatcgtggagctgatgagggacgtctccaaggaggatcactctaagaggtcgtccttcgtctgcgtgcttttgtctcatggagaggaggggatcatattcggcaccaatggtccagttgacctcaaaaagatcacaaacttcttcaggggcgatcgttgcagaagtctaaccggaaagccgaagctcttcatcatccaggcctgtcgaggaacagaactggactgtggaatcgagaccgat

SEQ ID NO: 249769 - DNA, 855 bp, synthetic construct
  misc_feature 1..855: note = Description of Artificial Sequence: Synthetic coding sequence
  source 1..855: mol_type = other DNA
atgatcgaaaccgactccggcgtggatgacgacatggcgtgccacaagattccggtggaggcggactttctctacgcctactcaactgcgccagggtattactcgtggaggaatagcaaggacggatcctggtttatccagtcgctgtgcgccatgctcaagcagtacgccgataaacttgagttcatgcacattcttactagagtgaatcggaaggtcgctaccgagtttgaatcgttctcattcgatgcgaccttccacgccaagaagcagatcccatgcattgtctccatgttgacgaaggagctctacttctatcacggctccccaatggagaacaccgaaaactccgtggcatcaaaatcgataaagaatctggaaccgaaaatcatccatggatcggagagcatggcctcagggatctcactggacaatagctacaagatggattacccagagatgggactgtgcataatcatcaacaacaagaacttccataagtccaccggaatgacttcgcggtcgggaaccgacgtcgatgccgctaacctgagggaaaccttccggaatctcaaatacgaggtccgcaacaagaatgacctcaccagggaggagatcgtcgagctgatgcgagatgttagcaaggaagatcactcgaaacggagctctttcgtctgcgtccttttgtctcacggggaggaaggaatcattttcggcaccaacggacctgtggacctgaaaaagatcacgaacttctttcgcggagatcgctgcagatcgctcactgggaaacccaaactgttcatcattcaggcctgccgcggaaccgaactggattgtgggatcgagactgac

SEQ ID NO: 249770 - DNA, 855 bp, synthetic construct
  misc_feature 1..855: note = Description of Artificial Sequence: Synthetic coding sequence
  source 1..855: mol_type = other DNA
atgatcgaaactgacagcggggtcgacgacgacatggcctgccacaagatcccggtcgaagctgacttcctgtacgcctactcgactgcaccggggtactactcatggcggaactcgaaggacggctcctggttcatccaatccctgtgcgctatgctcaagcagtacgcagacaaactcgagttcatgcatattctgacgcgcgtgaatcgcaaggtcgcgactgagttcgagagcttctcgttcgatgcaactttccacgcgaagaagcagatcccatgcattgtgagcatgcttacgaaggagctgtacttctaccacggaagcccgatggagaacacggagaactcggttgcgtcgaagtctattaagaatctggaacctaagataatccacggatccgagagcatggcctcgggcatcagccttgataacagctataagatggactacccggagatggggctgtgtatcatcatcaataacaaaaacttccataagtccaccgggatgacctcaagatcaggcactgatgtggacgcggcaaatttgcgggaaacctttcggaatctgaagtacgaggtgaggaataagaacgacctgacgagagaagagattgtggagctcatgcgcgacgtctcgaaggaggaccactcaaagcggtcgagctttgtgtgtgtgctgctgtcacacggagaagaaggaatcattttcggaaccaacggaccggtcgacctcaaaaagatcaccaacttctttcggggtgaccgttgccgctccctgaccggaaagccaaaactgtttatcatccaggcttgccgcgggaccgaacttgactgcggcatcgaaaccgat

SEQ ID NO: 249771 - DNA, 855 bp, synthetic construct
  misc_feature 1..855: note = Description of Artificial Sequence: Synthetic coding sequence
  source 1..855: mol_type = other DNA
atgattgagactgattcgggtgtggacgatgatatggcatgccacaagattcccgtggaagctgattttctttacgcatattccactgccccaggatactattcatggcgtaattccaaggacggctcgtggtttatccaatcattgtgtgcaatgctgaagcaatacgcagataaacttgaattcatgcatattctcactcgggtgaataggaaggtcgccacggaatttgaatcgttcagctttgacgcaacgtttcatgcaaagaagcaaatcccttgcatcgtctctatgcttactaaagagctgtacttttaccatggttcaccaatggagaataccgaaaattcagtggcatccaagtccattaagaatctcgaaccgaagattattcatggctcagagtcgatggcaagcggcatatccctggataactcctacaagatggactaccctgaaatgggactttgcattatcattaacaataagaacttccataaaagcacggggatgacgtcaaggtccggcactgatgtggatgcagccaacctgcgcgaaacctttagaaacttgaagtacgaagtgagaaacaaaaatgaccttaccagagaagaaatcgttgagctgatgagagacgtcagcaaggaagatcacagcaaacgcagctcattcgtgtgtgtgctgctgtcacacggggaggaaggtatcatctttggcaccaacggccctgttgatctcaagaagatcactaatttctttcgcggagacagatgccggagccttaccggaaagccaaagctgttcataattcaagcgtgccgcggaactgaactggactgtggaattgaaacggat

SEQ ID NO: 249772 - DNA, 855 bp, synthetic construct
  misc_feature 1..855: note = Description of Artificial Sequence: Synthetic coding sequence
  source 1..855: mol_type = other DNA
atgatcgaaactgactcaggagtggatgacgatatggcttgtcacaagattccagtggaagccgatttcctctatgcttattcaaccgccccagggtactactcctggcgaaattccaaagacggaagttggttcatccagagtctgtgtgcaatgctgaagcagtacgctgacaaactcgagttcatgcacattctgacccgggtaaataggaaggttgctacggagtttgaaagcttcagcttcgatgccacttttcacgcaaagaagcagatcccatgtatagtatcaatgctgacaaaggagctgtacttttaccacggatccccgatggagaacacggaaaactccgtcgccagtaagtccatcaagaatttggagcccaagatcatccatggttctgagtcaatggcttctggcatcagcttggacaattcgtataaaatggactatcctgagatgggactttgcattataatcaataacaagaactttcataaatcaaccggcatgacatcaaggagcggaactgacgtcgacgccgctaacctccgcgagacctttcggaacctcaagtatgaagtgagaaataaaaatgatttgacacgtgaggagatagtggagttgatgagagacgtgtcaaaggaggaccattctaagcgcagttccttcgtgtgcgtgctcctctcccacggggaagaaggaataatttttggaacaaacggaccggtggacctgaagaaaatcaccaacttcttccgcggcgataggtgcagatcccttaccggcaagcctaagctgttcatcatacaggcttgccgcggcacagagctcgactgcggtattgagaccgat

SEQ ID NO: 249773 - DNA, 855 bp, synthetic construct
  misc_feature 1..855: note = Description of Artificial Sequence: Synthetic coding sequence
  source 1..855: mol_type = other DNA
atgatcgagactgacagtggcgtggatgatgacatggcttgccataagatccctgttgaggcagactttctttacgcctatagcaccgcccccggatactactcctggcggaatagtaaagatggatcgtggtttattcaaagtctgtgcgctatgctaaagcaatatgccgataaacttgagttcatgcatattctcacacgagttaaccggaaagttgccaccgaatttgaaagcttttcgtttgacgccacgtttcacgctaaaaagcagatcccatgtattgttagcatgctgacgaaagagctgtatttctaccacggctctccaatggagaatacagagaactcagtcgcgtcaaagtctattaaaaacctcgagccaaagatcattcacgggtctgagtccatggcctccgggatctctttggacaacagctataagatggactatccagagatgggactgtgcattattatcaacaataagaattttcataagtcgactggaatgacaagcaggagcggaacggacgtggatgcagccaatcttcgggagacctttcggaacctgaagtacgaggtaaggaacaagaatgacctgactagggaagaaatcgtagaacttatgagagacgttagcaaggaggatcactctaagcgaagcagctttgtatgcgtcctactctcacacggagaggaggggataatattcgggaccaacgggcccgtcgatctgaagaagatcactaatttctttagaggcgataggtgcaggagcctgacgggcaagccaaaactttttataattcaggcatgtcggggtacggagcttgattgtggtatagagactgac

SEQ ID NO: 249774 - DNA, 855 bp, synthetic construct
  misc_feature 1..855: note = Description of Artificial Sequence: Synthetic coding sequence
  source 1..855: mol_type = other DNA
atgatcgagacggattccggcgtcgatgatgacatggcctgccacaagatcccggtggaggctgactttctgtacgcttactcgactgctccggggtactactcctggcgcaattctaaggacggatcatggttcatccagtcgctgtgcgctatgctgaagcagtacgctgacaaacttgagtttatgcacattctcacgcgagtgaaccggaaagtggccactgaattcgagagcttctcatttgacgcgactttccatgcgaagaagcagattccgtgcatcgtgtccatgctgaccaaggagctctacttttaccacgggtcgccgatggaaaataccgaaaattcagttgcgtcaaaatccatcaagaacctggagcctaagatcatccacgggtcagaatccatggccagcgggatcagccttgataactcatacaagatggactacccggagatgggtctgtgcatcatcatcaacaacaagaactttcacaagtccaccggaatgacgtctcgctcgggcactgacgtggacgccgccaacctgcgggagactttcagaaatctgaaatacgaggtgcggaacaagaatgacttgactagagaagaaatcgtggagctgatgcgcgacgtgagcaaggaggaccactccaagcggtcatcgttcgtctgtgtgctgctgtcacatggggaagaaggtatcattttcgggaccaacggtcccgtggatcttaagaaaatcaccaacttcttccgaggagacagatgtcgctcgctgaccggaaaaccaaagctcttcattatccaggcgtgcaggggaacggagctggattgcggcatcgaaaccgac

SEQ ID NO: 249775 - DNA, 855 bp, synthetic construct
  misc_feature 1..855: note = Description of Artificial Sequence: Synthetic coding sequence
  source 1..855: mol_type = other DNA
atgattgagacagattctggcgttgatgacgatatggcatgtcataagattcccgtggaggccgactttctgtacgcatattcaactgcaccagggtattattcttggcgcaatagcaaggatggttcctggtttatacagtcactgtgtgcgatgttgaagcagtacgccgacaagctggaatttatgcacatcctgaccagagtgaacagaaaggtggcgacagagtttgagagtttttccttcgacgccacttttcacgctaaaaaacagatcccatgcatcgtatctatgctcactaaggagctttacttttaccatggaagccctatggagaacaccgagaattcagtcgcgagcaagtccattaaaaaccttgagcccaagatcatccatggttccgaatctatggcctccggaatttctctcgataacagctacaaaatggattacccggaaatgggactttgtatcattatcaataacaaaaacttccacaagtcaactgggatgactagtcgcagcggcaccgatgtggacgctgccaatctgagagaaacgtttcggaatttaaagtatgaagtccgtaataaaaatgatttgaccagggaggagatcgtggagctaatgcgtgacgtgtcgaaggaggatcactccaaacggtcatccttcgtgtgcgttctgctctctcacggtgaggagggaatcatctttgggaccaatggtcccgtcgacctcaagaaaataacaaatttttttcggggagatagatgccgctcgctgactggtaaacccaaattgtttattatccaggcttgcaggggaactgaactggactgtgggatcgagacagac

SEQ ID NO: 249776 - DNA, 855 bp, synthetic construct
  misc_feature 1..855: note = Description of Artificial Sequence: Synthetic coding sequence
  source 1..855: mol_type = other DNA
atgatcgaaaccgactcgggagtggatgacgacatggcatgccacaagatcccggttgaggcagattttctctacgcgtactcgacggcgccagggtactacagctggcggaactccaaggatggaagctggttcattcaatctctgtgtgctatgctcaagcaatacgccgacaagctggaattcatgcatatcctcactagggtgaatagaaaggtcgcaactgaatttgaatcgttctccttcgatgccaccttccacgctaaaaagcagatcccgtgcattgtgtccatgctgactaaggaattgtacttctatcatggatctccgatggagaacaccgaaaattcggtggcctccaaaagcatcaaaaatctggaaccaaagattattcacggctcggaaagcatggcctcagggatctcgctcgataactcctacaaaatggattacccggagatgggactgtgtattatcatcaataacaagaacttccacaagtcgaccggaatgacctcgcggtccggaactgatgtggatgccgcaaatcttcgcgaaactttccgcaacctgaagtacgaggtgcgcaataagaacgacctgacgcgagaagaaatcgtggagctgatgagagacgtgtcgaaggaggaccacagcaagagaagcagcttcgtttgcgtgctgctgtcacacggagaagagggaatcattttcgggaccaacggcccggtcgacctgaagaaaatcacgaatttcttccgcggagatcgctgccggtcgctgaccggaaagccgaaactgttcatcatccaggcctgcagggggactgagctggattgcggaatcgaaaccgat

SEQ ID NO: 249777 - DNA, 855 bp, synthetic construct
  misc_feature 1..855: note = Description of Artificial Sequence: Synthetic coding sequence
  source 1..855: mol_type = other DNA
atgatcgaaactgactcgggagtcgacgatgatatggcctgtcataagatccctgtcgaagcagattttctgtacgcctactccaccgcaccgggttactactcctggagaaactcaaaagacgggagctggtttatccaatcgctgtgtgcaatgctcaaacagtacgccgacaagctcgaattcatgcacatacttactagagtcaatcgcaaggtcgctaccgaatttgaatccttttcatttgacgcgactttccatgcaaagaaacaaattccgtgcatagtgtcgatgctgacgaaggagctttacttctatcacggttcgcctatggaaaacactgaaaactcggtggcatccaaaagcattaagaatctggagcctaagattatccacggatctgaaagcatggcgtcaggcatttcacttgataacagctacaaaatggactatccggaaatgggtttgtgcattatcattaacaataagaacttccataagtcaacggggatgactagcaggtctggcaccgacgtcgatgcggcgaaccttcgggaaacctttaggaatctgaagtacgaggtgaggaacaaaaacgatcttacccgagaggaaattgtggaactgatgagagatgtgtctaaagaggatcattcaaagagatcatccttcgtgtgcgtgctcctctcgcatggtgaggaggggattatctttggtaccaacggaccggtggatctgaagaagattaccaactttttccgtggggaccggtgtaggagcctgactggcaaaccaaagctgtttatcattcaggcatgtcgcggaactgaactcgattgtgggattgagactgat

SEQ ID NO: 249778 - DNA, 855 bp, synthetic construct
  misc_feature 1..855: note = Description of Artificial Sequence: Synthetic coding sequence
  source 1..855: mol_type = other DNA
atgatcgagactgattcgggtgtcgatgacgacatggcgtgtcacaaaatcccggtggaggccgacttcctgtacgcgtatagcaccgcgccgggatactactcgtggaggaactcgaaggacggctcgtggtttatccaatctctctgcgcaatgctcaagcagtacgcggataaactggagtttatgcatatcctgaccagggtcaaccgcaaggtcgctaccgaattcgaatcgttctcctttgatgcaactttccatgcaaagaagcagatcccgtgcattgtctccatgctgaccaaggagctgtacttttaccacggatcgccgatggaaaacaccgagaatagcgtggcctcgaagtcgatcaaaaacctggaacctaaaatcattcacgggtccgaatcaatggcctccggcatctctctggacaatagctacaagatggattacccggagatgggactgtgcatcattatcaacaataagaacttccacaagagcactggcatgacctcaagatcaggaactgatgtggacgcggcgaacctgcgggaaacttttcgcaacctgaaatacgaagtgaggaataagaacgatttgactcgcgaagaaatcgtcgaactgatgcgggacgtcagcaaggaggatcattcgaagcgctcctcgttcgtgtgcgtgctgctctcgcacggagaggaaggaattatcttcggaaccaacggacctgtggacctcaagaagatcacgaacttcttcagaggagacaggtgtaggtcactgaccggtaagccgaagctgttcattattcaggcctgtcggggcacggaactggattgcggcatcgagactgac

SEQ ID NO: 249779 - DNA, 855 bp, synthetic construct
  misc_feature 1..855: note = Description of Artificial Sequence: Synthetic coding sequence
  source 1..855: mol_type = other DNA
atgatcgaaactgactcaggagtggatgacgacatggcttgccataagatcccggtggaagcggatttcctgtacgcttactcgaccgctcctggctactactcgtggcggaactcgaaggacggctcgtggttcatccagagcctgtgcgcgatgctgaagcagtacgctgacaagctggaattcatgcacatcctgacccgcgtgaaccggaaggtcgcaaccgagtttgagagcttctccttcgatgccactttccatgcaaaaaagcagatcccgtgcattgtgagcatgctgactaaggaactgtacttttatcacgggagcccgatggagaatactgagaacagcgtggcgtccaagtccatcaagaacctggaaccaaaaatcatccacggcagcgaatcaatggctagcggaatttccctcgacaacagctacaagatggactacccagaaatgggactctgcattatcatcaataacaaaaacttccacaagtccactggaatgacgtcgaggtcgggaaccgacgtcgatgctgctaacctccgcgaaaccttccgcaacctgaagtacgaggtgcgaaacaaaaacgacctcacccgcgaagagatcgtggagctgatgcgggatgtttcaaaggaagatcactccaagcggtcatcgttcgtgtgcgtcctgctgtctcatggagaggaaggtatcatttttggtacgaacggaccggtggatctcaaaaagattaccaacttcttccgcggagatcggtgcaggtccctgaccggtaagcccaaacttttcatcattcaggcctgtcggggcactgaattggactgcggaatagagactgat

SEQ ID NO: 249780 - DNA, 855 bp, synthetic construct
  misc_feature 1..855: note = Description of Artificial Sequence: Synthetic coding sequence
  source 1..855: mol_type = other DNA
atgattgaaacggactcaggggtggacgacgacatggcgtgtcataaaatacctgtcgaagctgattttttgtacgcctattctacggcgcctggctactatagctggagaaattccaaagatggctcgtggtttatccagagtttgtgcgctatgctgaagcagtacgctgacaagctggagttcatgcacattcttacgagggtgaataggaaggttgcaactgaatttgaatccttttcctttgatgctacgtttcacgccaaaaagcagatcccctgtatagtatcaatgctgactaaagaactttatttttaccacgggagccccatggaaaacacagaaaattctgtagcctccaagagcattaaaaacttagaacctaagatcatccatgggtccgaaagcatggcctctggtatctctctggacaactcctataagatggattatccagagatgggattgtgcatcattatcaacaacaagaacttccacaaatctaccggaatgacaagccgcagcggcacagacgtagacgccgcaaacctccgggaaacatttcgcaacttgaagtatgaagtccgaaacaaaaatgatctgacaagagaagaaattgttgagcttatgcgggacgtcagtaaagaggaccatagcaagcgctcctctttcgtgtgtgtactgttatcccacggagaggagggaatcattttcggaacaaatggccctgtcgatcttaaaaaaatcacgaacttctttaggggagatcgttgtcgctcgttgaccggcaagcctaagctgttcattatacaggcctgccggggcactgaactggattgtggcattgagacagat

SEQ ID NO: 249781 - DNA, 855 bp, synthetic construct
  misc_feature 1..855: note = Description of Artificial Sequence: Synthetic coding sequence
  source 1..855: mol_type = other DNA
atgatcgagacagacagtggcgtggacgatgacatggcatgtcataaaatccccgtggaggcagactttctatatgcctactccacagcccctggttactattcctggcgcaactcaaaagatgggtcctggttcatacagtctctctgtgctatgctgaagcaatatgcggacaagctggaattcatgcacattctgacgcgcgttaaccgcaaggttgctaccgagtttgagagcttttctttcgacgccaccttccacgcaaagaagcagatcccttgtatcgtcagcatgctgactaaggagctctatttctaccatggaagccccatggagaacacggagaatagcgtagctagtaagtcaatcaagaatctggaacccaagatcatccatggtagcgagagcatggcctcaggaatctcccttgacaactcatataaaatggactacccggagatgggactctgcattattattaataataagaattttcacaaaagcaccggtatgacgtcccgctcaggaaccgacgtggatgcagcaaacctgagagagacttttcgaaatcttaagtacgaggtccggaacaaaaacgatttaacccgggaggagattgtcgaactgatgcgggatgtgtccaaagaggatcattctaaacgaagtagtttcgtatgtgtgctgcttagccacggtgaagaagggatcatcttcggaactaacggtcctgtcgacctgaagaaaattaccaatttcttcagaggggatcggtgtcgtagcctgaccgggaagcccaagttgtttattatccaggcctgcagaggaacggaactagactgtggaattgaaaccgat

SEQ ID NO: 249782 - DNA, 1845 bp, synthetic construct
  misc_feature 1..1845: note = Description of Artificial Sequence: Synthetic coding sequence
  source 1..1845: mol_type = other DNA
atgagagcccttctactccttggattcctccttgtgagtctggaatccactctctcgataccaccatgggaagccccaaaagaacacaaatataaagccgaggaacatactgtggtcctcacagttacaggggaaccatgtcactttccttttcagtatcaccggcagctctaccacaagtgtacacataaagggaggcccgggccccagccctggtgcgccactactcctaacttcgaccaggatcagaggtgggggtattgtctagaacctaaaaaagtgaaagatcactgttcaaaacactcgccttgtcagaaaggggggacatgcgtgaacatgccttctggacctcattgtttgtgtccccagcatctgactggaaaccactgtcagaaagaaaaatgctttgagccacagctcttgcgatttttccataaaaacgaaatttggtataggacagaacaggctgcggtggccaggtgtcaatgtaagggacctgatgctcactgccagcgccttgcttctcaagcctgtcggacaaacccctgcctacatggagggcggtgccttgaagtagaagggcaccggctctgtcattgcccagttggatatactggggctttctgtgatgtggatacaaaagcctcatgctatgatggacgcggactgtcataccggggactggcccggacaactctcagtggagcaccatgccagccctgggctagtgaagccacatacagaaatgttactgccgaacaggcgaggaattgggggttgggaggacatgcattttgccggaatccagataacgatatacgcccctggtgttttgtactgaatcgagatcggttgagttgggaatactgtgatttagctcaatgccagacacccactcaagccgcccccccaacaccagtctcccccagactccatgtgcccctgatgccagcacagcctgccccccccaaaccacagcctacaactcgcactccaccacagtctcagactccaggagctttacctgcaaagagagaacagccaccatctctaacacgcaatgggcccctttcttgcggacagcggctgcggaaaagtctatcctccatgactcgggttgtgggaggacttgttgcactacggggggcacatccctatatagcagctctgtattggggacactctttctgcgcgggatctctcattgctccctgctgggtcttaacagctgcacattgtctacaggaccgccccgcacctgaagatctcacagttgttctgggacaggagagaagaaaccactcctgcgaaccctgtcagacacttgctgtccgctcttatcggctacacgaagccttttccccagtttcctaccagcatgatctcgctcttctccgactccaggaagatgccgacgggtcctgtgctctcctttcaccctatgtccagcccgtgtgtcttccctccggagctgccaggccctcggaaactactctctgtcaggtcgcggggtggggacatcagtttgaaggagctgaagaatatgcttccttcctgcaggaagcccaggtgccttttctgtcactcgaaagatgttcagcccctgatgtgcatggatccagtatcttacccggaatgctctgtgccgggttcctcgaaggaggaacagatgcttgtcagggggattctgggggacctctggtatgtgaagatcaggctgcagaacgccggctcactctacaggggatcatttcttggggatccggatgtggagataggaataaacctggagtttacacggatgtcgcttattatcttgcctggatcagagaacacactgtttct

SEQ ID NO: 249783 - DNA, 1845 bp, synthetic construct
  misc_feature 1..1845: note = Description of Artificial Sequence: Synthetic coding sequence
  source 1..1845: mol_type = other DNA
atgagggccctcttgctgcttgggttcctgctggtgagcctcgagagcaccctgtcgataccaccctgggaggcaccaaaagagcataaatacaaagcggaggagcatacagtcgtcctgacggttacaggggaaccatgccacttcccttttcaatatcataggcagttataccacaaatgtacacacaagggaaggcctggcccacagccatggtgtgcaacaacacccaattttgatcaggaccagaggtggggatactgccttgagcccaagaaagtgaaggatcactgttcaaagcactcaccttgccaaaaaggaggaacctgcgtcaatatgccttcaggcccacactgtctgtgcccgcaacacctgactggcaatcactgccaaaaggagaagtgtttcgagccccagctcttgagattctttcacaaaaatgagatttggtaccgcaccgagcaagccgctgtcgcccgctgtcaatgcaaaggaccagatgcacactgccagaggctcgcatcacaagcttgccgaacaaacccttgcttacatgggggcagatgcctcgaggtagagggccacagactgtgtcactgtccggtcggctacactggagcattttgcgatgttgatactaaggctagttgttatgatggacgggggctgtcgtaccgcggtctcgcaaggaccaccctgtcgggagctccatgtcagccttgggcaagcgaggcaacgtatagaaacgttaccgccgagcaggctcgcaactggggactgggcggccatgcattctgcaggaaccctgataacgatatcagaccttggtgtttcgttttgaatcgggatcggctgagctgggaatactgcgatttagctcaatgccagacgcccacacaggcagccccacctaccccagtttctccgagattgcatgtcccactgatgccagcacagcctgcccctccaaagccacagcccaccacccgcactcccccgcagagtcagaccccaggcgctctgcccgcaaagcgggaacagccaccaagcctaacgcggaacggccctctgtcttgcggtcagagactgaggaaaagtttaagttccatgacaagggtggtgggaggacttgtggcgttgcggggcgcccacccctacattgctgcactgtactggggacactccttctgtgcaggatcactcatcgcaccctgctgggttcttactgccgcccactgtctgcaggatcgccccgcaccagaagatctgaccgtggtactcggccaagagcggaggaaccattcttgtgaaccatgccagaccctcgccgtgcgctcctacaggctccacgaggccttttctccagtaagttaccaacacgatctcgcacttctgagactgcaagaggatgctgacggctcctgtgccctcttgtctccctatgtgcagccagtctgccttccaagtggggcagcccgcccaagcgaaacaaccctttgtcaggtggctggatgggggcaccagttcgaaggtgcggaagaatacgcatcctttctacaggaagctcaggtgccatttctgtccctggaaagatgcagcgcccccgatgtgcacggaagcagcattcttcccggtatgctttgcgcaggctttcttgaaggcggaaccgacgcttgccagggggacagtgggggcccactggtttgcgaggaccaggcagccgagaggaggctcactttgcagggtattatctcttggggctctggatgcggcgataggaataaacctggcgtgtatacagatgtggcatactatctagcatggataagagagcacacagtgtcc

SEQ ID NO: 249784 - DNA, 1845 bp, synthetic construct
  misc_feature 1..1845: note = Description of Artificial Sequence: Synthetic coding sequence
  source 1..1845: mol_type = other DNA
atgagggcactgctcctgctcgggtttcttcttgtgtccctcgaatcgaccctgtcaattcctccttgggaggccccgaaagagcataagtacaaggcggaagaacacacggtggttctcactgtgaccggggaaccttgtcatttcccattccagtaccaccgacagctttatcataagtgcacccataaggggcgtcctggcccacagccgtggtgtgcaaccacgccaaacttcgaccaagatcagcgctggggatactgtcttgaaccaaaaaaggtgaaagatcattgctcgaagcattcaccttgccaaaagggtggaacttgcgtgaatatgccctccggtccacactgtctttgccctcagcatctcaccggcaatcattgccaaaaggagaagtgtttcgaacctcagctgctcaggtttttccacaaaaacgaaatttggtacaggaccgaacaggccgcagtcgcgcgctgtcaatgtaagggtccggatgcacattgccaacgcctggcgtcccaggcatgtcggaccaatccatgtctgcacggaggccgctgtcttgaggtggaagggcacagactctgtcactgtccagtggggtacactggtgccttttgtgatgtcgacactaaggccagctgctacgacggaagggggcttagctacagaggcctcgcaaggacgactctttccggtgcgccttgtcaaccttgggcatcggaggcaacctacagaaacgtgaccgcagagcaagcacgcaattgggggctcggagggcacgctttttgccgcaacccagacaacgatataagaccttggtgttttgtcctcaacagggataggctctcttgggagtactgtgatctggcacaatgtcaaacccctacccaagccgccccaccgactccagtgtccccacggctgcatgtgccacttatgcccgcacagccggcaccccccaaaccacagccgaccacccgtaccccaccacaatcacaaactcccggagcccttccagccaagagagaacaacccccttcccttacccgcaatggccccctcagctgcgggcaaagacttcgcaagtcacttagctcgatgacccgcgttgtcggagggttggttgctctgcggggtgcacatccatacatagcagcactgtattgggggcactctttttgtgccggtagccttatcgcaccctgttgggttctcaccgcggcacactgtttgcaagacagacctgccccggaggacctgaccgtcgtgctgggccaggaacggcgtaaccattcgtgtgaaccttgccagactttggctgtgcggtcgtaccgacttcacgaagcattttcgcctgtgtcatatcagcatgacctggcgttgctcaggcttcaggaagatgctgatggttcctgcgcacttctgtccccttatgtgcagcctgtgtgcttgccttccggcgcagcaagaccgtcggagactaccttgtgtcaggtggcaggttggggacatcagtttgagggtgcagaggaatacgcatcctttctgcaagaagcacaagtcccgttcctgtcccttgaaagatgttccgctccagacgtgcatggatcatcgattctgccaggtatgctttgtgcaggctttcttgagggaggtactgacgcctgtcaaggagattcgggcgggccccttgtgtgtgaagatcaagccgcggaacgaagattgacgctgcaggggattatctcgtggggatcaggctgtggggatcgaaacaagccaggagtctacactgatgtggcttactaccttgcttggatccgagaacatactgtcagc

SEQ ID NO: 249785 - DNA, 1845 bp, synthetic construct
  misc_feature 1..1845: note = Description of Artificial Sequence: Synthetic coding sequence
  source 1..1845: mol_type = other DNA
atgagagcattactgctcttggggttcttgctggtgtctttggagtcgaccttgagcatcccgccgtgggaggcgcccaaggagcacaaatacaaagccgaggagcatacggtggtccttaccgttactggagagccttgtcactttcctttccagtaccacaggcaactctaccacaagtgcactcataagggccggcccggtccccagccgtggtgtgctacaactcccaactttgaccaggaccagcgttggggctattgcctggagccaaagaaagttaaggatcactgcagcaagcacagtccatgccagaaaggcggcacatgtgtgaatatgccttccgggccacactgcctttgtccccaacatctgacgggtaaccattgccagaaagagaaatgctttgagccacagctgctgagattctttcataagaatgagatctggtatcgcacggagcaggcggccgttgccaggtgccagtgcaagggtccggacgcacattgccagaggctagcatcgcaggcttgtaggaccaacccctgtctgcatggtgggaggtgtcttgaagtggaaggccatagactgtgccactgtcctgtcggatataccggtgccttttgtgacgtggatactaaggcatcttgttatgatggtcggggactcagctatcgtgggctagcccgcaccaccctgtctggtgctccgtgccagccatgggcttcagaggccacataccgcaacgtcacagccgaacaggcgcgcaattggggcctgggcggccatgcattttgcagaaatcctgataatgacattcggccatggtgtttcgtgttaaacagggaccggctctcgtgggagtattgtgatcttgcccagtgccagaccccaacgcaggccgcccctccgacccctgtgtctccaaggcttcatgtaccacttatgcccgcccagcccgcccctcccaaaccccagccgaccaccaggactcccccccagagccagactccgggagcgttaccagcgaagcgcgaacagcccccaagcctcacaaggaatgggcccctcagctgcgggcagaggctgagaaagagtctgagctctatgacacgggtcgttggtgggctggtggccctgcgtggggcacacccctatatcgccgctctgtactggggccactcattctgtgcgggatctctcattgcgccctgttgggttctcaccgcagcccattgcttgcaggataggcccgcacctgaggacctcacggtggtattggggcaggaacgtcgcaaccactcatgtgaaccctgccagactctcgccgtgaggtcttatcgactccacgaggctttctctcctgtcagctatcagcacgatctcgctcttctgcgtctgcaggaagacgcagatgggagctgtgcactgctatccccttatgtgcagcccgtatgcctgcccagcggcgctgctagaccttccgaaaccaccctgtgtcaggtggcaggctggggccatcagttcgagggagcagaggaatacgcctctttcttgcaggaggcacaggtgcctttcctgagcttggagaggtgttctgcaccagatgtccatgggtcctcaatcctcccaggaatgctctgtgcgggctttctggagggcggcaccgacgcctgccagggcgattctggcgggccactggtctgcgaggatcaggccgccgagcgccggctaaccctgcaggggatcatttcttggggaagtggctgcggggataggaacaagcccggtgtatatactgatgtcgcctactacctagcatggattcgcgaacatacagtctct

SEQ ID NO: 249786 - DNA, 1845 bp, synthetic construct
  misc_feature 1..1845: note = Description of Artificial Sequence: Synthetic coding sequence
  source 1..1845: mol_type = other DNA
atgagagcgctgctgctgctggggtttctcttggtttcccttgaatccaccctttccattcctccatgggaagcacctaaagagcacaaatacaaggcagaagaacatactgttgtccttaccgtgactggagagccctgtcactttccattccaataccatcgtcagctttaccataagtgtactcacaaaggtagaccaggtccccagccttggtgtgcaactacccccaatttcgaccaagaccagaggtggggttactgtcttgaacctaagaaggtgaaagatcattgttcgaaacattcgccctgccaaaagggaggaacctgcgtgaacatgccttccgggccgcactgcctgtgtcctcaacacctgactggaaaccattgtcagaaggagaagtgttttgaacctcagcttcttcgattctttcacaagaacgaaatttggtacaggaccgaacaagcagcagtcgcgaggtgtcaatgtaagggacctgatgcacactgccaaaggttggcgtcgcaggcctgcagaaccaacccctgtctgcatggtggtagatgcctggaagtcgaaggacatcggttgtgccattgtcccgtgggatacactggcgcgttctgcgatgtggacactaaggcgtcttgttacgacgggcgcggactttcgtacaggggcctcgcacgaactacgcttagcggagcgccctgtcaaccctgggcatcggaagcaacgtacagaaacgtgactgcagaacaagcaagaaattggggtcttggaggccacgccttttgtagaaaccctgacaacgacattagaccttggtgttttgtgcttaatcgagatcggctgagctgggaatactgcgatcttgcgcagtgtcagaccccaacccaagccgcaccacccactccagtgtcacctaggctgcatgtcccactgatgccggcacagcctgccccaccaaagccacaacctaccacccgcaccccgcctcagtcccaaaccccaggagctctgccagcaaagcgcgagcagccaccttccctcaccagaaacggaccactcagctgtggacaaagactgagaaagtcgctttccagcatgacccgtgtggtgggagggctcgtggctctgagaggtgcacacccatacattgctgcactctactgggggcactccttctgtgccggatcccttattgctccttgttgggtgcttaccgcagcacattgtctgcaggataggcctgcacctgaggatcttacggtggtgctggggcaagagcggaggaatcattcatgtgaaccttgtcaaacccttgcagtcagatcataccgtctgcatgaggccttcagtcctgtgtcgtaccagcacgatctggcactgctgagactgcaagaggatgcagatggcagctgcgcgttgcttagcccttacgtgcaacccgtgtgtctgccatcgggggcagcccgaccatcagagactactctttgccaagtggcgggttggggtcatcaatttgaaggtgcggaggaatacgcatccttccttcaagaagcgcaggtccctttccttagccttgaaaggtgttcggccccagatgttcatggttcatccattctgcccgggatgctgtgcgctggttttctcgaaggcggaactgacgcgtgtcagggagactccggcgggcctctcgtgtgtgaagatcaggcagcagaaaggcgactgaccctccaaggaatcatttcgtggggatccggttgcggagatcgaaacaagcctggagtgtataccgacgtggcatactatctggcatggattcgtgagcatactgtgtcc

SEQ ID NO: 249787 - DNA, 1845 bp, synthetic construct
  misc_feature 1..1845: note = Description of Artificial Sequence: Synthetic coding sequence
  source 1..1845: mol_type = other DNA
atgagagcgctccttctgcttggcttcctcctggtgtcactggaatcgactcttagcattccaccttgggaggcacctaaggagcacaagtacaaggctgaagagcataccgtagtactgactgtcaccggtgaaccttgtcattttccctttcagtaccacaggcaactgtaccacaagtgtacccataaagggcgtcctgggccacagccatggtgtgccacgacgcccaatttcgatcaggaccaacggtggggttactgtctcgaacccaaaaaggtcaaggaccattgctccaagcattctccatgtcaaaaaggaggcacttgtgtgaacatgccgtccggaccacattgcctctgtccacaacatctcactggaaaccattgtcaaaaggagaagtgctttgagcctcaactccttcggttttttcataagaacgaaatttggtacagaaccgagcaggcagcagtggcacggtgtcaatgtaaaggacctgacgcacactgtcagagattggcgagccaggcctgtcgaaccaacccatgcttgcatggtggtaggtgtctggaagtcgaagggcaccgtctgtgtcactgcccagtgggatacacgggggcattttgtgatgtcgacacgaaggcctcatgttacgatggtcggggccttagctacaggggactggcgagaacgaccctctccggtgcgccctgccagccctgggcatctgaggcaacgtatagaaatgtgactgcagaacaagcacgcaattggggcctgggcggccacgccttttgtagaaaccctgacaacgatattcgcccatggtgtttcgtcttgaaccgtgacaggctgtcatgggaatactgtgacctggcacagtgccaaaccccaacccaagccgcccctcctactccagtgtccccgcgtctgcacgtgccattgatgccagcccagcccgcacctccgaaaccgcagcctactaccaggactccacctcaatcccagaccccaggtgcactccctgcaaagagagaacaacccccatcgctgacccggaatggacctctgtcctgcggccaaagactgcgcaaatcgctttcaagcatgactagagtcgtgggaggactcgttgccctgcggggcgcgcatccgtacatcgcggcactttactggggacactcgttctgtgccggctcgctgatagcaccatgctgggtcctgaccgcagcacattgccttcaagatcgcccggcccctgaggaccttaccgttgtgctcggccaggaaagaaggaatcactcgtgcgagccttgtcaaactcttgcagtgagatcctaccgtttgcatgaggctttttcccctgtgtcctaccagcatgatctcgcactgcttaggctccaagaagatgcagatgggagctgtgcgcttctttcgccttacgtacaacccgtgtgccttccctcgggagcggctcgtccttcggaaactaccctttgccaagtggcagggtgggggcatcaattcgagggtgctgaagaatacgcctcgttcctccaagaggcacaggtgccttttctgtcgctcgaaagatgtagcgcaccagatgtgcatggatcctcgattcttccaggaatgctttgcgccggttttcttgaaggggggactgatgcttgccagggtgactcaggaggtccgctggtgtgcgaagatcaagcggctgaacgccggcttactcttcagggcattatctcctggggttcgggatgtggagatagaaacaagccaggtgtctacaccgatgtcgcgtactatcttgcctggataagagaacatactgtgtca

SEQ ID NO: 249788 - DNA, 1845 bp, synthetic construct
  misc_feature 1..1845: note = Description of Artificial Sequence: Synthetic coding sequence
  source 1..1845: mol_type = other DNA
atgagagctttgctgttacttggattcctactcgtctcactggaatccacacttagtatacctccatgggaagcgccaaaagagcacaaatataaagccgaagaacacaccgtcgtcctgacagtcacaggagagccatgtcactttcccttccagtatcatcgacaactgtatcacaagtgcacccacaaaggtcggccaggccctcagccatggtgtgcaaccacgcccaactttgaccaagaccaacggtgggggtattgtttggaaccaaaaaaggtgaaggaccactgttctaagcacagcccttgccagaaaggggggacctgcgtgaacatgccctctggaccgcactgcttgtgtcctcagcacttgaccggcaatcattgtcagaaagaaaagtgctttgaaccacagcttcttcggttctttcacaagaatgagatttggtatcgcacagaacaggctgccgttgcccgctgccagtgcaaggggccagatgcacattgccaaagacttgcttctcaggcctgtcggactaacccgtgtctgcatggtggtcgctgccttgaggtcgaaggacacagactctgccactgccccgtgggatacacaggcgctttctgcgacgtggacactaaggcctcctgttacgacggcagagggctatcgtaccgcggcctggccagaacgacgttatctggagccccctgccagccctgggcgtcagaggctacatacagaaacgtaactgcagaacaggcaaggaattggggactcggagggcacgccttttgccgcaacccagacaacgatattcggccatggtgctttgtgctgaaccgcgaccggttgtcgtgggaatactgcgacttggctcaatgtcagacaccgacacaggccgcaccccccacaccagtctcccctagacttcacgtgcccctcatgcccgcacaacctgctccgcctaagcctcagccaaccacgagaacaccaccccagtcccagacccctggcgccctgccagcgaagcgcgaacagcccccatcacttacccgcaatgggcctttatcctgcggtcaacggttgcgtaagagtctgagctccatgacccgcgttgtggggggactcgtggcccttaggggcgctcatccttacatcgcggctctttattggggccattcattctgcgcagggagccttatcgccccttgctgggtactcacggcggcgcactgcctccaggaccgccccgctccggaagatttgaccgtagttttagggcaagagcggcgcaatcacagttgtgaaccatgccagacacttgctgtccgcagctatcggctgcatgaagccttctctccggttagttatcagcacgatcttgccctattgagactgcaggaggatgcagacggctcgtgtgcgttgttatcaccctacgtgcaaccagtctgcctcccaagtggtgccgcccggccaagcgagaccactctttgtcaggtggctggatggggtcatcaatttgaaggagctgaagagtatgccagcttcctacaagaggcgcaggtgccctttctttcgctggaacgctgttccgctcccgacgtgcacggttcatcaatattgccagggatgctgtgtgctggcttcctggaagggggaactgatgcatgccagggtgacagtggcggcccgctggtgtgcgaggatcaggcggcggaaaggcggctgaccctgcagggcataattagctgggggtccggctgcggcgatcgaaacaagccaggtgtgtataccgacgttgcttattacctggcctggattcgcgagcacactgtgtcc

SEQ ID NO: 249789 - DNA, 1845 bp, synthetic construct
  misc_feature 1..1845: note = Description of Artificial Sequence: Synthetic coding sequence
  source 1..1845: mol_type = other DNA
atgcgcgccctcctcctgctgggttttctgctggtgtcactcgaatcaacgctctcgatccccccgtgggaagctccgaaggaacacaagtacaaggcggaagagcatactgtcgtgttgactgtgaccggcgaaccatgccacttcccctttcagtaccatcgccagctgtaccataaatgtacccacaagggccggccgggaccccagccttggtgtgcaactaccccgaacttcgaccaggaccaacggtggggctactgtctggaaccaaagaaggtgaaggaccattgcagcaagcattcgccctgccagaagggaggcacttgcgtcaatatgccaagcggaccacactgcctctgcccccagcacctcaccgggaatcattgccagaaagaaaaatgcttcgaaccacagctgctgcgcttcttccacaagaacgaaatctggtacaggacggaacaggcggctgtggcaaggtgccagtgcaagggcccagatgcgcactgccaacggctggcgtctcaggcgtgtagaaccaatccttgcctgcatggagggcgctgcttggaagtggaaggtcacaggctctgccactgcccggtgggatatactggggcgttctgcgacgtggatactaaggcgagctgctacgatggaagaggactctcctaccggggtctggctcgcaccaccctcagcggcgcgccttgccagccgtgggccagcgaggctacttatagaaatgtgaccgcggagcaggccaggaactggggactggggggacacgccttctgtagaaatccagataacgacatccgcccgtggtgcttcgtgctgaatcgggacagactctcctgggaatactgcgatcttgcccagtgtcagactccgactcaagcagcgccgccaactccagtgtcaccacggctgcatgtcccactgatgccggcgcaaccagctcccccgaagccccagccaacgaccaggaccccgccgcagtcacagacccccggagcgctccctgcaaagagagaacagccgccgtcgttgactcgcaacgggccgctgtcatgcgggcagagactgaggaagtcactgagctcgatgactagagtggtcggaggactggtggctcttcgaggcgcacatccgtacatcgcagcgctttactgggggcattccttctgtgccgggagcctgatcgctccgtgttgggtgctgactgccgcccattgcctgcaagaccgcccagccccggaagatctgactgtggtgcttggacaggaacgacgcaatcattcgtgtgaaccatgtcagactctcgccgtgcgctcgtaccgcctgcacgaagccttttccccagtatcataccagcatgacctggcgctgctcaggttgcaggaggacgcggacggatcttgcgccctcctgtcaccttacgtccaaccggtgtgcctgccgtccggagcagcacgcccgtccgagactactctctgccaggtggcgggctggggccaccagttcgagggtgccgaagagtacgcgtccttcttgcaggaggcccaggtgccgtttctttcacttgaaagatgcagcgcccctgacgtgcacggatcatccatcctgcccggcatgctctgcgccggattcttggagggtggcactgatgcctgccaaggagactcgggaggacctctcgtctgtgaggatcaggcagctgaacggcgcctcacgcttcaaggaatcatttcctggggatcgggatgcggcgatcgcaacaagcccggagtctacaccgacgtggcctactacttggcctggatccgcgaacataccgtctcc

SEQ ID NO: 249790 - DNA, 1845 bp, synthetic construct
  misc_feature 1..1845: note = Description of Artificial Sequence: Synthetic coding sequence
  source 1..1845: mol_type = other DNA
atgagagctcttctgctgctgggattcctcctggtgtcactcgaatcgactctgtccatcccaccgtgggaagcaccaaaggagcataagtacaaggcagaagagcatactgtcgtgcttactgtgactggggaaccttgccacttcccgttccagtatcacaggcagctgtatcacaaatgcacccataagggtagacctggacctcagccctggtgtgcaaccacgccaaatttcgatcaggatcaaaggtgggggtattgcctcgagccgaagaaagtgaaagatcactgtagcaagcattcgccctgtcaaaaggggggaacctgtgtgaacatgccttcaggtccccattgcctgtgtccacagcatcttactggcaaccattgccaaaaggaaaagtgttttgaacctcaactgctgcgttttttccataagaatgaaatatggtatcgcaccgaacaagccgcggtggcccggtgtcaatgcaaaggaccggacgcccattgtcaacgactggcgtctcaagcatgtagaaccaatccttgtctgcacggtggaagatgtctcgaggtggaaggacatcgcctctgtcactgtcctgtgggatacactggtgccttttgcgacgtggatactaaggcttcatgctacgatgggcgaggcctgtcatacaggggtctggcacgcaccacgctctccggagcgccatgccagccttgggcgtcggaagcaacgtaccggaacgtgactgccgaacaggcgcgcaactggggccttggaggacatgcattttgcaggaacccagataacgacataagaccctggtgttttgtccttaatcgcgacagactcagctgggaatactgtgaccttgcacaatgtcaaacgcccacccaggcagcaccacctacgccagtctcccctcgcctgcatgtgccgcttatgcccgcacagcctgcacctccgaagcctcaaccaaccacccgtactcctcctcaatcgcagactccgggcgcacttcctgcaaaaagagagcagccaccaagcctcacccggaatggacctctttcgtgcgggcaacgattgagaaagtcgctgtcctccatgacccgagttgtcggggggttggtcgctctgcggggcgcgcacccatacatcgcagctctttactggggtcactcgttttgtgccggtagcctgattgcaccgtgctgggtgctgactgcagcacattgtctgcaagatagaccggcaccggaagatcttaccgtcgtgctgggacaggagaggaggaaccattcctgtgaaccgtgtcaaactcttgcagtacgctcgtaccgtctccacgaggcgttcagccctgtgtcctaccagcatgatcttgcactgctgcgcctgcaggaggacgcagatggctcgtgtgctctccttagcccatacgtccagccagtctgcctgccgtccggagcagcaagaccttctgaaactactctttgtcaagtcgccggctggggacatcaatttgaaggcgcagaggaatacgcctcgtttcttcaagaagctcaagttccttttctgtcgctcgaacgctgttcggctcccgacgtacacggttccagtattctccccggcatgctttgcgcgggttttcttgaagggggaaccgacgcctgccaaggagatagtgggggtccacttgtgtgcgaggatcaagcggcagaacggcgtctgactctccagggcattatctcttggggctccgggtgtggcgatcgtaacaaacccggagtgtacactgacgtggcctactacctcgcgtggattcgcgagcacaccgtctcc

SEQ ID NO: 249791 - DNA, 1845 bp, synthetic construct
  misc_feature 1..1845: note = Description of Artificial Sequence: Synthetic coding sequence
  source 1..1845: mol_type = other DNA
atgagagcccttctcttgctgggttttctgctggtgagcctggagtccaccctgtccatacctccgtgggaagcgcctaaggagcataagtacaaggccgaagagcacactgttgtgctcactgtgaccggggaaccatgccatttcccttttcaataccaccggcagttgtaccacaagtgtactcacaagggtcggccaggtcctcagccatggtgtgcgaccacccctaacttcgatcaggatcaaaggtggggatactgccttgaacccaagaaggtgaaagatcattgttccaagcactctccttgccagaaaggaggtacttgcgtcaatatgccttccggccctcattgtctgtgccctcagcatctgaccggtaaccattgtcaaaaggagaagtgttttgagccacaacttctgcgcttttttcacaaaaacgaaatctggtatcggaccgaacaagcagcagtggcacgatgtcagtgcaagggaccagatgcacactgtcaaagacttgccagccaggcatgtaggactaacccttgccttcatggtggtagatgccttgaagtggaaggacatcggctgtgtcattgtccagtcggatacacgggtgccttctgcgatgtggataccaaagcctcctgttacgatggtaggggcctctcctaccgtgggcttgcgcgaaccaccctctccggagccccatgtcagccgtgggcgtcagaagccacgtaccgcaacgtcactgcggagcaagctcgcaactgggggcttggaggccacgcattttgtagaaacccagataatgatattagaccctggtgcttcgtcctgaatcgggacaggctgtcctgggagtactgcgatctggcacagtgccaaacccctactcaggccgctcctccaactccggtgtctccgagattgcacgtgcctctcatgccggcacagccagcaccacccaagcctcagccgaccactcggaccccgcctcaatcccagaccccaggagctctgccagcgaagagggagcaacctccttcgcttacgcgcaacggacctctgtcgtgtggtcaacggctccggaagtctctgagctcaatgactcgagtggtgggaggtcttgtggcactgaggggagcacatccttacatcgccgcattgtactggggccatagcttctgcgccggatcgctcattgccccttgttgggttctcactgcagcacattgtctccaagacagacccgcccccgaagatctgactgtggtccttgggcaggagagaaggaatcattcctgcgagccttgtcaaactctggctgtgcgctcatacagactgcatgaagcattttcccctgtctcctaccagcatgatctcgcactgcttcgcctccaggaggatgccgacggttcctgcgcactgctgtcaccctacgttcaacccgtgtgtctgccaagcggtgcagcgcgaccctccgaaaccaccctgtgtcaggtggccggctggggccatcagtttgaaggagctgaggagtacgcgagctttcttcaagaagcccaggtgcccttcctcagcctggaacgttgttcggcacctgatgtgcatggatcctcgattctgccgggaatgctgtgtgccgggtttctcgaaggaggcaccgacgcctgccagggagactcaggagggccgcttgtgtgtgaggatcaagctgctgagaggagacttaccctgcagggaatcatttcgtggggaagcggatgtggagacagaaacaagcccggagtgtacaccgatgtggcatactacctggcatggatccgagaacataccgtctcc

SEQ ID NO: 249792 - DNA, 1845 bp, synthetic construct
  misc_feature 1..1845: note = Description of Artificial Sequence: Synthetic coding sequence
  source 1..1845: mol_type = other DNA
atgagggccctgctgctgctaggtttcctcctcgtctcactggagtctacactgagcatacccccttgggaagcccccaaggaacataaatataaggctgaagaacacacagttgtgcttactgtgacgggggaaccttgccattttccgttccagtatcaccgccagttgtatcacaagtgtacacacaaaggtagacctggcccccagccctggtgtgcaacaactcctaattttgaccaggatcagcggtggggctattgtttagagccaaagaaagtcaaggaccactgttctaagcattccccatgccagaagggaggtacttgcgttaatatgccaagtggtcctcattgcctctgccctcaacatcttaccgggaaccactgtcagaaagagaagtgtttcgagccgcagctgctgcggttcttccataagaacgaaatctggtaccggacagagcaagccgctgtggccagatgtcagtgtaagggtcccgatgcccactgccagcgcctggcaagccaggcatgtaggaccaatccttgtctgcacggggggagatgcttagaagtggaaggacaccgattgtgccactgcccagttggatacacaggtgcattttgcgatgtcgacactaaggcttcgtgttatgatggccggggtttgtcctacaggggtcttgcacgaactactctttcgggagctccttgccagccgtgggcatcggaagccacatatagaaacgtgacagccgaacaagctaggaattggggactgggaggccatgctttttgccgcaacccagacaacgatattagaccatggtgtttcgtgctgaaccgggaccgactcagctgggaatactgtgatcttgcgcagtgccaaacccccacgcaggcggcaccccctacccccgtgtctcctagactgcacgtgccattaatgccagcacaacctgccccccctaaaccccagcccactactaggactcctccgcagtcccagactcctggcgcccttcccgcaaagcgcgagcagccgccaagcctcaccaggaatggacctctgagttgtggacagcgactgcggaagagcctgtccagcatgacccgcgtggtcggaggcctcgtggccctgcggggggcacatccatatatcgccgccctgtattggggtcatagtttttgcgcaggttcgctaatcgccccctgttgggtgctcactgctgctcactgcctgcaggatagacctgcacctgaggacctgacagtagtgttgggccaggagcgccggaatcattcttgcgaaccctgtcaaactctagccgtgcgatcttaccggctgcatgaggccttcagccccgtgtcttatcaacacgatctggccttgttgcgcctacaggaggacgccgacggaagctgtgcccttctgtcaccttacgtccagccggtgtgcctgccatctggtgcggcacgaccgagcgaaacaactctttgtcaggtggccgggtggggacatcaattcgagggtgctgaagagtacgcatcctttctgcaggaggcacaagtgccattcctgtctcttgagcgatgctccgcacccgacgtgcatggatcttccattctaccaggcatgctctgtgcgggctttctggagggaggtaccgatgcctgccaaggagatagtggtggaccccttgtatgtgaagatcaggcagcggagcgccggctaacgcttcagggtatcatatcctgggggagcggctgcggggatcgaaataagccaggggtctacaccgatgtggcctactacctcgcgtggatccgtgaacatactgtttct

SEQ ID NO: 249793 - DNA, 1845 bp, synthetic construct
  misc_feature 1..1845: note = Description of Artificial Sequence: Synthetic coding sequence
  source 1..1845: mol_type = other DNA
atgagggcgttattgctgctgggctttcttttggtgagcctcgagagtacactgagtatacctccgtgggaggcaccaaaggaacataaatacaaggcagaggaacacacggtcgtgctcactgtcacgggcgaaccatgtcacttcccatttcagtaccatcgccagctgtatcacaagtgtacgcataaaggtcggcccggccctcagccctggtgtgcaacaacccctaacttcgatcaagaccaaaggtggggttactgcctggaacctaagaaggtcaaagaccactgcagcaagcatagtccatgtcagaagggaggtacgtgcgttaacatgcccagcggaccgcattgtctctgtccccaacaccttaccggtaatcactgccagaaggagaagtgttttgaacctcaacttttgagattttttcacaaaaatgaaatttggtacagaacagaacaggcagccgtcgcacggtgtcaatgcaaagggcccgatgcccactgccaaagacttgcaagccaggcttgccgcaccaacccatgtctgcacggggggcgctgcctggaggttgagggccacaggttgtgtcactgccccgttggttatacaggggccttctgtgatgtggacacaaaagcatcttgttacgacggacgaggcctcagttaccgcggtctggcccgtaccacactgtctggagcaccctgtcagccctgggctagcgaagccacatatcggaatgtgaccgcagagcaagctaggaactggggacttggcgggcatgccttctgccgcaacccagacaatgatattcgtccttggtgctttgtgctgaatcgcgataggttgtcatgggaatactgcgatctcgctcagtgccagacacctactcaggcagccccccccactcctgtaagtccccggctacatgtaccactcatgcccgcacagcccgccccacccaagccccagccgactacgcggacccctccgcagtcccaaacccccggagcgttgcccgccaaaagagagcagcccccaagcttaacaaggaacggtccgttgagttgcggacagcggctaagaaaaagcttaagctccatgacacgcgtcgtgggcggattggtggcgcttaggggtgcccatccatacatcgcggctctctactggggtcatagcttctgtgctgggtccctgatcgctccttgttgggtcctgacagccgcacattgcctgcaggatcgccctgccccagaggacctgacagtggtactggggcaggaacggaggaaccatagctgtgagccgtgccaaaccctcgccgtgcggtcctatcgtctccatgaggcctttagccctgtgagttatcagcatgatctggcacttttgcgtctgcaggaggacgcagatggctcctgcgcattgctttccccatatgttcagcccgtgtgcctcccctccggggcagcacgcccatcggagaccaccctgtgtcaggtcgccggctggggccatcagtttgaaggagccgaggagtacgcaagcttcttgcaagaggcacaggtcccttttttatcactggaaagatgcagtgcacccgacgtccacggtagtagcattctgcccggcatgctgtgtgcaggcttcttagagggcggtaccgatgcatgtcagggcgattctggcgggccgctcgtgtgcgaggatcaggctgccgaaaggaggctaaccctgcagggcatcatctcctgggggtctgggtgtggggaccggaacaagccaggagtatacactgatgtggcgtactatttggcctggatacgggaacataccgtgtcc

SEQ ID NO: 249794 - DNA, 1845 bp, synthetic construct
  misc_feature 1..1845: note = Description of Artificial Sequence: Synthetic coding sequence
  source 1..1845: mol_type = other DNA
atgagggcacttctgcttttaggatttctccttgtctcactggagtctaccctgtcaattccgccatgggaagccccgaaggaacacaagtataaagcggaggaacataccgtcgtgctgactgtaacaggggaaccttgccacttcccattccagtaccataggcaactctaccacaagtgtacgcacaagggccggcccggcccccagccatggtgtgcaactacccccaattttgaccaagaccagcgctggggatattgtctggaacccaaaaaagtgaaagaccattgttctaaacacagtccttgccagaaaggaggaacctgtgtgaatatgccaagcggaccgcactgcttatgtccgcagcatctgactggaaaccattgccagaaggagaagtgcttcgagccgcagcttctgcggttctttcataaaaacgaaatctggtataggacagagcaggctgccgtcgcccggtgtcagtgtaagggcccggacgcccattgccagcgattagcaagccaggcgtgtaggaccaacccgtgtttgcatggagggcggtgtctagaggtggagggccataggctctgccactgcccagtcggatacactggcgccttctgcgacgtagacaccaaagcatcttgctatgacggcagggggttgagttataggggactagcaagaactacactctctggagccccctgtcaaccctgggcatcagaagccacctacagaaacgtgacggctgagcaagcccgtaactgggggctgggagggcatgctttctgtaggaatccagataatgatatacggccctggtgcttcgtgctgaatagagatagattgtcatgggagtactgcgacctggcccagtgccagacccccacgcaggccgcaccacctacccccgtgtccccgagattgcacgtccctctcatgcccgcacaacctgctcctccaaaaccccagccgaccacacgcacgcccccgcaatctcagactcccggggccctgccagctaaacgagagcagcccccttcactcaccagaaatggcccattgagttgtggacagaggcttcggaagtccctctcttctatgactcgagtcgtcgggggccttgttgccctccggggggcacacccctatatcgccgcgttgtattggggtcactcattctgcgccgggagcctcattgctccctgttgggtcctgaccgcagcacactgtctacaggaccgaccggcaccagaagatctgacagttgtactaggccaagaacggcggaaccattcttgtgagccctgccaaacactggcagtgagatcttatcgcctccatgaggcattttcgcccgtgtcatatcagcatgacctggccttgttgcgtctccaagaggatgccgatgggagttgcgctctcctcagcccttacgttcagcccgtatgtcttccgagcggggccgcaagaccatccgaaaccaccctgtgccaagtggctggctgggggcatcagtttgagggagcagaggaatatgcttcattcctgcaggaggcacaggtacccttcctctctctggaacggtgctccgcccccgacgtgcatggctcctcaatcctcccaggcatgttatgcgctggatttttagagggtggaactgatgcatgccaaggagattcgggaggaccgttggtgtgcgaggatcaggccgcagagaggcgactcaccttgcagggcatcatctcatggggaagcgggtgcggagaccggaataaacctggggtgtatacagacgtagcgtactacctcgcctggattagagaacacacagtgagc

SEQ ID NO: 249795 - DNA, 1845 bp, synthetic construct
  misc_feature 1..1845: note = Description of Artificial Sequence: Synthetic coding sequence
  source 1..1845: mol_type = other DNA
atgcgggctctcttgctgcttggcttcttactcgtgagtctggagtctaccctcagtatccctccttgggaagcccctaaggaacataaatacaaagccgaagaacacacagtagtacttacagttacaggcgagccctgccatttcccgttccagtatcaccggcagctgtatcacaagtgcacgcataaaggccgccccggcccacagccctggtgcgctaccacacctaatttcgatcaagaccaacgctggggctattgtcttgaaccgaagaaagtaaaggatcattgtagcaaacactcaccctgtcagaagggtggaacgtgtgtgaacatgccgagcgggcctcattgtctgtgtccgcagcatttgacaggaaatcactgccagaaagaaaagtgcttcgaacctcagcttctgcgctttttccacaaaaatgagatctggtatagaaccgagcaagcagccgttgcccgatgccagtgcaagggtcctgatgcacactgtcagagacttgcttcgcaggcctgtcggaccaacccctgcttacacgggggccgatgtcttgaagtggaggggcaccgcctctgccattgccctgtggggtacaccggcgccttctgcgatgttgatactaaagctagctgttacgacggtcggggtctgtcttacaggggcctggcgaggaccacactaagcggcgccccttgtcaaccctgggcctccgaggcaacctatcgaaatgtgaccgcggaacaggcccgaaactggggtctcggcggacacgcgttttgcagaaaccccgacaacgatatccgtccatggtgcttcgtgctaaatagagataggttgtcttgggagtattgcgatctggcgcagtgccagactcccactcaggccgccccaccaactccagtgagcccacgacttcacgtgccgctcatgccagctcagcctgccccccctaagccccaacccaccacccggacccccccacagagtcaaacaccaggggccctgccagccaagcgagaacagcccccctcgctgacacgaaacggtccactaagttgcggacagcgactccgcaagtccctgtcttccatgaccagggtggtcgggggtctggtggccctgaggggcgctcatccgtatatcgcagcactatattggggacactctttctgcgcagggtcccttatcgccccctgttgggtcttgacagccgcccattgcctgcaggaccggcccgcccccgaagatctgacagtggtactcggtcaagaacgccggaaccattcctgtgagccctgccaaactctcgctgtgcggtcttaccgcctccatgaggctttctcacccgtctcgtatcagcatgacctggctctcctgaggcttcaggaggatgccgacggcagttgtgccctcctctccccctacgtgcaacccgtgtgcctgccctctggggccgctagacccagcgaaactactctctgccaggtagcaggttggggccaccagtttgaaggcgctgaggagtatgcatcttttctccaggaggcgcaggtgccatttctgagccttgagcgctgttccgcaccggacgtgcatgggagcagcatcctaccaggcatgttgtgcgctggcttcctcgagggtggcacagatgcatgtcaaggggacagcgggggcccactggtgtgtgaagaccaagccgctgagcgacgactgacactgcaaggcattattagctgggggtcaggctgtggcgaccggaacaagccgggggtgtatacggacgtcgcttactatctggcttggattcgtgagcatacggtgtct

SEQ ID NO: 249796 - DNA, 1845 bp, synthetic construct
  misc_feature 1..1845: note = Description of Artificial Sequence: Synthetic coding sequence
  source 1..1845: mol_type = other DNA
atgcgtgcgctactattattaggttttttactagtatcgctagaatcgacgctatcgataccgccgtgggaagcgccgaaagaacataaatataaagcggaagaacatacggtagtattaacggtaacgggtgaaccgtgtcattttccgtttcaatatcatcgtcaattatatcataaatgtacgcataaaggtcgtccgggtccgcaaccgtggtgtgcgacgacgccgaattttgatcaagatcaacgttggggttattgtttagaaccgaaaaaagtaaaagatcattgttcgaaacattcgccgtgtcaaaaaggtggtacgtgtgtaaatatgccgtcgggtccgcattgtttatgtccgcaacatttaacgggtaatcattgtcaaaaagaaaaatgttttgaaccgcaactattacgtttttttcataaaaatgaaatatggtatcgaacggaacaagcggcggttgcgcgatgtcaatgtaaaggtccggatgcgcattgtcaacgattagcgtcgcaagcgtgtcgaacgaatccgtgtctacatggtggtcgttgtctagaagtagaaggtcatcgtctatgtcattgtccggttggttatacgggtgcgttttgtgatgtagatacgaaagcgtcgtgttatgatggtcgtggtttatcgtatcgaggtttagcgcgaacgacgctatcgggtgcgccgtgtcaaccgtgggcgtcggaagcgacgtatcgtaatgttacggcggaacaagcgcgaaattggggtctaggtggtcatgcgttttgtcgtaatccggataatgatatacgaccgtggtgttttgttttaaatcgagatcgtttatcgtgggaatattgtgatctagcgcaatgtcaaacgccgacgcaagcggcgccgccgacgccggtatcgccgcgattacatgttccgttaatgccggcgcaaccggcgccgccgaaaccgcaaccgacgacgcgtacgccgccgcaatcgcaaacgccgggtgcgttaccggcgaaacgagaacaaccgccgtcgctaacgcgaaatggtccgttatcgtgtggtcaacgtttacgtaaatcgttatcgtcgatgacgcgtgtagtaggtggtttagttgcgctacgtggtgcgcatccgtatatagcggcgttatattggggtcattcgttttgtgcgggttcgttaatagcgccgtgttgggtattaacggcggcgcattgtttacaagatcgaccggcgccggaagatctaacggttgttctaggtcaagaacgtcgtaatcattcgtgtgaaccgtgtcaaacgttagcggttcgttcgtatcgtctacatgaagcgttttcgccggtttcgtatcaacatgatttagcgctattacgtttacaagaagatgcggatggttcgtgtgcgctactatcgccgtatgttcaaccggtatgtttaccgtcgggtgcggcgcgtccgtcggaaacgacgttatgtcaagtagcgggttggggtcatcaatttgaaggtgcggaagaatatgcgtcgtttctacaagaagcgcaagtaccgtttttatcgctagaacgttgttcggcgccggatgttcatggttcgtcgatactaccgggtatgttatgtgcgggttttttagaaggtggtacggatgcgtgtcaaggtgattcgggtggtccgctagtatgtgaagatcaagcggcggaacgacgtttaacgttacaaggtataatatcgtggggttcgggttgtggtgatcgaaataaaccgggtgtttatacggatgtagcgtattatttagcgtggatacgtgaacatacggtttcg

SEQ ID NO: 249797 - DNA, 1845 bp, synthetic construct
  misc_feature 1..1845: note = Description of Artificial Sequence: Synthetic coding sequence
  source 1..1845: mol_type = other DNA
atgcgcgctctgcttctgctgggctttctgttggtatcgctcgagagcactctgtcgatcccgccgtgggaggctccaaaagaacacaaatacaaggcagaggagcatactgtggtactgactgtgaccggggagccgtgccacttcccgtttcaataccaccgccagctgtaccataagtgcacgcacaagggacggcctggtccccagccttggtgcgccacgaccccgaacttcgatcaggaccaaaggtggggttactgcctggagcctaagaaggtgaaagaccattgcagcaaacactcgccatgccagaagggaggaacctgtgtcaacatgccgtcaggcccgcactgcctttgcccacagcaccttactggaaatcactgccaaaaggagaaatgctttgaaccgcagctcctccggttcttccacaagaacgagatctggtataggactgaacaggccgctgtcgccagatgccagtgcaagggaccagacgcgcattgccagcgcctcgcgagccaggcatgccgcaccaatccttgcctgcatggagggcggtgcctggaggtggaaggccataggctctgccactgtcccgtgggttacactggagcgttttgcgacgtggacaccaaggcgtcgtgttacgatggaagaggcctgtcataccgcggcctcgcacggaccactctctcgggagcgccgtgtcaaccatgggcgtccgaagcaacctaccgcaacgtcactgccgaacaagcacgcaactggggactgggagggcacgctttttgtcgcaaccccgacaacgacatccgcccctggtgcttcgtgctcaacagggacagactgtcgtgggagtactgcgacctggcccagtgccaaaccccaacccaagcagcgccccctactcctgtctcgccgaggcttcacgtcccgttgatgccggcgcaaccggccccgccgaagccgcagccgaccactaggacgccgcctcagagccagaccccgggcgccctcccggctaagagggagcagccaccttcactcactcggaacggaccactgagctgtggacaacggcttcggaagtccctgagctccatgacgcgggtggtgggcggacttgtggccctccgcggggcgcacccttacattgccgccctctactggggccactcgttttgcgcggggagccttatcgctccttgttgggtgttgactgcagcccattgcctccaagaccggccggcgccggaagatctgactgtggtgcttggccaagaaagacgaaatcattcgtgtgaaccatgtcagaccctcgccgtgcgctcctatcgcctgcacgaagccttctccccagtttcctaccaacatgacttggctctgcttagactgcaggaggacgccgacgggtcctgcgcactgctgtccccgtacgtccaaccagtttgcctcccgtccggagcggccaggccgtccgagactactctgtgtcaggtcgccgggtgggggcatcagttcgaaggcgccgaggagtacgcgtcatttctccaggaagcacaggtccctttcctgagcctggaacgctgctcagcaccggacgtgcatggatcgagcatcctccctggaatgctttgcgccggcttcctcgaaggaggaactgacgcatgccagggcgattccgggggaccgctggtctgtgaggaccaagccgcggaacggcgcctgactctgcagggtattatcagctggggctccggatgtggggacagaaacaaaccaggggtgtacaccgacgtggcctactacctggcgtggatccgcgagcacaccgtgtcg

SEQ ID NO: 249798 - DNA, 1845 bp, synthetic construct
  misc_feature 1..1845: note = Description of Artificial Sequence: Synthetic coding sequence
  source 1..1845: mol_type = other DNA
atgcgtgcactgctcttgctcggctttcttcttgtatctcttgagtctactttgagcattcccccctgggaggcgcccaaggagcacaagtacaaggccgaggagcatacggttgtgctgacagttacgggcgagccctgtcacttcccattccagtaccacaggcaactttatcacaagtgtacacacaaaggccgaccgggaccccagccctggtgtgccacaacccctaatttcgaccaggatcaaagatggggctactgcctggagccaaagaaggtcaaggaccattgctctaagcactctccctgtcagaagggcgggacttgcgtgaacatgccttctggcccccactgtctgtgcccccagcatttgactggaaaccactgccagaaagaaaagtgttttgaaccccagcttctgcgctttttccacaagaacgaaatttggtatcggaccgagcaggccgccgtggcccgctgccagtgtaagggcccggatgcccattgccaacggctagcctcccaggcttgtagaactaatccatgtcttcatggagggcgctgcctcgaggtggaggggcaccgtctatgccattgtcctgtgggatacaccggggccttttgtgatgtggacaccaaggcctcttgttatgatggccgaggactctcttaccgtgggctggctcgtacaactctaagtggcgcaccgtgccagccatgggcatctgaggccacatacagaaatgtcacagcagagcaggcacgtaattggggcctggggggacacgctttctgcagaaaccccgacaacgacattcgtccttggtgcttcgtccttaatagggaccggctttcatgggaatactgtgacctcgcccaatgtcaaacacctacacaggccgctcctcctaccccggtctccccccggctgcatgttccactgatgcccgcacagcctgcccctccaaagccacagcccacaacccgcacacccccccagtcacagactccgggcgctcttcccgctaagagagagcagccgcccagcctgacccgcaacggacctctaagctgcggacagcggctgcgcaagtcattatcatctatgacccgtgttgttggagggcttgtagccctgcgcggggcacacccctacattgcggcgctatattggggtcacagcttttgtgcaggtagcctgatcgcaccctgctgggttctaaccgcagcacactgcctgcaggatcgcccggccccagaggacctgactgtcgtcctgggacaagaaagacgcaaccactcctgtgagccctgccaaacgctggcggtccgaagctaccggctgcacgaggcattcagtcctgtcagttaccagcacgatctggccctcctcaggctacaggaagacgccgatggttcatgcgctcttctgagcccttatgtccagcccgtgtgcctgcctagtggggcagcaagacctagtgaaactacactatgccaggttgccgggtggggacaccagtttgagggagcggaagagtacgcatccttcttgcaggaggcacaggtgccgttcctgagcctggaaaggtgcagtgcgcccgatgtccatggtagttcaatccttccaggcatgctgtgcgctggtttcctggaaggcgggacggacgcgtgccagggagacagcggcgggccactggtgtgcgaagatcaggcggccgaacgaagattgacactgcagggtatcatatcatggggcagtggatgtggggacagaaacaagcccggggtctataccgatgttgcatactacttggcctggattcgcgaacacaccgtctct

SEQ ID NO: 249799 - DNA, 1845 bp, synthetic construct
  misc_feature 1..1845: note = Description of Artificial Sequence: Synthetic coding sequence
  source 1..1845: mol_type = other DNA
atgcgggccttgctgctccttggatttctcctggtgtcactcgagtccacgctgtcaatccctccatgggaggctcctaaagaacataagtacaaggcggaggagcataccgtcgtgttgactgtgactggagaaccgtgccactttccttttcagtaccacaggcagctgtaccacaaatgtactcacaagggccgcccaggaccacagccatggtgcgcaaccacccccaactttgatcaagaccagcgctggggatactgtctcgaaccgaagaaagtcaaggaccactgctcaaagcactcgccgtgccagaaaggcgggacttgcgtgaacatgccgagcggaccgcactgtctctgcccccaacatctgaccgggaatcattgtcagaaggaaaagtgtttcgaaccgcagttgctcagatttttccataagaacgagatctggtatcggacggagcaggcagctgtcgctcggtgccaatgcaagggaccggacgctcactgccagcgcctggcatcccaggcatgccggaccaacccatgtctgcacggaggacggtgcctggaggtggaaggacacagactttgtcactgcccagtgggctataccggcgccttttgtgatgtggacacgaaggcctcgtgctacgatggacgcggactgtcttaccgaggcctggcacggactacgctctcgggcgctccatgccagccgtgggccagcgaagccacctacagaaacgtgactgccgaacaggctcggaattggggcctcggaggacacgccttttgtcggaacccggacaacgacatccggccgtggtgttttgttctgaaccgcgatagactgtcctgggagtactgcgacctggcccagtgccagaccccgactcaagccgcgcctcctaccccagtgtctccccgcctgcatgtgccactcatgccagctcaaccggcgccgcctaaacctcagcccaccactaggactccgccacagtcacaaacccccggagcgctgcccgcgaagcgggaacaaccaccttctctgacccggaacggccctctctcctgtggacagcggctgagaaaatccctgtcaagcatgactcgggtggtgggagggctggtcgcactgcggggcgcccacccgtacatcgcggccctgtactggggacattccttctgcgcgggatccctgatagccccatgctgggtgctcaccgccgcccattgcctgcaggacaggccggcccctgaggacttgacggttgtgctgggacaagaacgcagaaaccacagctgcgaaccctgccaaaccctggcggtgcgctcatatagactgcatgaggcgttctcgccagtgtcgtaccaacatgatttggcactcctgagacttcaggaagatgcggacggtagttgtgcactgctctcgccgtacgtgcagccggtgtgcctgccttccggggcggccagaccgtcagaaaccaccttgtgccaggtggccgggtggggtcaccagttcgaaggtgcggaggagtacgcgtcgttcctgcaagaggcgcaggttccattcctgagtttggaacgctgcagcgccccagatgtgcacggatcgagcatcttgccgggtatgctgtgcgctggatttctggaaggcggtactgacgcttgccagggggactcggggggcccgctggtctgcgaagatcaagcagcggagcgtaggctgacgctccagggaatcatttcgtggggaagcggctgtggcgatcggaacaagcctggcgtctacactgatgtggcctactacctggcttggatccgcgaacacaccgtgtct

SEQ ID NO: 249800 - DNA, 1845 bp, synthetic construct
  misc_feature 1..1845: note = Description of Artificial Sequence: Synthetic coding sequence
  source 1..1845: mol_type = other DNA
atgagagcccttctcctgctgggattcttgctggtgtcactggagtccactctcagcatcccaccgtgggaagcgccgaaagaacacaaatacaaagctgaagaacatactgtggtcctgaccgtcaccggagagccgtgccacttcccgttccagtaccatcgccagctgtaccataagtgcactcataagggacgccctggtcctcaaccttggtgcgccacgactccgaacttcgatcaggaccagagatggggatactgcctggaaccgaagaaagtcaaggaccactgctcgaagcactcgccgtgccagaagggcggcacttgcgtgaacatgccttcggggccacattgcctgtgcccccagcaccttacgggaaaccactgccaaaaggagaagtgctttgagcctcaactgctcaggttcttccacaagaacgaaatctggtaccgcaccgaacaggccgcggtggcgaggtgccagtgcaagggccctgatgcccattgccagcggcttgcgtcacaggcatgtcggaccaatccttgcctgcacgggggacgctgccttgaagtggaaggacatcggttgtgtcactgtcctgtgggatacactggggcgttctgtgacgtggacactaaggctagctgctacgatggacgcggcctgtcctacagaggactggctcgcaccaccctgtccggagcaccgtgccagccttgggcttcggaagcaacttaccgcaatgtgaccgccgaacaagcgagaaattggggcctcggaggacacgcgttctgccgtaatccagataatgacatcagaccttggtgcttcgtgctgaatcgagacagactctcctgggaatactgcgacctcgcccagtgccagactcccactcaagccgcgccccctacgcctgtctcaccacgcttgcatgtcccgcttatgcctgcgcaacctgccccgccgaagccccagccgactacgcgcactccaccgcaatcgcaaaccccaggagcactgccagccaagagggaacaaccgccaagcctcacccgaaacggtccgctgtcctgcggccagcgcctccggaagagcctgtcctctatgactagggtggtcggaggactcgtagcgctccggggagcacatccatacatcgctgccctgtactggggccattctttctgcgctggatcactgatcgcaccgtgctgggtgttgaccgctgcccactgcctccaagatcggcctgcgcccgaggacttgaccgtggtgttgggacaggagagacgcaaccattcgtgcgagccatgccagacgctggccgtgcggtcctaccggctgcatgaagcattctctcctgtgtcgtaccagcatgacctcgccctgctgagactgcaagaggatgctgacggatcctgcgcgttgctgagcccatacgtccaacctgtctgcctgccgtccggggcggctcggccctccgaaactaccttgtgtcaagtcgcgggatggggacatcagttcgagggtgccgaggagtacgcctcgtttctgcaggaggcccaagtcccgtttttgagcctggagaggtgctccgcgcccgatgtccatggctcgtccatcctgccgggaatgctgtgtgcagggtttctggagggaggaaccgatgcctgccagggggactccgggggacccctggtctgcgaggaccaggcagctgaaaggcggctcaccttgcagggcatcatttcctggggatcgggctgcggtgaccggaacaagccaggggtgtacaccgacgtggcatattacctggcttggatccgggagcacactgtgtcg

SEQ ID NO: 249801 - DNA, 1845 bp, synthetic construct
  misc_feature 1..1845: note = Description of Artificial Sequence: Synthetic coding sequence
  source 1..1845: mol_type = other DNA
atgcgggccctacttctgctgggctttcttctcgtgtcactggaatcaaccttgagcatcccaccctgggaagcccctaaagagcataaatacaaggcagaggagcacactgttgtcctgaccgtgaccggggaaccctgtcatttcccatttcagtaccaccgccagctctatcataagtgtacacacaaaggcaggcctggaccacagccttggtgtgccacaaccccaaatttcgatcaggaccaacgctgggggtattgcttggaacccaaaaaagtaaaggatcattgttccaaacacagtccctgccagaagggaggtacctgtgtgaacatgccttccgggccccactgcctgtgtcctcagcacttgaccgggaaccattgtcagaaggagaaatgcttcgaaccgcaactcctacggtttttccataaaaatgagatatggtataggacagagcaggccgcagtggcccggtgccagtgcaaaggaccggatgcgcactgtcagcggcttgcctctcaggcttgcagaaccaatccttgtctgcacggcgggcggtgcttggaagtggagggacaccggctctgccattgtcctgtcggctatacgggtgcattctgtgacgtggataccaaagcttcttgctatgatggtagaggcctgtcatacagagggttggccaggaccactttgagtggtgccccatgtcagccttgggcttctgaggccacttacaggaacgtgaccgcagagcaggcgcgaaactggggactgggcgggcacgcgttctgcagaaacccggataacgatatccgaccttggtgcttcgttctgaatagggacagattgtcttgggagtactgcgatctggcccagtgtcagactcccacacaggccgccccaccgacccccgtgagccctcgcctgcacgttccattgatgccagcacagccggctcccccgaagccccaacctacaacccgtacaccaccacagagtcaaacaccaggagctctcccagctaaaagggagcagccaccttcactcactaggaacggccccctgagctgtggacagcggctccggaagtcactcagtagcatgacaagagtggtcggaggactggttgccttgcgcggtgcacacccttacatagccgcactctattggggtcattctttctgtgcaggctctctaatcgctccctgctgggtgctcaccgctgcccactgcttgcaagaccggcctgctccggaagacctgacggtagtcttgggacaggagaggagaaaccactcttgtgagccttgtcagaccctcgcagtgcgatcttatcgcctccatgaggcgttctcgcccgtctcgtaccagcacgatcttgccctgctgcggctccaagaggatgcagatggatcatgcgctttgctgagtccgtatgtgcagccagtttgcctgcctagcggtgccgcacgaccatccgagacaactctatgtcaggtcgccggctgggggcatcagtttgagggtgccgaagagtacgctagcttcctgcaagaagctcaggtccccttcctgtcactggaacgatgctccgcccccgatgtgcatggttcatccatcctgcctggaatgttatgtgccggatttctggaaggcggcaccgatgcgtgccagggtgatagtggaggcccgctggtgtgcgaggatcaggccgccgagaggagactgacgcttcagggaattatctcttggggctcgggctgcggcgataggaacaagcccggtgtttacacagacgtcgcctactacctcgcttggatccgtgagcacacggtgtct

SEQ ID NO: 249802 - DNA, 1845 bp, synthetic construct
  misc_feature 1..1845: note = Description of Artificial Sequence: Synthetic coding sequence
  source 1..1845: mol_type = other DNA
atgcgtgccctgttgctgttgggctttctgctggtgtcgcttgaatcaaccctgagtattccgccatgggaagctcctaaagaacataagtacaaagctgaggaacacactgtagtactgaccgtgactggcgagccctgccatttccccttccagtaccatcgacagctttaccataaatgcacacacaagggtcgtcccgggccccaaccttggtgcgccactacccccaacttcgaccaggatcagcggtgggggtactgtctcgaaccgaagaaagttaaagatcactgttctaaacatagcccttgtcagaagggcgggacatgtgtgaatatgccctccgggccgcactgcttgtgcccacagcatctgacagggaaccattgtcagaaagagaaatgctttgaaccacagttgctgcgtttttttcacaagaatgaaatctggtatcggacagaacaggcggcagttgccaggtgtcaatgcaagggtcctgacgctcactgtcagagactagcctctcaggcctgccgtaccaatccttgcctccatggagggcgatgcctggaggtggaaggacatcggctctgtcattgccctgtcggctacacaggcgccttctgcgatgtggatacaaaagctagttgctacgatggaagaggcctgtcttacagaggattggcaagaacaacactttccggcgccccatgccagccatgggcatcggaagccacttaccgaaacgtgaccgcagaacaggcccgaaattggggcctcgggggacacgctttctgcaggaatcccgacaacgatattcgtccttggtgttttgttctaaacagggaccgcctgtcttgggagtattgcgatctggctcagtgtcagactcctacacaggccgctccccccacccccgtgtccccacgactccacgtccctctgatgcccgcgcagcctgctcctccaaagccacagccaacaacccggacccctccacagagtcagactcccggagccctccctgcaaagagggaacagcccccttcactgacaaggaacggaccactgtcatgcggccagagacttcgcaaatcgctgtcaagcatgacgcgtgtggtgggcggtctcgtggcactgcgaggggcacatccttacatcgcggctctgtattggggacatagcttctgcgccgggtccctaatcgcaccttgttgggtgttaactgcagctcactgtttgcaagatcggccagccccagaagacctgacggtggtccttggccaagaacgacggaaccacagctgcgagccatgtcaaaccctggcggtgaggtcatacaggctgcacgaagcattcagtcccgtctcgtaccagcatgatctggccctcctgcgactgcaggaagacgccgatgggtcttgtgcgctgctcagcccctatgtgcagcccgtctgcctgccatctggtgccgcaaggccttccgagactacactctgtcaggtggctggatgggggcaccaattcgaaggcgccgaagaatatgcgagcttcctgcaggaagcgcaagtgccatttttgagccttgaaagatgcagcgctcctgatgtccacggcagctcaatcctcccaggtatgctttgcgcgggttttctggaaggcggaaccgacgcctgtcagggagactcaggtggcccactggtgtgcgaagaccaggcagctgagaggcgactgacccttcagggaatcatcagctggggtagcggctgtggtgacagaaataagcccggagtgtatactgacgtcgcttactatctggcttggatcagagaacacactgtatcc

SEQ ID NO: 249803 - DNA, 1845 bp, synthetic construct
  misc_feature 1..1845: note = Description of Artificial Sequence: Synthetic coding sequence
  source 1..1845: mol_type = other DNA
atgcgcgcactgctgctcctgggtttcttgctggtgtccctggagtcgactttgagtatcccgccgtgggaggcaccgaaggagcacaaatacaaggcagaggaacacactgtggtcctgacggtgactggcgagccatgccacttcccatttcagtaccatcgccaactctaccataagtgcacccacaaagggcggcccggcccacaaccgtggtgcgccaccacgccgaactttgaccaggatcaacggtggggatactgcctcgaacctaaaaaggtcaaggatcactgtagcaaacattcaccgtgtcagaagggaggaacctgtgttaacatgccaagcggcccacattgcttgtgccctcaacatcttacgggcaaccattgccagaaagagaagtgctttgaaccacaactccttcggttcttccacaagaatgagatttggtaccgcactgaacaggctgctgtggccagatgccagtgtaaaggaccggacgcccactgtcagcggcttgcatcgcaggcgtgccggaccaacccatgccttcacggaggccgctgtttggaggtcgaagggcaccgcctgtgtcactgcccggtcgggtataccggagcgttctgtgatgtggacactaaggcctcgtgttacgacggccgaggactgtcctaccgcggactggcgcgaactaccctttcgggcgctccttgtcagccctgggcctcagaggccacttaccgaaacgtgaccgctgaacaggccagaaattggggtcttggaggacacgcgttttgccgcaatcctgataacgacatccgtccatggtgcttcgtgctcaacagggataggttgtcgtgggagtactgcgacctggcacagtgccagactcctactcaagctgccccgcctactccggtatctccaaggcttcatgtaccactgatgccggcacagccggcgccgccgaaaccgcaacccacgaccagaaccccgccgcaatcccaaactcctggcgccctgccggccaagcgggaacaacccccgtcactgactagaaatggccctctttcctgcgggcagaggctcaggaagagcctgtcctccatgacccgcgtggtgggcggcctcgttgccctgaggggggcgcacccctacattgctgctctgtactggggccacagcttttgcgccggatccctgatcgcaccatgctgggtgctcactgctgcccattgcctgcaggacagaccggcgcccgaagatcttaccgtggtcctcggacaagagcggagaaaccacagctgtgaaccgtgccagaccctggccgtccgatcgtatcgtctccacgaagcattctcacctgtttcgtaccaacatgacctggccctgctgagactgcaggaggacgctgacggaagctgcgctctgctctcaccatacgtgcaaccagtgtgtctgccaagcggagctgcgcgccccagtgaaaccactctgtgccaggtggccggctggggacaccagttcgagggcgccgaagaatacgcatcattcctccaggaggcccaggtcccgttcctgtcgcttgaaagatgctcagcaccggacgtccatgggagctcgatcttgccaggcatgctgtgcgcgggattcttggaagggggtaccgatgcgtgccagggcgactcgggaggaccgctggtgtgcgaagatcaagcggcagaacggcgactcactttgcagggcatcatcagctggggttccggatgcggggatcgcaataagccgggagtgtacacggacgtggcctactacctggcctggatccgggagcacactgtcagc

SEQ ID NO: 249804 - DNA, 1845 bp, synthetic construct
  misc_feature 1..1845: note = Description of Artificial Sequence: Synthetic coding sequence
  source 1..1845: mol_type = other DNA
atgcgtgcactcctcctgctcgggtttctgcttgtgagcctggaatctaccctgtcaatccccccgtgggaggcgccgaaggaacataagtacaaggctgaagagcatacggttgtcctcactgtgaccggtgagccttgccacttccctttccagtaccacagacagctttaccacaagtgcacccacaagggcagaccgggaccacagccttggtgcgccaccacccccaacttcgatcaggaccagagatggggatactgtctcgaaccgaaaaaggtgaaagaccactgttcgaagcattcaccgtgccagaaaggcggtacctgtgttaacatgcctagcggaccgcattgcctctgcccacagcacctcacggggaatcattgtcagaaagagaaatgctttgaaccgcagcttctgcgctttttccataagaacgaaatttggtacagaactgaacaagccgcggtggcgcgatgccagtgcaaaggacctgacgcccactgccaaagactggcgtcccaggcttgccgcaccaatccatgcctgcacggaggacgctgcctggaggtcgaaggtcatagactctgccattgcccggtcgggtacacgggtgcattctgcgacgtggataccaaggcgagctgctatgacgggcggggactgagctaccgggggttggcccgcaccactctgtcaggagcaccttgccagccatgggctagcgaggctacttacagaaacgtgactgcagaacaagctcggaactggggattgggtggacatgctttctgccggaacccagataatgatatcagaccgtggtgctttgtcttgaaccgcgaccgcctgtcatgggagtactgcgacctggcccaatgccaaacgccgacccaagccgcaccgccgacgcctgtgtctccccgtctgcatgtgcccctgatgccggctcagccagcacccccaaagccccagccgaccactaggactcctccgcaaagccaaactcccggagcactgccggcaaagcgggagcagccgccgtccctgacccggaatggaccgctctcctgcggacaaagactgcggaagtccctgtcctcaatgactcgggtggttggaggtctggtggctctccgcggcgctcacccatacatcgccgctctgtactggggacactcattctgcgcgggttcacttatagcgccctgttgggtcctgaccgcggcccattgcctgcaggatcgccctgccccagaggatctcactgtggtgctcggccaggagcgccgcaatcactcctgtgaaccatgccagaccctggccgttcgcagttaccggctccatgaggctttctcccctgtctcttatcagcacgatctcgccctcctgagactgcaagaggacgccgacgggtcgtgtgctcttctgtcgccttacgtgcaacctgtgtgcctgccatcaggagctgcaagaccgagcgagactaccctgtgccaggtggccgggtggggacaccagtttgagggtgctgaagaatacgccagctttctccaggaagcccaagtgccgttcctttcactcgaacggtgttcggcgcccgatgtgcacggatcatccatcttgccaggcatgctctgcgcaggcttcctcgaaggaggaaccgacgcttgtcagggagactcaggcggaccgctggtctgtgaggatcaggccgctgaacggaggctcacgcttcagggcatcatcagctgggggtccggatgcggggataggaacaagccgggcgtgtatactgatgtggcatactaccttgcgtggattcgagagcataccgtgtca

SEQ ID NO: 249805 - DNA, 1845 bp, synthetic construct
  misc_feature 1..1845: note = Description of Artificial Sequence: Synthetic coding sequence
  source 1..1845: mol_type = other DNA
atgcgcgctctgcttctgttgggattcctcttggtaagcttggaaagcacactgagtattcctccttgggaagcgcctaaagaacataagtataaggcagaagaacacacagtagttttgactgtgactggtgagccctgtcactttcccttccaataccatcgccagctgtatcataaatgtactcacaagggcagaccgggaccacaaccctggtgcgcaacgacacccaacttcgaccaggaccagaggtggggatattgtctcgagccgaaaaaggtgaaggatcactgctccaagcatagcccatgccaaaaaggaggcacatgcgtgaatatgcccagcggaccccattgtttgtgcccacagcacttgaccggcaaccattgtcaaaaggagaagtgcttcgagcctcagttgctgagatttttccacaagaatgagatttggtatagaaccgagcaggccgccgtagctaggtgtcaatgcaagggtcctgacgctcactgccagagattggcaagtcaggcatgtcgcaccaacccatgccttcacggcggccgctgtctggaggtggaaggccatcgcttgtgccactgccctgtgggttatactggtgccttctgtgacgttgataccaaagcttcctgctacgatggtaggggtctgtcttacagaggtttggcccgcacaaccctttccggtgccccttgccagccttgggcgtcagaagccacttaccgcaacgtcacggcagagcaggcgagaaactggggcctgggcggtcacgccttctgcaggaaccccgacaatgatatacgcccatggtgctttgtgctgaaccgcgacaggctgtcatgggagtattgcgacttggctcagtgccagactcctacccaagctgccccacctacacccgtgtcccctaggctgcacgtacctctgatgcctgcgcagccagctccacctaagcctcaaccgaccacaagaactcccccccagtctcagactcccggtgcattgcccgccaaaagggagcagcccccgtccctcactcgcaacggtccactttcatgcggtcagaggttgcgcaagagcctctctagtatgactagggtcgtgggtggtctggtggctctcaggggtgcccacccgtacatcgctgccctgtattggggacactccttctgtgccggctcactgatcgctccctgctgggtcctcacggctgctcactgtttgcaagataggccagcaccggaagatctgactgttgtgctgggtcaagagcgcaggaaccactcttgcgagccatgtcagactcttgccgttaggagctacaggctgcatgaagcattctcaccagtctcctatcagcacgacctcgcactcctgcgcctccaggaagacgccgatggatcttgcgccctgctgtccccgtatgtgcagcccgtgtgtttgccttccggcgcagccagaccaagcgaaaccaccctttgtcaggtcgcaggatggggtcaccagtttgagggagctgaggaatatgcatctttcctccaggaggcgcaggtgccattcctctccttggaaaggtgttctgccccggacgtccacggtagctctattttgccgggaatgctgtgtgctggcttcctggagggaggcactgacgcctgccaaggtgactctggaggtccactcgtgtgcgaggaccaggcagcggaacgcagactcaccctgcagggcatcatcagttggggtagtggctgcggagacaggaacaagcctggagtgtacacagacgtcgcctattacctggcatggatcagggagcacacagtttca

SEQ ID NO: 249806 - DNA, 1845 bp, synthetic construct
  misc_feature 1..1845: note = Description of Artificial Sequence: Synthetic coding sequence
  source 1..1845: mol_type = other DNA
atgagagctctgctgctgctgggattccttctggtcagtctggaatcgactttgtccatcccaccgtgggaagcacccaaggaacacaagtacaaggccgaagagcataccgtggtgctgaccgtcactggagagccgtgtcacttcccattccagtaccatagacaactgtatcataagtgtactcataagggccgcccgggtcctcagccgtggtgcgccaccactccgaactttgaccaggatcagcggtggggatactgcctggaaccgaagaaggtgaaggaccattgttccaaacattccccttgtcaaaagggaggaacctgcgtgaatatgccttcgggaccgcattgcctgtgcccccagcatcttactggcaatcattgccagaaagaaaagtgcttcgaaccacagttgctccgcttctttcacaagaacgagatttggtaccggactgagcaggccgccgttgccaggtgtcagtgcaaaggaccggatgctcactgccagcgtcttgcgtctcaggcatgcagaaccaacccatgtttgcacggaggtcgctgcctggaggtggaggggcaccgcctgtgccactgcccggtgggatacaccggcgcgttctgtgatgtggacaccaaggcctcctgctacgatggacggggactgtcataccgaggactcgccagaactactctctccggagcaccctgtcaaccgtgggccagcgaagctacttaccgcaatgtcaccgccgaacaggcacgcaactgggggctgggcgggcatgccttttgccgcaacccggacaatgatatcagaccctggtgcttcgtgctgaacagggaccggcttagctgggagtactgcgacctcgcccagtgccagactccgactcaagccgcgcccccaaccccggtgtcgccgcggctgcatgtgccgcttatgcctgcccagccggctccaccgaagccgcagccaaccacccggaccccgcctcagagccagacgccaggtgcgctgccagccaagagagagcagcccccatcactgacccgcaacgggcccctctcctgcggacaacggctgcgcaaatcactctcatcaatgaccagagtggtgggtggactggtggcgctgcgtggagcccatccatacatcgccgcactgtactggggacattctttctgcgccggatccctgattgccccctgttgggtgctgactgctgcccattgcctgcaggacagacctgccccggaggacctgactgtcgttcttggccaggaaagacgcaatcattcatgtgagccgtgccagaccctggcagtgcggagctaccggctgcacgaagcattctcccccgtctcataccagcacgacctggcacttctgcgcctccaagaagatgccgacggatcgtgcgccctgctgtcaccgtatgtgcaacccgtgtgtctgccatccggcgccgcccgcccgtcggaaaccactctgtgccaagtcgcagggtggggacaccagttcgaaggcgcagaggagtacgccagctttctgcaagaagcccaggtaccattcctgtccctggagcgctgttcggcccctgatgtgcacggaagctcgatcctcccgggaatgctgtgtgctgggttcctggagggcggaacggacgcttgccagggagactctggagggccgctggtctgcgaggaccaggcggctgagcgccgcctgactctccagggtatcatctcgtgggggtcaggctgcggcgatcgcaacaagccgggagtgtacactgacgtggcgtactacttggcctggatccgagagcacaccgtctca

SEQ ID NO: 249807 - DNA, 1845 bp, synthetic construct
  misc_feature 1..1845: note = Description of Artificial Sequence: Synthetic coding sequence
  source 1..1845: mol_type = other DNA
atgagggcccttctgctgcttggattcctcctggtgtcactggaatcaaccctgtcgatcccgccttgggaggcgccgaaggaacataagtataaggcggaggaacacactgtggtgctcaccgtgactggtgagccatgtcactttccattccaataccaccgccagctgtaccacaagtgcacccataagggccggccaggaccgcagccgtggtgtgcaaccactcctaacttcgaccaggatcaacgctggggctattgcctcgaaccgaagaaggtgaaggaccattgcagcaaacattcgccctgccaaaagggcggtacctgcgttaacatgccttccggtccacattgcctctgcccccagcaccttaccggcaatcattgccaaaaagaaaagtgcttcgagccgcagctcctgcgattcttccacaaaaatgagatttggtaccgcactgaacaagccgccgtcgcacgctgtcagtgcaagggacctgacgctcactgccagcgcctcgcgagccaagcgtgccggaccaatccttgcctgcatggaggacgctgcctcgaagtggaaggccatcgcctgtgccattgcccggtcggatacactggtgccttttgtgacgtcgataccaaagcaagctgctacgatggacgcggcctttcataccgcgggctggcccgcactacgctttcgggggctccctgccagccgtgggccagtgaggccacctaccggaacgtgacggccgaacaagcccggaactggggactgggaggacacgctttctgtagaaacccggacaacgatattagaccttggtgtttcgtgctgaatcgcgatagattgtcatgggagtactgcgacttggcacaatgccagactccaactcaggccgccccgccgactcctgtctcccctagactccatgtcccgttgatgccagcacagccggctccaccaaagccccagccgactacccggaccccgcctcagtcccaaactccgggagccctgccggcaaagagagaacagcctccatccctgaccagaaacggcccgctgtcctgtgggcaacgactgcgcaaatccctctcctcgatgacgagggtcgtcggcgggctggtggcgctgagaggagcgcacccatacatcgcggccctgtactggggacactcgttctgtgcgggatcacttatcgcgccttgctgggtgctgaccgccgcacactgcctccaagaccgtccggcaccggaggacctgaccgtggtgctgggccaggaaaggcggaaccactcttgcgaaccgtgccaaactctggcggtgcggagctacaggctgcacgaagcattctcgcccgtgtcctaccagcacgacctggctctgctcagattgcaggaagatgcagacggctcgtgcgccctcctgtccccctacgtccagcccgtctgtctgccgtcaggcgctgcacggccatcggaaaccacgttgtgtcaggtggcgggttggggacaccaattcgagggggctgaggaatacgccagctttctccaagaggcccaggtaccgtttcttagcctcgaacggtgttctgccccagacgtgcacggcagctcgatcctgccaggtatgctgtgcgctgggtttctcgagggaggaactgacgcctgccagggagatagcggaggaccgctggtgtgcgaggaccaggctgcggagcgcaggttgaccttgcaggggatcatctcatggggatccggatgcggagatcggaataaaccaggtgtttacaccgatgtggcctactacctcgcctggatccgggaacatactgtgtcg

SEQ ID NO: 249808 - DNA, 1845 bp, synthetic construct
  misc_feature 1..1845: note = Description of Artificial Sequence: Synthetic coding sequence
  source 1..1845: mol_type = other DNA
atgagggccctactcctcttgggctttttgctggtgtccctggagagcaccctttctattccaccctgggaagccccaaaggaacataagtataaggcggaggaacatacagtggtccttacagtgaccggggagccatgtcatttccccttccagtatcacaggcaattgtaccacaagtgcacccataagggacgtccgggccctcagccatggtgcgcaactacgccaaactttgaccaggaccagagatgggggtactgcctggagccaaaaaaggttaaggaccactgtagcaagcactccccctgtcagaaaggtgggacctgtgttaatatgccttctgggccccattgtctttgcccacagcacctcaccggcaatcattgtcagaaagaaaaatgcttcgagccacaattgctgcgcttctttcataagaatgaaatatggtaccgcacggagcaggcagcagtggctagatgtcagtgcaaggggcctgacgcgcattgccagcgtctggcctcccaggcctgtcgcactaatccttgcctccatggggggcgatgcctggaagtggagggtcaccggctgtgccattgcccggtcgggtacactggggctttttgtgacgtggatacgaaggcaagttgttatgatggcagaggcctgtcttaccggggattagccaggactacactgtccggcgcgccatgtcagccttgggcctccgaggcgacctaccgcaatgtgactgccgaacaggcacgtaattgggggttgggcgggcacgccttttgtcgcaatcccgataatgatattcgcccctggtgctttgtgctcaaccgcgatagattgtcatgggaatattgtgatttagcacagtgtcaaaccccaacccaagctgcgcctcccacccctgtgagcccccgtctgcatgtgccactgatgcccgcccaacctgcacctcctaaaccgcagccaacaacacggacacctccacagtctcagacccctggggccctaccagcaaaaagagaacagcctccttccctcactagaaacggccctctgtcctgcgggcagcggcttaggaagagtctaagcagcatgacacgggttgttggcgggctcgtggctttgagaggcgcccacccatacatcgccgccctgtattggggtcacagtttttgcgctggttccctcattgccccatgttgggtcctgacggccgctcactgtctgcaggatagaccggcaccagaggatctcacggtggtccttggacaggagaggcgaaatcattcttgcgagccttgccaaacactcgccgtacggtcttataggctacacgaagccttttctccggtaagttatcaacatgatctagctctactacgtttgcaagaagatgctgacggaagctgtgctttgctttctccatatgtgcagccagtttgtctgccgtctggcgccgcacgcccctctgagacgacgttatgccaggtcgccgggtggggtcaccagtttgagggagccgaagagtacgccagctttctacaggaggcccaggtgcctttcttgtccctggagcggtgttcggcaccagacgtacatgggtcatcgatacttccaggcatgctgtgcgcaggattcctggaagggggcaccgacgcttgccaaggggactccggaggacccctcgtctgcgaggatcaagctgcagaaagacgcctcacactgcaaggaattatctcatgggggagtggttgtggggatcgaaataaacccggggtgtacactgacgtggcatactatctcgcctggatccgggagcacacagtttcc

SEQ ID NO: 249809 - DNA, 1845 bp, synthetic construct
  misc_feature 1..1845: note = Description of Artificial Sequence: Synthetic coding sequence
  source 1..1845: mol_type = other DNA
atgcgagcgttgctgcttctcggtttccttttggtttcacttgaatcgacattgtcaattccaccatgggaagcacccaaagaacacaagtacaaagccgaagaacatacagtagtcttgacggtcaccggagaaccatgtcactttccattccagtaccatcgtcaattgtatcacaaatgtacacataaaggacgaccagggcctcagccatggtgtgcaacaacacctaactttgatcaggaccagagatggggatattgtctggaaccgaagaaggtaaaggatcattgctcgaaacattcaccgtgtcaaaaaggtggaacttgtgtgaatatgccgtccggaccgcattgtttgtgtccacagcatctgactggaaaccattgccaaaaagaaaaatgtttcgaaccacaactcttgcggttttttcataagaatgagatctggtaccgaactgaacaggcagcggttgcgcggtgccagtgtaagggaccagatgcccattgtcagagattggcttcgcaagcttgccgaaccaatccatgcctccatggcggccgttgtttggaggtggaaggacaccgactctgccactgcccagttgggtataccggtgcattttgcgatgtagatacaaaagcaagctgttatgatggcagaggattgagttataggggcttagcacggacgaccttgtcaggagccccatgccaaccatgggcaagtgaggctacttatcgaaacgtgacagcagagcaagcaagaaattggggattgggcggacacgcgttctgtagaaatccggataatgatatccgaccatggtgctttgtgctcaaccgtgatcgattatcttgggaatactgcgatcttgcacagtgtcagacacctacacaggcagcacccccaaccccagtaagcccgagattgcatgtccctcttatgccggctcagccagctccaccaaagcctcagcctactactaggactcctccacagtcacagacgccaggagctctgccagctaaaagggaacagcctcctagcttaacccggaacggaccactctcctgtggccaaagattgcgaaagagcctatcatcaatgactagagtggtggggggattggttgctctcagaggagctcatccgtacattgcagctctgtactggggacattctttttgtgcaggttcccttatcgctccgtgctgggttcttacagcagcacattgcctgcaagatcgaccagctccagaagatcttactgttgtcttggggcaagagaggcgtaatcattcatgtgaaccttgccaaacactggctgtaagatcttaccgtttgcatgaagcatttagtccggtctcttatcagcatgaccttgctttattgcggctccaagaagatgccgatggatcttgtgcactgttgtccccgtacgtacaaccggtgtgtctaccttcgggggcagctagaccatccgaaactactctatgccaagttgcaggatggggtcatcagttcgagggagcggaagaatacgcctcattcttgcaggaagctcaagttccatttctgagtctcgagagatgtagtgctccggatgtccacggctcatctatcttgcctggaatgctgtgcgctggatttttggaaggtggtaccgatgcttgtcaaggtgattccggaggcccacttgtatgtgaagatcaagctgctgaaagaagacttaccttacaagggattatcagttggggttcagggtgtggcgatcgtaacaaacccggggtgtacacagatgttgcatactaccttgcatggataagagaacacaccgtctct

SEQ ID NO: 249810 - DNA, 1845 bp, synthetic construct
  misc_feature 1..1845: note = Description of Artificial Sequence: Synthetic coding sequence
  source 1..1845: mol_type = other DNA
atgcgagcacttttgttgctggggttccttctggttagcctggagagtaccctgtcaattcccccctgggaagcacctaaggaacacaagtataaagccgaggagcacacagtggttctcaccgtgacaggcgagccttgtcacttccccttccagtatcacaggcagctctatcacaagtgcactcataaggggcgccccgggccgcaaccctggtgcgccaccacgcctaactttgaccaggaccaacggtggggatattgcctggaacctaagaaggtcaaggaccattgtagtaagcattcaccctgccagaagggggggacttgcgtgaatatgccatctggcccgcactgtctttgcccccagcacttgacaggaaaccactgccaaaaggaaaagtgtttcgagccccaactcttgcgctttttccacaaaaatgagatatggtatcgcaccgagcaagccgctgtggccagatgccaatgcaaaggacctgacgcccactgccaacgtctcgcaagtcaagcttgtcggacgaacccttgtctgcatggaggccgttgtctggaggtggaaggacatcggctatgtcactgccctgtgggatacactggggccttctgcgatgtggatacaaaggccagttgctatgacggccgcggactgtcttaccgaggtctagcgagaaccaccctctcgggggcgccatgccagccgtgggcttctgaagctacatatcggaacgtaaccgccgaacaggctcgtaattggggtctgggcggacacgccttctgcagaaacccagataacgatatacgaccttggtgcttcgtgctgaaccgcgaccggcttagttgggagtactgcgacttggcccagtgtcagactccaacacaggcagctcctcctaccccggttagtccccgccttcatgtgcctctcatgcctgcccagcccgcccctcccaaaccacagccaaccacccggacccccccacagagccagacacccggtgccctgccagcgaaaagagaacaacctccctccctgaccagaaacgggccactctcttgtggacaacggctgaggaagtcactgtcttccatgactagggtggtgggagggctggttgcactaaggggagcgcacccttatatcgctgcactgtattggggccattccttctgtgcgggtagtctgatcgccccatgctgggtgctcacagctgctcattgcctgcaggacagacccgcccctgaggacctcacagttgtcttaggtcaggaacgtaggaatcactcatgcgagccctgccagactttggccgtgcggagctatagattgcacgaggcatttagccctgtcagctaccaacacgacctcgcactgcttcgattgcaagaggacgctgatggctcctgtgctctcctctctccttacgtgcagcccgtttgtcttccatcaggcgccgcccggccgtccgagaccaccctctgccaggtggcggggtggggacatcagttcgaaggcgcagaggagtacgcttcctttctgcaggaagcccaggtgccctttctgtcccttgagagatgctccgctcccgacgttcacggtagtagtatcttgcctggaatgctttgcgcggggttccttgagggtgggactgacgcctgccagggtgattccggaggccccttagtgtgcgaggaccaggccgcagagcgccgcctgactctgcagggaatcatcagttggggatcaggttgcggagatagaaataaacctggtgtatacaccgatgtggcttactatcttgcctggatccgcgagcataccgtgtct

SEQ ID NO: 249811 - DNA, 1845 bp, synthetic construct
  misc_feature 1..1845: note = Description of Artificial Sequence: Synthetic coding sequence
  source 1..1845: mol_type = other DNA
atgcgtgccctgctcctgctcgggtttcttctggtatccctggagtcaaccctctctattccaccatgggaagcgccaaaagaacacaagtacaaggcagaggaacacaccgtggtgctcaccgtgaccggagagccgtgccattttccattccaataccataggcaactttaccataagtgcacccataaaggacgacccggacctcaaccttggtgtgcaactacccctaacttcgatcaagatcagcgttggggttactgccttgagcctaagaaggtgaaggatcactgtagcaaacattcgccttgccaaaagggcggtacgtgtgtgaatatgccctcaggaccacattgtctgtgtccgcaacaccttactggcaaccattgtcagaaggaaaagtgttttgaaccacaactgctgcggttttttcataagaatgaaatttggtacagaacggaacaggcagcagtggcacggtgtcagtgtaaaggtcctgacgcgcattgtcagagacttgcctcgcaggcctgtcggactaacccatgtctgcacggaggaagatgtcttgaagtggaagggcaccgactctgtcattgccctgtcgggtacacgggagctttctgtgacgtcgacactaaagcgagctgctatgatggtcggggtctgtcgtacagaggtcttgccagaactaccctgagcggtgctccttgtcaaccttgggcctcggaggccacctaccggaacgttactgcagagcaagcacgcaactggggcctggggggtcatgccttttgtaggaacccagataatgatattagaccttggtgttttgtccttaatcgcgatcgactttcctgggagtactgcgacctggcacaatgtcagactccgacccaggcagcaccacccactcctgtgtcccctaggcttcatgtgccactgatgccggcacagccagccccacccaaacctcagccaaccacccgaactccgccacagtcccagacgcccggtgccttgccggcaaagcgggaacaacctccatccctgacccgcaacggaccgctttcttgcggtcagcgcctgagaaagagccttagctcgatgacccgtgtcgtgggtgggcttgtcgcactgcgcggtgcccatccgtacattgctgctctttactggggtcactcattttgcgcaggatcactgattgcaccttgttgggtcctgactgccgcgcactgccttcaagatagacctgcccctgaagatctgaccgttgtgcttggacaggagagacgaaaccattcctgtgaaccttgtcaaaccctcgcagtgcgctcttaccgcctgcacgaagcatttagccccgtctcataccagcacgacctggcattgctgcgacttcaagaagatgcagatgggtcgtgcgcgctcctttccccttacgtgcagcctgtttgcctgcctagcggtgcagcacgaccttccgaaactactctctgtcaagttgcgggttggggtcaccaatttgagggcgccgaagagtacgcatccttcctccaggaagcacaggtccctttcttgtcccttgagcggtgttcggctcctgacgtgcatgggtcctcgattcttcctggaatgctttgtgcaggttttttggaagggggaaccgacgcatgtcagggagactcaggaggaccactggtgtgcgaggatcaagccgcggaaaggcgcctcacgcttcagggaattatctcttggggttcaggttgcggtgataggaataagcctggggtgtacactgatgttgcctactaccttgcatggatcagggaacatactgtgtcg

SEQ ID NO: 249812 - DNA, 1845 bp, synthetic construct
  misc_feature 1..1845: note = Description of Artificial Sequence: Synthetic coding sequence
  source 1..1845: mol_type = other DNA
atgcgcgcccttctgttgttgggcttcttgctggtctcccttgagagcactctgtccattccgccgtgggaggcgcccaaagaacataagtataaagcagaggagcacaccgtggtactgacagttacaggcgaaccgtgccatttccccttccagtatcaccgacaactttaccacaagtgtacccacaagggtcggccgggtccgcagccgtggtgtgccactaccccgaactttgatcaggatcagcgctggggttattgtctggagcccaagaaagtcaaagatcactgctccaagcactccccctgtcagaagggcggtacttgtgtgaacatgccctctggcccccactgcctgtgcccccaacatctgactggaaaccattgccagaaggagaagtgcttcgagccccagctgctgcgcttctttcataagaacgagatttggtacagaacagagcaggccgccgtggctaggtgccagtgcaaaggcccagatgctcactgccagcgattagccagtcaggcctgccggactaacccgtgcttgcatggcggccgatgccttgaagttgagggccatcgactgtgtcattgcccagttggttacaccggagccttctgcgatgtcgatacgaaggcgagctgctacgatggacgtggcttgtcctaccgcggtctggctcgcacaacgttatccggcgccccctgccagccttgggcctccgaggccacgtataggaatgtgaccgcggagcaggcccgcaactggggcttaggcggacatgcattctgccgaaaccccgataatgatatccgtccttggtgtttcgtgcttaacagggatcgcttgagctgggagtattgtgatctggcgcagtgccagacgcccacccaagcggccccacccacccccgtctccccacgcctacatgttccacttatgcctgcgcagccagccccgccgaagccacagccgacaacacgaacaccaccacagtcgcaaacgcctggtgcgttgccagccaagcgggaacagccgccatcgctaactcgaaacggtccattgagctgcggacagcgcttgaggaaatccctgagcagcatgacgcgggtagtgggcggtctggttgccttgcgcggagcccacccgtacatcgctgctctttattggggacatagcttctgcgcaggctccttgattgcaccttgctgggttttgaccgccgcgcactgcctgcaggatcgacccgcaccggaggatctgactgtggtcctcggacaggagcggcgaaatcactcgtgtgagccatgtcagacgttagctgtccgctcgtatcgccttcacgaggccttctccccagtgtcgtaccaacacgaccttgccttgctgcgcctgcaggaggacgcagacggttcctgcgcccttctgtcaccttatgttcagcctgtgtgcctgccttccggcgccgctcgccccagcgagacaactctgtgccaggtcgcaggatggggccatcagttcgaaggcgctgaggagtacgcttcgtttcttcaggaagcccaagtcccgttcttgtccctggaacgttgctccgctccggatgttcacggatcctccatcctgccgggtatgctgtgcgcgggcttcctggaaggcggaacagacgcatgccagggtgattcgggcggaccgttggtttgcgaggatcaggccgccgaacgccggctgacgttgcaaggcatcatatcttggggctctggctgcggcgaccgtaacaagcccggcgtctacacagacgtagcttattatctggcatggatacgggagcacaccgtgtcc

SEQ ID NO: 249813 - DNA, 1845 bp, synthetic construct
  misc_feature 1..1845: note = Description of Artificial Sequence: Synthetic coding sequence
  source 1..1845: mol_type = other DNA
atgcgcgcgctgctgttgctgggtttcctgctcgtgtccctggagtccaccctgtcaatcccaccctgggaggctcctaaggagcacaaatacaaggcggaagagcatacagtggtcctgactgtgaccggagagccctgccacttcccgttccagtaccatcgacagctctatcacaaatgcacccacaaaggccgcccgggcccccagccttggtgtgccaccacacctaatttcgatcaggatcagagatgggggtattgtttggagccgaagaaggtcaaggaccattgttcaaaacattccccatgtcagaaaggggggacatgtgtgaacatgcctagcgggcctcattgcctctgtccacagcatctgacaggaaatcactgccaaaaggaaaagtgcttcgaacctcaactgttgcggtttttccataaaaatgaaatatggtaccggaccgaacaggctgccgtggcacggtgtcaatgcaagggtcctgacgcccactgccaaagattggcaagccaggcgtgtcgcactaatccatgtctgcacggtgggcgatgcctcgaggtggaagggcatcgcctgtgtcactgtccggttgggtacaccggggccttttgcgatgtggacaccaaggcttcctgctatgacggtcgggggctttcttataggggattggcacggaccaccctgtccggagcaccttgccagccgtgggcctccgaagcaacctatagaaacgtgacagccgaacaggcccggaactgggggctcggtggacacgcgttttgccggaatccagacaacgatatcaggccatggtgttttgtcttgaatcgcgatagactgtcctgggagtactgtgacctggcgcagtgtcaaacacctacccaggcagccccacctactccagtgtccccccggttgcacgtccctcttatgcctgctcaacccgccccacccaagccgcagccgaccaccaggacacctccccagtctcagactcctggtgcactgcccgccaagcgggaacagccaccctccctcacgcgcaatggcccactctcctgtggccagaggttgcgcaaaagtctctcaagcatgacccgcgtggtcggaggactggtagccctgcgaggggctcacccttatatcgcggccctctattggggacacagtttctgcgctggttccctcatcgctccctgctgggtcctgacagcagcacactgtctgcaagaccgacccgcaccggaggacctgacggtagtcctgggccaagagaggagaaatcacagctgtgagccctgccagactctggcagtgcggtcctacagactgcacgaagcctttagccccgtgagctatcagcacgacctggcattgcttcggctgcaggaggatgctgacggtagctgcgccttgcttagtccttacgtgcagcccgtctgcctgccatccggggctgcaagaccgtccgagaccacattgtgtcaggtggccgggtggggccaccagttcgagggagccgaagaatacgccagctttctccaggaggctcaggtcccattcctgagcctggagcggtgttccgcgcccgatgtgcacggctcttctatccttcctgggatgctgtgcgctgggttccttgagggtggcacagacgcttgtcagggcgatagtggtggcccactggtgtgcgaggatcaggctgccgagcgcaggcttacactgcagggaatcatcagttggggctccggctgtggcgacagaaataaaccaggggtctacacagatgtcgcgtactatctggcttggatccgggagcacacagtttcc

SEQ ID NO: 249814 - DNA, 1845 bp, synthetic construct
  misc_feature 1..1845: note = Description of Artificial Sequence: Synthetic coding sequence
  source 1..1845: mol_type = other DNA
atgcgcgccctcctgttgttagggtttttgctagtgtcattggaaagcaccctgagtatcccaccatgggaagcccccaaagagcacaaatacaaagcggaagagcatacggtggtgctgacagtcactggggagccttgccatttcccatttcaatatcataggcagctgtaccataagtgtacacataaaggccggccaggtccacaaccttggtgcgctactacacctaactttgaccaggaccaaaggtggggatactgcctggaaccaaagaaggtcaaggaccattgcagcaagcattctccctgtcagaaaggcggaacctgcgttaatatgccaagcggcccacattgtctgtgtccacagcacctcacaggcaatcattgtcagaaagagaagtgctttgagccacagttgctccgattctttcataagaacgaaatatggtacaggactgagcaagccgcggtggcacgatgtcagtgcaagggccctgatgctcattgtcagaggctggcatcacaggcatgccgtaccaacccgtgcctgcatggcgggagatgcctcgaggtagaggggcaccgcttatgccactgtcctgttgggtataccggcgcgttctgcgatgtcgacaccaaggcatcctgctatgatggtagagggctcagctacaggggcttggcaaggacaacgctcagtggtgcgccctgtcaaccttgggcttccgaagcaacttatcgtaatgtaacagcagaacaggccagaaactggggactgggaggccacgccttctgtcggaaccctgataatgacatcagaccatggtgtttcgtcctgaaccgcgatcgtctgtcctgggaatactgcgacttggcacagtgtcagaccccaacccaggcagcaccgccaacacccgtttcccctcgcctgcacgtgcctctgatgcctgcgcagcccgccccacctaaaccgcagcccactactcgtacacccccacagagtcaaacccctggcgcactgcccgccaaaagggaacagccacctagccttacgagaaatggacccctgagctgtggccagaggctccggaagtctttgtcttccatgactagggtggtggggggattagtggcactgcggggggctcatccttacattgccgccctgtactgggggcactccttttgtgccggatcccttattgccccatgctgggtcttaaccgctgcccattgcttgcaggatcgtcctgcaccagaggatctgacagtcgtgttgggccaagaaaggcgcaaccatagttgcgagccctgtcagaccctcgcggtcagatcataccggctccacgaggccttcagccctgtgtcgtatcagcatgacttggcgttgcttcgattacaagaggacgctgatggaagctgtgctctgctctctccctatgtacaacccgtgtgtcttccatctggcgccgctaggcccagtgaaaccaccctgtgccaggttgcagggtgggggcaccagttcgaaggcgccgaggagtacgcctcctttctgcaggaggcccaggtccccttcctaagcttagagaggtgttccgcgcccgatgtccacggttctagtatcttaccggggatgctgtgtgctggcttcctggagggaggaacagatgcatgccaaggtgactctggcggcccactagtatgcgaggatcaagccgctgaacggcgtctcaccctgcagggcatcatatcatggggtagcgggtgcggcgatcgtaacaaaccgggcgtgtacaccgatgttgcttattaccttgcatggatccgtgagcatactgttagc

SEQ ID NO: 249815 - DNA, 1845 bp, synthetic construct
  misc_feature 1..1845: note = Description of Artificial Sequence: Synthetic coding sequence
  source 1..1845: mol_type = other DNA
atgagggccctcttgctgctcggctttcttctggtcagcctcgagagcaccctgagcatccccccctgggaagcgcctaaggagcataagtataaggccgaggaacacaccgtagtacttactgtgaccggcgaaccctgccacttcccatttcagtatcaccggcagctttaccacaaatgtacccacaaaggcagaccaggcccacaaccatggtgcgccacgactcctaactttgatcaggaccaaaggtgggggtactgcctcgaacccaaaaaagtgaaggatcattgctcaaaacacagtccatgccagaaaggagggacctgtgtgaacatgccatctggccctcactgtctgtgtccacagcacctgacaggtaatcactgtcagaaagaaaagtgttttgagccacagctgctgaggtttttccacaaaaatgagatttggtaccggaccgaacaggccgctgtggcccggtgccagtgcaaggggccagacgctcactgtcagcgcctggcgagccaggcatgccgcactaatccctgtctccacggcggaaggtgcttggaggtcgaaggacaccggctgtgtcactgcccggttggatacacaggagccttctgtgatgtagatacaaaagctagttgttatgacggtcggggcttgtcctatcgaggcctggcccggactaccctgtccggagcgccctgccagccatgggcaagcgaggccacgtaccggaacgtcacagctgagcaggctaggaactggggtctgggaggacatgccttctgccgaaaccccgacaacgatatcagaccatggtgcttcgttctgaacagagaccgcctttcttgggagtactgtgatctcgcacagtgccaaacccccacacaggctgcgcctccaactccggtcagtccccggcttcatgtgcccctgatgcctgcgcagccagccccaccgaaaccgcagccaacaacacggactcccccgcagagtcagacgccgggggctctccccgctaaaagggaacaaccaccaagcctgactcgcaacggccctctcagttgcggccagcgactgaggaaaagccttagcagtatgacccgagttgtggggggtctcgttgctcttaggggcgcccacccttatatcgcagctctgtactggggccactctttttgcgctggaagtctcattgccccttgctgggttctgacagctgcacactgtctgcaggatcggcctgcgccagaagacctcacagttgtgctggggcaggaacgaaggaaccatagctgtgaaccgtgtcagaccctggccgtgagatcttaccgactgcacgaggcgttctctcccgtaagctaccagcacgacctggctctgttgaggctccaggaggatgctgacggcagctgcgccctgctctctccttatgttcagcccgtgtgcttgccgtctggcgctgcacgccctagcgagacaacattgtgtcaggtggccggttggggtcatcagttcgagggcgctgaggagtatgcaagttttctgcaagaagcccaggtacctttcctgagcctggaaaggtgttcagcccctgatgttcacggttccagtatattgcccggaatgctgtgtgctggattccttgagggagggacagacgcctgtcagggcgactctggtggcccactggtatgtgaggatcaggcagctgaacggaggttgactctgcaggggataatcagctgggggtcaggctgcggggaccggaacaagccgggggtttacacagatgtggcatattacttggcatggataagggaacacactgtttcc

SEQ ID NO: 249816 - DNA, 1845 bp, synthetic construct
  misc_feature 1..1845: note = Description of Artificial Sequence: Synthetic coding sequence
  source 1..1845: mol_type = other DNA
atgcgtgcacttttgcttcttggctttctcctggtgagcctggaatccacgctgtcaatccctccgtgggaagccccgaaagaacacaagtacaaggcagaggaacacaccgtggtgctcacggtaaccggcgagccctgtcactttccttttcaataccatcgtcagctgtaccacaaatgtactcataagggtagacctgggccccaaccttggtgtgctaccacccctaactttgatcaggaccagcgttggggctactgtctggagccgaaaaaggtgaaagaccactgcagcaagcattcaccatgtcaaaagggaggaacttgtgtgaatatgccttcggggcctcattgcctttgtccacagcatctcactggtaatcactgccaaaaggaaaaatgtttcgaaccacaacttcttcgcttttttcacaaaaacgagatctggtacagaactgaacaagcagccgttgcgcgctgccaatgcaaggggccagatgcacattgccagcgcctcgcttcgcaagcatgcaggacgaacccgtgccttcatggaggaagatgtcttgaggtggaaggacatcgactttgccattgcccagtgggttataccggtgccttttgtgatgtcgacaccaaggcatcctgttacgacgggcggggactcagctatcgggggcttgctcggaccaccctgagcggcgcaccttgccaaccttgggcgtccgaggctacctatcgcaatgtcactgcagagcaagcgcgaaattggggcctgggagggcacgcattttgcagaaacccagataatgatatccgtccatggtgttttgtcctgaacagggatcgtcttagctgggaatactgtgacctggcccaatgccagactcctactcaagctgcacctccaactcctgtctcgcctcgccttcatgtccctttgatgccagcacagccagcaccgccgaagccccagccgactacccgcactccacctcagagccaaacccctggggcactgcctgccaagcgagagcaacctccctcacttaccagaaacggcccgttgtcttgtggccaacggcttcgcaagtcgctcagcagcatgacccgcgttgtgggcggtcttgtcgcattgaggggggcacatccctacattgccgcactgtactggggccattccttctgtgccggttcgcttattgccccatgctgggtgctcaccgcagcacattgcctccaggatagaccagcacctgaagatctcactgtggtcctgggtcaggaaagacggaaccattcatgtgaaccatgtcagactcttgccgtgcggtcgtaccgccttcacgaggcattttcgcccgtttcctatcaacatgatctggcgcttctgcggcttcaagaagatgccgacgggtcgtgtgcactgctgtcaccttacgttcagcccgtgtgccttccttccggagcagcgcgtccatcggaaaccactctgtgtcaagtagctgggtggggtcatcagtttgaaggagcagaggaatacgcatccttccttcaagaagcacaagtgccattcctttcgctggaaagatgtagcgcacctgacgtgcacggaagctcgattcttccaggtatgctctgcgcgggatttctggaagggggcaccgatgcatgtcaaggcgacagcggaggtcccttggtgtgtgaagatcaagcagcggaacgcagattgactttgcagggaataatctcatggggatcgggatgtggggatcgaaacaagcccggagtgtacaccgatgtcgcatactaccttgcctggatccgcgagcatactgtgagc

SEQ ID NO: 249817 - DNA, 1845 bp, synthetic construct
  misc_feature 1..1845: note = Description of Artificial Sequence: Synthetic coding sequence
  source 1..1845: mol_type = other DNA
atgcgggcgctacttttgctggggtttcttctggtttcactggaaagcaccctgtcaatacccccctgggaggctcccaaagaacacaagtacaaggcagaggagcacactgtcgtactcactgttacaggagaaccttgccatttcccgttccagtatcatcggcaactctaccataagtgtactcataaaggtaggcctgggccccagccgtggtgcgcaacgacccctaacttcgaccaggatcagcggtggggatactgcctcgagccaaagaaagtgaaagatcactgcagcaaacattcaccatgccagaagggtggcacatgcgtgaatatgcctagcgggccccactgcctatgcccccagcatttaacgggaaaccattgtcagaaagagaagtgcttcgaaccccaactgctcagatttttccataagaatgaaatctggtatcgaacagagcaagccgccgtggcgaggtgccaatgcaaaggccccgacgcgcactgccagcggctggccagtcaggcttgccgaaccaacccctgtctccacgggggtagatgtctagaagtagaaggacatcgcttatgccactgtcctgtgggctacacaggcgcattctgtgacgttgacaccaaggccagctgttacgacgggagaggactttcatacaggggcctcgcccgaacaacactcagcggggcgccatgtcagccttgggcatcggaggctacatacagaaatgtgacggcagaacaagcaagaaattggggcctgggaggccatgcattctgccggaatccggacaatgacatccggccgtggtgcttcgtgctaaatcgcgatagactctcatgggagtattgcgacctggcccagtgccagactccaacccaggcggcccccccaactccggtgagtccacggttgcatgtcccccttatgcctgcccagccagccccccccaagccgcagcctacgacgaggaccccgccccaaagccagaccccaggtgctctgccagcgaaacgagagcagcctcccagcctcactcgcaatgggcctcttagttgcggtcaaaggctgcgaaaatcactgagctcaatgacaagagtggtgggcggcctggtggccttgaggggcgcacacccttacatcgctgcattgtattggggacatagtttctgtgccggctctttaatcgcaccatgttgggtcttgactgcagcacactgtttgcaagaccggcctgctccagaggatttgaccgttgttctaggccaggagcgtcgtaaccactcttgtgagccctgccagacccttgcagtgcggagttaccggcttcacgaggcctttagtcctgtgagctaccagcacgacctagcgttgctacggctgcaagaggacgctgacggaagttgcgcactgctgtctccatacgtgcagccggtgtgcctgccttccggggcagctaggccttctgaaacgacattatgtcaggtggccgggtggggacatcagttcgagggtgctgaagagtacgcctcattcctgcaggaagcccaggtgccctttttgtcactcgaaagatgctcagcccccgatgtgcatggaagcagcatcctgccaggaatgttgtgtgcaggcttcttggaaggggggacagatgcctgtcagggcgattctggaggtccgctcgtgtgcgaggaccaggcagctgaaaggagactcaccctacaggggatcatttcttggggatccggctgtggcgatcgcaataaacctggtgtttataccgatgtcgcatattatctggcgtggatcagggagcataccgtgtcc

SEQ ID NO: 249818 - DNA, 1845 bp, synthetic construct
  misc_feature 1..1845: note = Description of Artificial Sequence: Synthetic coding sequence
  source 1..1845: mol_type = other DNA
atgcgtgctcttcttctccttggattccttcttgtgagcctcgaatccactctgagcatacccccatgggaagcaccaaaagagcataagtacaaggccgaggagcacactgtagtgctcactgtcactggggaaccttgtcactttccgttccaataccaccgtcagctttaccataagtgtacgcataagggtcggcctggaccgcaaccctggtgtgcaaccactccaaatttcgaccaagatcagaggtggggctattgtctggagcctaagaaggtgaaggatcattgctccaaacactcaccctgtcaaaagggcggcacgtgtgtgaatatgccatcaggaccccattgtctttgtccacagcatctcactggcaatcactgccaaaaggagaaatgttttgaaccccagcttcttcgatttttccacaagaatgagatatggtaccgtaccgagcaggcagcagtcgcacgctgccagtgtaagggccctgacgcgcattgtcagagattggcaagccaagcatgtcgaaccaatccttgcctgcatggagggaggtgtcttgaagttgaaggtcacaggctgtgccattgtccagtgggctacaccggcgctttttgcgacgtggataccaaagcgtcatgttacgatggtcgtggcctctcatacagagggctcgcaagaaccactctttcgggcgcaccgtgtcaaccttgggcctcggaggcaacttaccgcaatgtgaccgcagaacaggcacggaattggggtttgggaggacacgccttttgccgtaatccagataacgatattcgtccttggtgttttgtgctgaatcgggaccgcctttcgtgggaatactgtgatttggcgcagtgtcaaacccccacccaagcggcaccaccaaccccagtgtcgccacggctccatgtgcctctcatgccagcgcaacctgcgccaccgaaacctcaacctacgacgcgcacgccaccccaatctcaaaccccgggggcactgccagctaagcgagaacaacctccttcgctgactcgcaacggcccactttcatgcggacagaggctccgtaaatcgttgtcgtcgatgacccgggtggtgggaggattggtggcccttcggggcgcacatccttacattgccgcactgtattgggggcactccttttgtgctggatcactgattgcaccatgctgggtgcttactgccgcacattgcctgcaagatagaccggcccccgaagatttgaccgtggtgctgggacaagaaagaagaaaccattcctgtgaaccgtgccaaaccctggcagtgagaagctacagactgcatgaggcattctccccagtgtcataccaacatgatcttgcactgcttaggctgcaggaggatgcagacggttcgtgtgcactgctttccccatacgtgcagcctgtgtgtctgccttcgggcgcagcacgtccatcggagacgactctctgtcaggtggcaggctggggtcatcaatttgaaggagcggaagagtacgcctcgtttctgcaagaagcgcaggtcccttttctttcccttgagcggtgctcggccccggacgtccacgggtcatccatcctgccaggaatgctgtgtgcagggttcctggagggtggtaccgacgcatgccagggtgattcgggtggaccactcgtgtgtgaggaccaggccgcagagcgccgcctgacgcttcaaggaatcattagctggggctccggatgcggggacagaaacaagccaggtgtgtacaccgatgtggcctactacctcgcatggatccgggaacacactgtcagc

SEQ ID NO: 249819 - DNA, 1845 bp, synthetic construct
  misc_feature 1..1845: note = Description of Artificial Sequence: Synthetic coding sequence
  source 1..1845: mol_type = other DNA
atgcgggcattgctgctcttgggcttccttctggtgtcgctcgagagtacactgtccatacctccatgggaggcgcccaaagaacataagtacaaagccgaagagcatacagtcgtactgactgtcaccggagagccttgtcattttccattccagtaccacaggcagctgtaccacaagtgtacccacaagggacgccccggcccccagccgtggtgtgctaccacccccaactttgaccaggatcaacgctggggatactgtctggaacccaagaaagtcaaagaccactgctcaaaacattcaccgtgccagaagggcggaacttgtgtgaacatgcctagtggaccgcactgcctgtgtccccaacatttgaccggaaaccactgtcagaaggagaaatgttttgagccgcagctgttgagatttttccacaagaacgagatctggtaccggaccgaacaggccgccgtcgctcgctgccagtgtaaggggccagatgcacattgccagaggctcgcttcacaggcttgcaggaccaatccttgcctgcatggcggtcgttgtctcgaggtggaaggccatcggctctgccattgccccgtgggatataccggggctttttgcgatgttgataccaaggcatcttgttatgatggccgcggtttaagctatcggggcttagcaagaacaactttgtctggcgccccttgtcagccgtgggccagcgaagcgacctataggaatgtgacggcggagcaggcaaggaactggggactggggggccacgccttttgccgaaacccagataacgacattagaccctggtgtttcgtgctcaacagggataggctgtcatgggagtattgtgatctggcccaatgtcaaaccccaacgcaggccgcacctcccacgccggtgtccccaaggctccacgtcccactgatgcctgcacagcccgccccgcccaaaccacagcctacaacgagaacccccccacagtcccagacacccggagccttgccagccaaacgcgagcaacccccctcattgactagaaacggaccccttagctgcggtcagaggctgaggaagagcctgtcctcgatgacacgggtggtcggtggcttagtggcactccgtggtgcccacccttatattgccgcgctgtattggggccactcattttgtgccggctcactaatcgccccttgctgggtactgaccgccgctcactgtctccaagacaggcctgcccctgaggaccttacggtcgtgctcgggcaggagcgcaggaatcacagttgtgaaccttgccaaacactagccgtgcggtcatatcggttacatgaggcgtttagccctgtgtcctatcaacatgacctggcgctgctgagactgcaagaagacgctgacggttcttgcgcgttactgtccccctacgtacagcccgtttgcctaccctccggggctgctcggcctagtgagacaacactttgccaagtagcaggctggggccatcagtttgagggtgcggaggagtatgcctctttcctgcaagaagcacaggtgccattcctatctcttgagcgctgctccgcacctgacgtccacgggagttccatcctccccgggatgctctgtgcaggctttctggaggggggtacagatgcctgccagggggattctggcggacccttggtgtgtgaggaccaagccgctgagcgacgcctcacattgcaaggaataatctcgtggggtagcggctgtggagataggaacaagccaggtgtctacactgatgttgcctattacctggcttggatccgcgaacacaccgtgtcg

SEQ ID NO: 249820 - DNA, 1845 bp, synthetic construct
  misc_feature 1..1845: note = Description of Artificial Sequence: Synthetic coding sequence
  source 1..1845: mol_type = other DNA
atgcgtgctcttctattgctgggctttctcctggtctccctggaatcgacactttcaatacccccatgggaagccccgaaggagcacaagtacaaggcggaggaacataccgtggtgctgactgttacgggtgagccctgccatttcccctttcagtatcatcgtcagctctaccacaagtgtacccacaagggtcggcctggaccgcaaccgtggtgcgccacgacgccaaacttcgaccaggaccagcgctggggttactgtttggagccgaaaaaggtgaaggaccattgtagcaagcacagtccctgccaaaagggaggcacttgcgtgaacatgccgtctggccctcattgcctttgccctcagcacctcaccggcaatcattgccagaaggagaaatgcttcgagcctcaactgctccgcttcttccacaagaacgagatttggtataggaccgagcaagctgccgttgctaggtgccagtgtaaaggtcccgatgcgcactgccaacgtctggcatcccaggcctgccggactaacccgtgtctgcacggtggacgttgcctcgaggttgagggccatagactgtgccattgccccgtcggttacactggcgctttctgtgacgttgataccaaggcttcgtgttacgatggccggggtctgtcctaccgcggattggctcgtacaaccttgtctggtgctccctgtcagccctgggcttccgaggcaacctatcgcaacgtcactgctgagcaggccagaaactggggtctgggtggccacgccttctgccgcaacccggacaacgatatccgtccttggtgtttcgtgctcaacagggatcgattgtcatgggagtactgtgacctggcacagtgccaaacgccgacccaagcagcgccaccgactcctgtctcgcctcgcttgcacgtgcctttgatgccagcacagcctgcccccccgaaaccccaacccactacccgtactccgcctcagtctcagactccaggcgctctccccgctaagcgcgaacagccccctagtctaacccgcaacggtccgctcagctgcggtcagcgtctccggaagtccctgtcgtctatgaccagggttgttggtggccttgtggctctcagaggagcccacccatatattgccgctctctactgggggcattctttttgtgcgggaagtttgatcgcaccttgctgggtcctcaccgcggcacattgcctgcaggaccgcccagctccggaggacttgaccgtcgtactgggccaagagcgccgtaaccatagctgtgagccctgccagaccctcgcggtccgatcttacagattacacgaggcctttagccctgtctcttaccagcacgacctcgccctgctccggcttcaggaggatgccgacggctcctgtgcgttgctttcgccttacgttcagcctgtctgcctccccagcggtgccgctaggccctccgagacaaccctgtgtcaggtggctggctggggtcaccagttcgaaggcgctgaggaatatgcttctttcctgcaggaggctcaggtcccattcctttccctggaaagatgctctgctcctgatgtgcacggctcgtcaattctgcccggcatgctctgcgctggattcctggagggcggtactgatgcgtgccaaggcgattccggcggtcctctggtctgtgaggatcaggccgcagagcgtcgtctgactctgcaaggaattatcagttggggttctggttgtggcgaccgaaacaaacccggtgtttatacggatgtggcctattatctggcttggatccgggagcatactgtctct

SEQ ID NO: 249821 - DNA, 1845 bp, synthetic construct
  misc_feature 1..1845: note = Description of Artificial Sequence: Synthetic coding sequence
  source 1..1845: mol_type = other DNA
atgcgggcactactgctcttaggtttcctcctggtctctcttgagtctacgctgtcgatacctccttgggaagcacccaaggagcataaatacaaggctgaggagcacactgtggtgctgacagtgaccggtgaaccctgccacttcccctttcagtatcaccgccagctttatcacaagtgcacacacaaaggtcggccggggccgcagccctggtgtgccaccacccccaatttcgaccaggaccagaggtggggctattgcttggagccaaaaaaggtgaaagaccattgtagcaagcattccccgtgccagaagggcggcacctgcgttaatatgccgtccgggcctcattgcctgtgccctcagcacctgacggggaaccactgccagaaggagaaatgctttgaaccccagctattacgtttcttccataagaacgaaatttggtataggacagagcaggccgcagtcgcacggtgccagtgtaaagggcccgatgcccactgtcagcgtctggcgtcacaggcttgtagaaccaacccttgcttgcacggcggacggtgtctggaggttgagggacaccggttgtgtcactgtcctgtgggctacactggcgcattctgtgacgtggacactaaagcctcctgctatgatgggcggggtctcagttacagaggcctcgctaggacaaccctgtccggagccccctgtcagccctgggccagcgaagcaacctaccgcaatgtgaccgcagagcaggccagaaactggggcctaggcgggcacgctttttgtcgcaacccagataacgacataaggccatggtgtttcgttcttaaccgcgaccggctgtcttgggaatattgtgacctggcccaatgtcaaactcctacgcaggcagcccctcccactccagtgtctcctcgcctccacgtacctctgatgcccgctcagccggccccgcccaaaccacagcctactacaaggacacccccccagtcccagacgcccggggccctgccagctaagcgagagcagcctccctcattgacccgcaacggaccccttagttgcgggcagaggctacggaagtctttgagctccatgactagggttgtcggtgggctagtcgcactccggggagcgcacccatacatcgctgccctgtattggggacattctttctgtgcaggctccctgatagctccctgttgggtgcttacggcggcccattgcctgcaggatcgaccagctccggaggacctgaccgtagtgctgggtcaagagcggcggaatcattcttgcgagccatgccagacacttgccgtgaggtcctaccgactgcacgaagccttctcaccagtgtcatatcagcacgacctagctctgttgaggctgcaggaagacgccgacgggagctgtgccttgcttagtccctacgtgcagccggtctgtctcccgtctggcgctgcaaggccgagcgagacaacactgtgtcaggtggccggctggggtcatcagttcgaaggcgctgaagaatatgcttccttcctgcaggaagcgcaggttccttttctgtcattggagcggtgcagtgctcccgacgtgcacggtagttcaattttgccaggaatgctgtgtgctggcttcttggagggtggcaccgatgcttgtcagggggacagcggcggaccactcgtgtgcgaggaccaggccgccgaacggcgactgacgctccaggggattatctcttggggtagcggctgtggcgacagaaataaaccgggagtgtatacagacgtggcttactatctggcctggatccgtgagcatactgtaagc

SEQ ID NO: 249822 - DNA, 1845 bp, synthetic construct
  misc_feature 1..1845: note = Description of Artificial Sequence: Synthetic coding sequence
  source 1..1845: mol_type = other DNA
atgcgggccttgctgctgctcgggttcctgctggtgtcgttggagtccactctgtcgatccccccttgggaggcacccaaggagcacaaatacaaggctgaagaacacactgtcgtgctcaccgtgactggtgagccttgccatttcccgttccaataccatcgacaactgtatcataagtgcacgcacaagggacggccgggaccccagccttggtgcgcgaccactcctaacttcgaccaggatcagcggtggggttactgcctcgagcccaagaaagtgaaagatcactgcagcaagcattcgccttgccagaagggaggaacctgcgtgaatatgccatcgggaccacactgtctctgcccacaacacctcactggcaaccattgtcagaaggaaaagtgcttcgaaccgcagctgctccggtttttccacaaaaatgaaatatggtaccgcactgaacaagcagctgtggctcggtgccagtgtaagggaccggacgctcactgccagagactggcgagccaagcatgccgcaccaacccgtgcttgcatgggggcagatgcctggaggtggaaggtcacagactgtgccactgcccggtcggctacactggggcattttgtgatgtggacacgaaagcatcatgctacgatggcagaggcctgtcctaccgcgggttggcccgcaccacgctgtcgggagccccatgccagccatgggcatcagaagctacctacaggaacgtgacggcagagcaggcgcgcaactggggcctcggtggacacgccttctgtcggaatcctgacaacgacatccgtccatggtgttttgtgttgaacagggatcgtctgtcgtgggaatattgcgacctggcacagtgtcagacgcctacccaggcggctccgcctactccggtgtctccgagactgcacgtgccgctcatgccggcccaaccggcgccgcctaagccccaaccgaccactagaacgccgccacaatcgcagactccaggagcactgcctgcgaagcgggaacaacccccgtcgctgacccggaatggcccgctgtcgtgtgggcagcggctgcgcaagtccctctcaagtatgactagggtcgtgggaggactggtggctctcagaggcgcacatccatacatcgccgccctttactggggacattcgttctgcgcgggatctctgatcgccccttgctgggtccttaccgcggcccattgcctgcaggaccgacctgcgcccgaggacctgaccgtggtgctgggacaagagcggaggaatcactcctgcgagccgtgtcaaaccctcgcagtccgctcctacagactgcatgaggcgttctccccggtgtcataccagcacgacctcgctctgctccggctgcaggaggacgcagacggatcatgcgctttgctgtcgccatacgtccaaccggtgtgcttgccttccggcgcagccagaccgtccgaaacgaccctctgccaagtggctggctgggggcatcagttcgagggagcggaagaatatgcttcgttcctccaggaggcacaagtccccttcctgtccctggagagatgctcggcccctgacgtccatggctcctcgatcctgccgggaatgctttgcgccggatttctggaaggaggaactgatgcatgtcagggagactcgggaggccccctggtctgtgaggatcaagcagcagaacggcggctcacgctgcagggcatcatctcctggggttcgggatgcggtgacaggaacaaaccgggagtgtacactgatgttgcatactacctcgcctggattcgcgaacacaccgtctca

SEQ ID NO: 249823 - DNA, 1845 bp, synthetic construct; identical to SEQ ID NO: 249814
  misc_feature 1..1845: note = Description of Artificial Sequence: Synthetic coding sequence
  source 1..1845: mol_type = other DNA

SEQ ID NO: 249824 - DNA, 1845 bp, synthetic construct
  misc_feature 1..1845: note = Description of Artificial Sequence: Synthetic coding sequence
  source 1..1845: mol_type = other DNA
atgagagcactgctccttctcggctttttgctcgtgtcccttgagtcaaccctctcgatacctccgtgggaagcaccgaaagagcacaaatacaaggcggaggagcataccgtcgtgcttactgtgactggagaaccttgtcattttccttttcaatatcatcgacagctgtaccataagtgtacccacaagggtcggccaggacctcaaccgtggtgtgcaaccacgccaaatttcgaccaagatcaaaggtggggctactgtctcgaacccaagaaggtgaaagatcattgcagcaagcacagcccctgtcagaaggggggaacgtgtgtgaacatgccatcaggtcctcattgcctttgtcctcagcatctcactggtaatcattgtcaaaaggaaaaatgtttcgagccccaacttctcagatttttccacaagaacgaaatttggtaccggactgaacaggcagcagtcgcacgctgtcagtgtaagggaccggacgcacactgtcaacgtcttgccagccaggcatgtagaaccaacccctgtctgcatggggggaggtgccttgaggtggaagggcatcgcttgtgtcactgtccggtgggttacaccggcgctttttgcgatgtggatactaaagcctcctgctacgatggccgcggactttcgtacaggggactcgcaagaactacccttagcggtgcgccatgtcaaccttgggcgtcggaggccacctatcgcaacgtcacggcagagcaggcacggaactggggtctgggaggacatgccttctgtagaaacccggataatgatattcggccttggtgctttgtgctgaaccgcgatagactttcatgggagtactgcgatcttgcgcagtgtcaaactcctacccaagcggcaccgcccaccccggtttccccacggctgcacgtgcccctgatgcctgcccagcctgctcctccgaaaccacaacctactacgcgtactcccccacagtcacagaccccaggtgcattgccagcaaagcgcgaacagcctccctcgctgactcggaatggcccgttgagctgcgggcagcggcttagaaagtcactctcgtcgatgactcgagtcgtgggcggacttgtggcactgcgtggcgcccatccttacatcgcagcactgtactggggtcacagcttttgtgcaggttcccttattgccccttgctgggtcctcaccgcggcacattgccttcaagataggcccgccccggaggacctcacggtggtgcttggacaggaacgcaggaaccattcttgtgaaccatgccagactcttgccgtgcggtcatataggctgcatgaagcattctcgccagtctcgtaccagcatgatctggcgctccttcgccttcaagaggatgcggatggttcatgtgcacttctgtcgccttacgtgcaacctgtctgtctgcctagcggagcagcaagaccatctgagactactctgtgccaagtcgcaggatggggacaccaatttgaaggagctgaagaatacgcgagctttcttcaagaagcgcaggtgcccttcctcagccttgaaagatgcagcgcacctgacgtccacggttcgtccattctgccgggcatgctttgtgcaggatttctggagggaggaaccgacgcatgccaaggcgattcaggagggcctctggtgtgcgaagatcaggcagccgagcggcgcctgacccttcaaggaatcatatcgtggggatctggatgcggtgatcgaaacaagcccggagtttacactgacgtggcctactaccttgcttggattcgggaacataccgtctcg

SEQ ID NO: 249825 - DNA, 1845 bp, synthetic construct
  misc_feature 1..1845: note = Description of Artificial Sequence: Synthetic coding sequence
  source 1..1845: mol_type = other DNA
atgcgcgctctgctgcttttgggatttctgctggtcagtctcgaatctaccctcagcatcccaccatgggaagcccccaaagaacataaatacaaagccgaagaacatacagtggtcttgactgtgaccggagaaccttgtcacttcccgtttcagtatcacaggcaactctaccacaagtgcacccacaagggaagacctgggccccagccttggtgtgccacaactccaaactttgatcaggaccagcggtggggatactgcctcgagcctaaaaaggtcaaagatcattgcagcaagcactcaccgtgtcagaaaggaggaacttgtgtgaacatgccctcgggcccgcattgcctgtgcccccagcacttgacaggcaatcattgccaaaaagagaagtgcttcgagccccaactgctccgtttttttcacaagaacgaaatctggtatcgcactgaacaggccgctgtcgccaggtgtcagtgcaaagggcctgatgcgcactgccagcggttggcttctcaggcctgtaggacaaacccatgccttcacggaggacggtgcctggaggttgaggggcacagactgtgccactgcccagtggggtacactggcgcattctgcgacgttgataccaaagcaagttgttatgatggaagaggtttgtcttacaggggcttggctaggacaaccctgagcggcgcgccctgccagccatgggcgtccgaggctacttaccggaacgtgacagccgagcaagctaggaactggggactgggtggacacgctttttgtaggaatcccgacaacgatatcagaccttggtgtttcgtgctaaacagagatagactgtcatgggaatactgcgacttggcacaatgccaaacccccacacaggcggccccaccaaccccagtaagccctcggctccacgtcccattgatgccggcccaacccgcaccacccaagccacaacccaccacgaggaccccaccgcaaagccaaacacccggcgcccttccagcaaagcgtgagcagcctcccagccttacccgcaacggtcccctgtcgtgcgggcaacggctgcgcaagagcttgtcaagtatgacccgagtcgtggggggcctggtggcgctcaggggcgcccacccctatatagctgccctgtattggggccactccttctgcgcaggaagcctgatcgccccctgttgggtgctgactgcagcccattgcctccaagaccgcccggccccagaggacttaacggttgttctgggtcaagagagaaggaaccacagttgcgagccatgccagaccctcgctgtgagaagctaccgcctgcacgaggcgttctcacctgtgagctatcagcacgatctggctctcctgagacttcaggaagatgctgacggaagctgtgcactgctgtccccttatgtgcaacctgtgtgcctgccgagcggagccgctcgaccatctgagaccactctctgtcaggtggctggctggggccaccagttcgaaggggctgaagagtatgcgagctttttgcaggaggcccaagtgccgttcctcagcctagagcgctgctcagccccagacgtacacggcagcagcatcctacctggcatgctgtgcgcagggtttctggaggggggcactgatgcttgccagggcgatagtggaggaccgctggtctgcgaagaccaagcagccgaaaggcgactgacactccagggcataatatcttggggcagcggctgcggcgacagaaacaagccgggagtgtatacagatgtcgcctattacctggcttggatccgcgagcacactgtgtcc

SEQ ID NO: 249826 - DNA, 1845 bp, synthetic construct
  misc_feature 1..1845: note = Description of Artificial Sequence: Synthetic coding sequence
  source 1..1845: mol_type = other DNA
atgcgcgcgctcttgctgctggggttcctccttgtgtcactggaatccaccctgtccattcctccttgggaggctccgaaggagcataagtataaggcggaagaacacactgtcgtcctgaccgtgactggcgaaccatgccactttccgttccagtaccatcggcaattgtaccataagtgcacccacaagggcagaccgggaccgcaaccctggtgtgccactacgccgaacttcgatcaagaccaacggtggggttactgccttgagccgaagaaggtgaaggaccactgcagcaaacactcgccgtgtcagaaaggaggaacttgcgtgaatatgccgtcgggccctcattgtctgtgtccacagcacctgactgggaaccattgtcagaaggaaaagtgttttgaacctcaactgcttcggttcttccataagaacgagatctggtatcggaccgaacaggctgccgtcgccagatgtcagtgcaagggcccggatgctcactgccaaagactcgcgtcgcaggcctgtagaactaacccatgccttcacggaggacgatgcctcgaagtggagggacacagactgtgccactgcccggtcggatacaccggagccttttgtgatgttgacaccaaggcctcctgctacgacggacgcggactgtcgtacaggggcctggcccgcactaccctcagcggggcgccgtgccagccctgggcaagcgaagcgacctaccgcaacgtgactgcggagcaagcccggaattggggtctgggaggtcacgcgttctgccgcaacccggacaatgatatacgcccttggtgcttcgtcctgaacagagatcgcctctcctgggaatactgcgaccttgcccagtgtcagaccccgacccaggcagcgccacccaccccggtcagtccacgcctgcatgtgcctctcatgccggcccaaccggcacctcctaagccgcagcccaccactcgaaccccgccgcaatcacagacccccggcgcccttccggccaaacgcgaacaaccaccttcgctcactcggaatggcccgctcagctgcggacaacgcctccgtaaaagcctgagctccatgactcgcgtggtcggagggctggtggccttgcgcggggcgcatccttacatcgctgccctgtactgggggcacagcttctgtgcaggaagcctgatcgcgccgtgctgggtgctcaccgctgcacactgtctgcaggaccgccccgcacctgaagatttgaccgtcgtgctcggccaggaaagaagaaaccactcgtgtgagccgtgccagaccctcgccgttagatcgtatagactgcacgaagccttttcccccgtcagctaccaacatgatctcgcgctccttaggctgcaggaagatgcggacggcagctgtgccctgctgagcccatacgtacaaccagtgtgcctgccgtccggagccgccaggccatctgaaactactctgtgccaggtggcgggatggggccatcagtttgagggtgccgaggaatacgcgtcatttctccaagaggcccaggtcccgttcctgtccctcgaacgctgttccgcaccggatgtgcacggctcctcaatcctgcctggaatgctctgcgccgggttcctcgaaggcggaaccgacgcctgtcaaggtgactcaggaggcccattggtgtgtgaagatcaggcggcagagagacgcctcaccctgcagggaatcatctcctggggatccggatgcggagatcgcaacaaaccgggagtgtacaccgatgtggcttactacctggcctggatcagagaacatactgtctcc

SEQ ID NO: 249827 - DNA, 1845 bp, synthetic construct
  misc_feature 1..1845: note = Description of Artificial Sequence: Synthetic coding sequence
  source 1..1845: mol_type = other DNA
atgcgggcactgctgctcctcggattcttgctggtttcacttgagtcgaccctctcgattcctccatgggaggccccgaaagagcacaagtacaaggccgaggagcacaccgtcgtcctcactgtgactggcgagccctgccattttccgttccagtaccacagacaactgtaccataagtgcactcacaagggaagacctggcccgcagccttggtgcgcgactactccgaattttgaccaggatcagagatggggttactgcctggaaccgaagaaagttaaagaccactgctcaaagcattcaccttgccagaagggtggcacctgcgtcaatatgccctcagggcctcactgtctgtgtccacagcatttgactggaaatcactgtcagaaagaaaaatgcttcgagccgcagctgttgagatttttccataagaacgagatctggtacagaaccgaacaagcagccgtcgcacgctgtcaatgcaagggccccgacgcccactgccagagacttgcgagccaggcgtgcagaacgaacccttgcctgcacgggggacgatgtctcgaagtcgagggacatcggctctgccattgcccggtgggctacacgggagcgttctgcgatgttgataccaaggcttcgtgctacgatggtcggggactgagctacaggggactggcgagaacgaccctgtccggggccccgtgccaaccttgggcttccgaagcgacctatagaaacgtcaccgcagagcaagcgagaaattggggattgggtggtcatgccttttgcagaaacccggacaacgacatcagaccatggtgcttcgtgctgaacagggacaggcttagctgggagtactgcgacctggcgcaatgccaaactcctacccaggcggcaccgcctaccccagtgtcgcctcggctgcacgtgcccctgatgccggctcagccagcaccaccgaagcctcaaccgacgacccgcaccccgcctcagtcccaaaccccaggagcattgccggccaagcgcgagcaaccgccttcccttactcgcaacggccctctgtcatgtggccagagactccgtaagtcgctgtcttccatgactagggtggtaggcggactggtggcccttcgcggagctcacccgtacatcgccgcactgtactggggtcatagcttctgcgcggggagtctcatcgctccctgctgggtgctgactgctgcccattgtctccaggaccgacctgctcctgaagacttgaccgtggtcctgggacaagagcgccggaatcactcttgcgaaccgtgtcagacccttgccgtgcgctcctaccgccttcacgaggcctttagccccgtttcctaccaacatgacctggcgctcctcagactgcaggaagacgcggatggatcgtgcgcgctcctctcaccctacgtccagccggtgtgcctgccctccggcgccgcccggccatcggagactacgctgtgccaagtggcgggatggggccaccaattcgagggagcggaagagtacgcctcattcctccaggaggcccaggtcccattcctgtccctcgaacgctgctcagctccagatgtgcatggttcatccatcctcccgggcatgctctgcgcgggctttctggagggaggcaccgacgcctgccaaggggactcgggaggtcctctggtgtgcgaagatcaggccgctgaacggagactcacccttcagggaatcatcagctggggttcgggatgcggtgaccgcaataaaccaggcgtgtacaccgatgtggcgtactacctggcctggattagggagcataccgtctcg

SEQ ID NO: 249828 - DNA, 1845 bp, synthetic construct
  misc_feature 1..1845: note = Description of Artificial Sequence: Synthetic coding sequence
  source 1..1845: mol_type = other DNA
atgagagcactattgctattgggcttccttctcgtgagtttggaaagtactttgagtataccaccttgggaagcccctaaggaacacaaatacaaggccgaggaacataccgtcgtccttaccgtgaccggagagccctgccacttcccttttcagtatcacaggcagttgtaccacaagtgtacacacaagggtagacctggcccccaaccatggtgcgcaacgacaccgaatttcgatcaagaccagcgctggggatactgtcttgagcctaagaaagtgaaagatcactgtagcaaacacagcccttgtcagaaagggggaacatgcgtgaatatgccttccggcccccattgtctgtgtcctcagcacctcacaggtaatcattgtcagaaggaaaagtgtttcgaaccacagctgctgcggttttttcacaagaacgagatttggtatcgcactgagcaagctgccgtcgcccgctgccagtgcaaaggccccgatgctcactgccagcgcctggccagccaggcctgtcgcaccaatccatgtctccacggggggcgctgcctggaggtggagggacaccggctatgccattgccccgtaggatatacaggcgccttttgcgacgtagatacaaaagcatcatgctacgacggacgggggctttcctaccgtggcttggccagaacgacactctcgggggccccttgccagccttgggcaagtgaagctacctataggaacgttactgcagagcaggctcgcaattgggggctaggcggccacgccttctgcaggaatccagataacgacattcgcccgtggtgttttgtccttaaccgagaccgtctctcctgggagtactgcgatttagctcaatgccagacccctacccaagccgcccctccaactcccgtgtcaccacgcctgcacgtccccctgatgcctgcccagcctgcccccccaaaaccccagcctactacccgtactccaccacaaagccagactcccggtgcactcccagcgaaacgggagcagcccccaagcctcacaagaaatggacccttgtcttgcggacaacggttacggaagtcgctttctagtatgacaagagtggtgggcggactcgtcgccttacggggtgcccatccatatattgccgccctttactggggccacagcttctgcgctggctcccttatagccccctgctgggtccttaccgctgctcactgcttgcaggacagacccgcccccgaggacctgaccgttgtgctgggtcaggaacggaggaaccacagctgcgagccttgtcagactctagctgtgcgatcctaccgactgcacgaagccttctcgcctgtgagttaccagcatgatctggccttactacgtctccaagaagacgcggatggctcctgcgccttactcagcccctatgtgcagcctgtctgccttcccagtggcgctgcacgtcctagcgaaactactctgtgccaggtcgctggttggggacatcagtttgaaggggccgaggaatacgcctccttcctgcaagaagcccaggtccctttcctcagtcttgaaaggtgctccgcacccgacgtgcacgggagttccattttgcctggaatgctctgcgccggatttctggaggggggtaccgatgcctgtcaaggcgacagcggcggtccgctcgtgtgtgaggaccaggccgcggagaggcggctgaccctgcagggtatcatctcttggggctcagggtgtggagatcggaataaacccggggtctatactgacgtggcatattacctcgcctggatacgggaacacacggtgagc

SEQ ID NO: 249829 - DNA, 1845 bp, synthetic construct
  misc_feature 1..1845: note = Description of Artificial Sequence: Synthetic coding sequence
  source 1..1845: mol_type = other DNA
atgcgagctctcctgttactcggcttcctcttggtgagtttagaatccaccttatctattccaccctgggaagctcccaaagaacataagtataaggctgaagagcacacggtggtgttgaccgtgactggagagccttgtcacttccccttccagtaccatcgacagctctatcacaagtgtacccacaaaggacgacccggccctcagccatggtgtgccactacaccaaacttcgatcaggaccagcgatggggctattgtctagagcccaaaaaggtgaaagatcattgtagcaagcattccccctgtcagaaaggtggcacttgtgtcaacatgccttctggccctcattgcctgtgcccacaacatctgaccggaaatcactgtcagaaagaaaagtgcttcgaaccacagctcctcagattcttccataagaacgagatttggtacagaactgaacaggccgctgtggccagatgtcaatgcaaggggcccgacgcacattgccagcgactagcaagtcaggcttgccgaactaatccttgcctgcacggaggaagatgtttggaggtggagggccaccgcctatgtcactgtcccgtgggctacaccggcgctttttgtgatgttgacaccaaggcatcatgctatgacggccgagggctcagctacagaggcttggctaggacaacgctgtctggcgcaccatgtcagccgtgggcgagtgaggcaacatatagaaatgtgacagcggaacaggcccgaaattggggccttggaggacacgcattctgtaggaacccagataatgatatcaggccatggtgcttcgtgctcaaccgcgaccgtctatcttgggaatattgcgacctggctcagtgtcagacacccacacaggccgcaccacccacccctgtgagcccaagattgcacgttccgttgatgccggctcagcctgctccccctaaacctcagcccaccaccaggacaccacctcagtcacagacacctggcgcgctgcctgctaagagagaacagcctcccagcctgacgaggaatgggccactgagttgcggccagagactcaggaaatctctgtcatctatgacaagagtcgtcggaggactcgtcgcccttcgaggagcccacccctacattgccgctctgtactgggggcacagcttttgcgctggctcgctgatagcaccctgctgggtgctgaccgccgcacactgtctccaagaccgacccgccccggaagatctgaccgtcgtcctgggccaagagcgccgcaaccattcttgcgagccgtgccagaccttagctgtaagaagctacagattacacgaggcgttttccccagtctcctaccagcatgacttggctcttctcagactccaggaggacgcagacggctcatgcgcactgctttccccatatgtccaaccagtctgcctcccgtctggcgcagctcgtccttcagaaactactctctgtcaggtggctggctgggggcatcaatttgagggggccgaagaatatgcatctttcctgcaggaagcccaggtaccttttctaagcctcgaacggtgcagtgcaccagatgtgcacggaagctcaatccttcccgggatgctctgtgctggtttcctggagggaggcactgatgcttgccagggagactcaggtgggccacttgtttgcgaagatcaagctgccgagcgacggttgaccttacagggcataatctcctggggctcagggtgcggggatagaaataagcccggagtgtacacagacgtagcctattacctggcctggatcagggaacacaccgtaagc

SEQ ID NO: 249830 - DNA, 1845 bp, synthetic construct
  misc_feature 1..1845: note = Description of Artificial Sequence: Synthetic coding sequence
  source 1..1845: mol_type = other DNA
atgcgagcgctcctcttgttgggcttcttgctcgtaagtctcgagtccacgctctcaattccaccctgggaggcaccaaaagagcataaatacaaagccgaggagcacacggtcgtcctcactgtcaccggggaaccgtgccatttcccatttcagtaccatcgtcagctctaccacaagtgcacccataagggtcgtccaggcccccagccctggtgtgcgacgacccctaattttgatcaagaccagcgatggggttactgtctggaacccaagaaggttaaggaccattgcagtaagcactcgccatgccagaagggcggcacttgtgtgaatatgccttcagggccacattgtctgtgtcctcagcacctcacaggtaatcactgtcagaaggaaaaatgctttgagccccaacttctacgatttttccacaagaacgaaatctggtacaggacggagcaagctgcagtggctcgatgtcaatgcaaagggcctgacgctcactgtcagaggcttgcaagccaggcttgcagaactaatccttgtcttcatggcggtcggtgcctggaggttgaagggcaccggctgtgccattgtcccgtgggctatacgggcgccttttgcgacgtcgatactaaagctagctgctatgatggacgcggcctcagttatcgtggcctagctaggactaccctgtctggagcaccctgtcaaccttgggcaagcgaagcaacatacagaaatgttactgccgaacaggctagaaattggggcttaggaggccacgccttttgcaggaaccctgacaatgatattagaccatggtgcttcgtcctaaacagggatagactcagctgggagtattgcgacctggcccagtgtcagactcctacccaggctgcccccccgacacctgtttcccccaggctacatgtcccgttgatgcccgcccagcccgctccgccaaagccccagcccacgacccgcaccccaccccagagccaaactccgggtgcactgcctgcaaagagagagcagccaccatcccttactaggaatgggcccctgtcctgcggacagagactgaggaagtctctgtcctccatgacccgtgtggttggagggctggttgctctgagaggcgcacatccatatattgcagcattgtattggggtcattcattttgtgctggtagcctgatcgctccctgttgggtcttgacggctgcccactgcctccaggatcggccggcccccgaggatctgaccgtggtcctagggcaggagcgcaggaaccacagctgtgaaccgtgccagacccttgcggtgaggagctatagactgcatgaagcattctctccagtatcgtatcaacacgatctggccctgcttcggcttcaggaagatgccgacgggagctgcgcactgctaagtccctacgttcagcccgtgtgcctgccctcgggcgcagcacggccatccgagactactctctgccaggtggccgggtgggggcaccagtttgaaggcgctgaggagtatgcatcatttttgcaggaggcccaggtaccctttctcagcctcgagcgctgtagcgcacccgacgtgcatgggtcaagtatcctaccaggaatgctctgtgcggggtttttagaaggcgggacggatgcttgccagggagacagcggagggcccttggtgtgcgaggatcaggccgcagaaaggcgtctgacactgcagggtataatctcctgggggagcgggtgcggtgatcggaataagccaggggtgtacacagatgtcgcgtactatcttgcttggattcgcgagcatacagtctct

SEQ ID NO: 249831 - DNA, 1845 bp, synthetic construct
  misc_feature 1..1845: note = Description of Artificial Sequence: Synthetic coding sequence
  source 1..1845: mol_type = other DNA
atgcgcgctctgttactcctaggatttcttctcgtgtcactagagagcactctgtctatccccccttgggaagctccgaaggagcataagtacaaggcagaagagcataccgtggtgctgacagtgacaggagagccttgtcattttccatttcagtaccataggcagctgtaccataaatgcacacataagggacgccccggaccccagccctggtgcgcgactactccaaacttcgaccaggatcagaggtggggttattgtttggagccaaaaaaggtgaaagaccattgctcgaagcactcaccttgccagaagggtggcacctgtgtcaacatgccatctgggccacactgtctttgtccccagcacctgaccggcaatcactgccagaaggagaaatgtttcgaacctcagctacttcgattttttcacaaaaatgaaatttggtatagaacggagcaggctgcggtggcccgttgccaatgcaaaggtcctgacgcgcattgccagaggttggcctcccaggcctgcagaacaaacccctgtttacacggggggcgatgtctagaggtggaaggtcacagattgtgtcactgtccagtgggatacaccggtgccttttgtgacgtcgacactaaagccagctgttacgacggtcgcggcttgtcatacagaggcttggctagaaccacactatcgggggccccctgtcagccctgggcttctgaagctacctatcgcaatgtgacagccgaacaggcaaggaactggggccttgggggacacgccttctgcagaaaccccgataacgacatacgaccttggtgttttgtgctcaacagggaccggctgtcatgggaatactgcgatcttgcacagtgtcagacccccactcaggccgctccccccacaccggtgtcacccagactgcacgtccctctgatgcccgctcaaccggctcccccaaagccccagcccacgacacggacgcccccacaatcccagaccccaggagccttacccgcgaagagagaacagcccccgagcctgacgcggaacggaccactctcatgtgggcagcgattgaggaagtccctgagctcaatgacccgcgtggtgggaggactggtggccctgcggggagcgcacccctatatagccgctctgtactggggtcatagcttctgcgcaggctcactgattgctccttgctgggtactgacagcagcgcattgtcttcaagacaggcctgccccagaggacctgactgtggtgctgggccaggaacgacggaaccactcgtgcgaaccctgtcagaccctggccgttcgatcatacagactgcacgaggcattctcccctgttagctaccagcatgatctggccctcctgagattgcaggaggatgctgacggcagctgtgcattgctcagcccctatgtccaacccgtgtgcctaccttcaggagctgcccggccctcagagaccacactgtgtcaagtggccggctgggggcaccaatttgaaggtgctgaggaatatgcctcattcctgcaggaagcgcaggtaccattcctgtctctcgaaagatgctcagcaccggacgtgcatggcagcagcatcttgcccggcatgctgtgtgctggattcttggaaggcgggacggacgcatgtcagggagatagcggagggcctttagtgtgtgaggaccaggcggcagagcggcgtctgaccctccagggtatcatcagttgggggtcaggttgcggagacaggaacaaaccaggggtctacactgatgtggcttactatttggcttggattcgcgaacacacggtatca

SEQ ID NO: 249832 - DNA, 1845 bp, synthetic construct
  misc_feature 1..1845: note = Description of Artificial Sequence: Synthetic coding sequence
  source 1..1845: mol_type = other DNA
atgcgggctttattactcctgggcttcctcctggttagcctagagagcaccttatctataccaccctgggaggccccaaaggagcacaagtataaggccgaggagcataccgtcgtcctgactgttacaggagagccctgtcattttccattccagtaccataggcaattgtaccacaagtgcacacacaagggcaggcctggacctcagccttggtgtgcaactacccccaatttcgatcaggaccagcgctggggttactgcctggagccaaaaaaggtgaaagaccactgctctaagcattccccctgccagaagggcgggacctgcgtcaacatgccatctggcccccactgtttatgtccacagcacctaactggtaatcactgtcagaaggagaagtgctttgagcctcagctgctgagatttttccataaaaacgagatatggtacagaaccgagcaggcagccgttgctcgctgtcagtgcaagggccccgacgcccactgtcagcgcctcgccagccaggcttgcaggactaacccttgcttgcacggcggcaggtgtctggaagtggagggtcacagactttgccactgccccgtcgggtacaccggcgctttctgcgatgtggatactaaggccagctgttacgatggccgcggcctctcttatcgcggtctagctagaactactctgagtggggctccttgccaaccctgggcttctgaggccacttatagaaacgttacagccgagcaggctaggaactgggggctaggaggtcatgctttttgccggaaccctgataatgatatacggccctggtgttttgtcctaaatcgggaccggctgtcatgggagtattgcgatctggcccaatgccagacccctacccaggctgcacccccaacaccagtgagcccaaggctgcacgtgccattaatgcccgcacagcccgctcctccaaagccccagcccactacacggacaccaccccagagtcagacacctggcgccctaccagctaaaagagagcagcctcctagcctgacacggaatggcccacttagttgtggccagaggctgcgtaaaagcctctccagcatgactcgggtggttggcgggctagtggccctcaggggggcccacccttatatagccgctctgtattggggccacagcttttgcgccggtagcttaatagccccttgttgggtacttaccgctgcccactgcctgcaggatcggcctgcccccgaagatttgacagttgttctgggacaggaaagacgcaaccattcatgtgaaccttgtcagacactggccgtgcggagttatagactgcatgaggcctttagtccagtgagctatcagcatgacctggccctgctgcgcctgcaggaggacgcagatgggtcatgtgctctcttatctccatatgtgcagccagtgtgtctgccttccggtgctgcccggcctagcgagaccacattatgccaggttgccgggtggggccaccagttcgagggcgcagaagaatacgcatcctttctgcaggaggcccaggtcccctttttatctctagaaaggtgctcagccccagacgtgcacggcagctccatcctccctgggatgctgtgtgctggttttctggagggagggacagatgcatgtcagggcgatagtggggggccattagtgtgcgaagatcaggctgccgagaggcggctgaccttgcaaggcataatctcatgggggagtggatgtggggacagaaataaaccgggggtgtacaccgacgtggcttactacctggcttggattcgagaacatacagtgtcc

SEQ ID NO: 249833 - DNA, 1845 bp, synthetic construct
  misc_feature 1..1845: note = Description of Artificial Sequence: Synthetic coding sequence
  source 1..1845: mol_type = other DNA
atgcgagctctgcttctgctaggcttcctcctggtctcattagagagcaccctgagtatacccccctgggaagcccctaaggagcacaagtataaagcggaagagcacaccgtcgtgctgaccgtaacgggcgaaccctgtcacttccccttccaatatcaccggcagttgtaccataagtgtacgcacaaggggaggcccggcccacagccgtggtgtgctaccacaccaaacttcgatcaggaccaaaggtggggatactgcctggagcccaagaaggtgaaggaccattgtagtaagcattctccttgtcagaagggaggaacttgcgttaatatgccgtctggacctcattgtctctgtccacagcatctaacgggaaatcactgccaaaaggagaaatgcttcgagcctcagctcctgcggtttttccacaagaacgaaatctggtacagaaccgaacaagctgctgtagcccgatgtcagtgtaaagggcctgacgcccactgtcagagactcgcgagtcaggcgtgtaggacaaacccttgcctgcatggaggtcgttgcctggaggtcgagggccacaggctttgtcactgccctgtgggatatacaggggccttttgtgatgtggacacaaaggcttcctgttatgatggccggggtttgtcatatagaggcttagcgcggaccaccctcagcggtgccccctgccagccatgggcgagtgaagccacctacaggaacgtaacggcagaacaggcaagaaactggggtttggggggacacgcattttgtagaaatccagataacgacatcagaccatggtgctttgtgcttaatcgcgatagattatcgtgggagtactgcgatcttgcacagtgtcagactcctacacaggccgccccccccacaccggtgtctcctcgtttgcacgtgccgcttatgccggcacagcccgccccaccgaaaccccaaccaacaactaggacccccccccagagccagacccccggagctctaccagcgaaacgcgaacagcccccaagcctgactagaaatggaccgctgtcatgtggacaaagactgagaaaaagcttatcgtctatgacacgggtggtggggggactagttgctcttcggggggctcatccttacatagccgcgctgtattggggtcactccttctgtgccggaagtttaatcgctccatgctgggtcttgacggccgcccactgtcttcaggatcggcccgcaccagaggatttaaccgtggtacttgggcaggaaaggcggaatcactcttgcgagccatgccagactctcgcggtgaggagctatagattgcacgaagctttctcgcccgtgagttaccagcatgatttggctctcctgcgccttcaggaagatgccgacggctcttgcgcccttctgagcccctacgtccagcccgtctgtctgccaagtggagccgcgagaccatcggagacaactctctgtcaggtggcagggtggggacatcagtttgagggcgcagaagaatacgccagctttctccaagaggctcaagtgcccttcctttcacttgagcggtgtagtgcacctgacgtccacggatcttctatcctgcccgggatgctctgcgctggcttcctggagggagggacagacgcctgccagggggacagcggcggtcccctggtctgcgaagatcaggccgccgagcgtcgattgacccttcagggcattatctcttgggggtctggctgcggcgacaggaacaaacccggcgtgtacacagatgtggcttactatttagcatggatccgggaacatacggtctcc

SEQ ID NO: 249834 - DNA, 1845 bp, synthetic construct
  misc_feature 1..1845: note = Description of Artificial Sequence: Synthetic coding sequence
  source 1..1845: mol_type = other DNA
atgagggctctgctgctgctggggtttcttctggtatcactggagtcgacactttccatccctccttgggaagcgcccaaggaacacaagtataaggcagaagaacacaccgtggtgctcacggtcactggcgaaccctgccacttccctttccaatatcacaggcagttgtatcacaagtgtacccacaaagggcggccagggcctcaaccctggtgtgccacaacccctaacttcgaccaggaccagagatggggctactgtttggagccgaagaaggtcaaagaccactgcagtaagcacagtccctgccagaaaggcggcacctgcgtcaacatgcccagcggtccgcactgcctgtgccctcagcatcttacgggcaaccattgccaaaaagagaaatgctttgagccgcaacttctccggttctttcacaaaaatgaaatttggtaccgtacagagcaggctgccgttgcacgctgccaatgtaaaggaccagatgcccactgccagaggcttgccagtcaggcatgcagaacgaacccttgcctgcacggcgggcgatgcctggaggtagagggacatcgcctgtgtcattgccctgttggctatacaggcgcgttctgcgacgtggacacaaaagcctcatgctacgatggtagaggcctctcatacagaggcctagcaaggactacccttagcggcgctccatgccagccttgggcctcagaggctacgtacagaaatgtcaccgccgagcaggccaggaactggggtctgggcgggcacgccttctgtcgcaatccagacaatgacatccgtccatggtgcttcgtgttgaatcgggacaggctatcctgggaatattgcgacttggcccagtgccaaactcctacacaggcagcccctcctacaccagtatccccccgcctgcatgtccctttgatgccagcccagcctgcgccccccaaacctcagccgaccactcgaaccccgccccaatcgcagacacccggtgccctgcccgccaaacgcgaacagcccccgagcctaacccgtaatggacccctgtcctgcggccagaggttgaggaaaagcctgtccagcatgacccgggttgtgggggggttagtggcacttaggggcgcccacccctacattgccgctctgtactggggtcatagcttctgcgcaggctctcttattgccccatgttgggtgctcacggcagcccattgtcttcaggaccggcccgcccccgaagacttgacagtcgttttgggtcaggaacgcagaaatcattcatgtgagccttgccagacactggcagttcggtcatacagactacatgaggctttctcacccgtctcatatcagcatgacttggcccttctgcgattacaagaggacgctgacggtagctgtgctctgctgtcgccctacgttcagccggtctgcctgcccagcggagcagcgcgaccttcggagacaacactatgccaggttgccggctggggccaccaattcgagggggctgaggagtacgctagctttttgcaagaggcgcaggtgccctttctgagtctcgagagatgcagtgctcccgacgtgcatggatccagtatcctgcctggaatgttatgtgctggtttcctggaggggggcactgacgcatgtcagggcgacagcggaggaccattggtgtgtgaagaccaggcggccgagcggaggcttaccctgcagggcattataagctggggttcaggatgtggcgaccggaacaagcccggcgtgtatacagacgtcgcatactatttagcatggatacgtgagcataccgtaagc

SEQ ID NO: 249835 - DNA, 1845 bp, synthetic construct
  misc_feature 1..1845: note = Description of Artificial Sequence: Synthetic coding sequence
  source 1..1845: mol_type = other DNA
atgcgggcgctgctcctgctgggtttcctcctcgtgtctctggagagcacgctttcaatccctccctgggaagcccctaaggagcataagtacaaggcagaagaacataccgtcgtcctcaccgtgaccggggagccgtgccacttcccattccagtaccaccggcagctctaccataaatgcacccataagggccggccaggtccccagccgtggtgcgccactactccgaatttcgatcaggaccagcgctggggatactgcttggaaccgaagaaagtgaaagaccattgctcgaagcactccccttgccagaagggaggcacctgcgtgaacatgcccagcggaccgcattgcctttgcccacagcacctcaccggaaatcactgccaaaaggagaagtgtttcgaaccgcaactgcttcgcttctttcataagaacgagatctggtatagaacggagcaagccgctgtcgccagatgccagtgtaagggcccggacgcgcactgtcagaggttggcttcgcaggcctgtagaaccaatccgtgcctccacgggggacgttgcctcgaggtggaaggccatcggctgtgccactgcccagtgggatatactggagcgttctgcgatgtcgataccaaggcaagctgttacgacggccgcggactgagctaccgcggactggcccgcactaccctgagcggcgctccgtgccaaccctgggcatcagaagccacttaccggaacgtgactgccgaacaggcgagaaattggggactcggaggacatgcattctgtcggaaccccgataacgacatcaggccgtggtgctttgtcctcaatagagatcgcctgtcgtgggagtattgcgatctcgctcaatgccaaaccccgactcaggcggccccaccgactccggtgagcccacggttgcatgtgcctctgatgccggcccagcccgcccctccgaagccccaaccaaccacccggacgccgccgcaatcgcagactccaggggcactgccagccaagcgcgagcaacccccatccctgacccgcaacggccctttgtcctgcggacagagactgcgaaagtcgctgtcaagcatgaccagagtggttggaggcctggtggcgctgaggggagcccacccgtacatcgccgctctctactggggtcactcgttttgcgctggatcgctcatcgcgccttgctgggtcctgactgcagctcattgcctgcaggatcgtcccgcgccggaggatctgacggtggtgctggggcaggaacgccggaaccactcttgcgagccatgccaaaccctcgccgtgagatcctaccggctgcacgaggcgttcagccctgtgagctaccaacatgacctcgcgctgcttcgcctccaggaggatgccgacggatcttgcgccctgctgtcgccctacgtccagccagtgtgtctgccaagcggagcagcaagaccgtcggaaaccactctgtgccaagtcgccggatggggccatcaattcgaaggggctgaggagtacgcgtcgtttctccaggaggcccaggtcccgtttctcagcctcgaacggtgctcagcgccagatgtgcacggatcttcaatcttgcctggtatgctgtgcgcaggtttcctggagggaggcactgacgcttgccaaggcgactcgggcggacctcttgtgtgcgaagatcaggccgccgaaaggcgcctgactctgcagggaatcatctcatggggatccggttgcggagacagaaacaagcctggagtctacactgatgtggcctattacctcgcgtggattcgcgagcacaccgtctct

SEQ ID NO: 249836 - DNA, 1845 bp, synthetic construct
  misc_feature 1..1845: note = Description of Artificial Sequence: Synthetic coding sequence
  source 1..1845: mol_type = other DNA
atgcgggcgctcttgctgctcggtttcctgcttgtgtccctggagtctaccctctcgatcccaccttgggaagctcccaaagaacataagtacaaggccgaagagcatactgtggtgctgactgtcaccggagaaccctgccattttccgttccagtaccaccggcagttgtaccacaaatgcacccataagggacgccccggaccgcagccgtggtgtgccactactcccaacttcgaccaggatcagagatggggttactgtcttgaaccaaaaaaggttaaggaccactgctccaaacattcaccctgccaaaagggcggtacttgcgtgaacatgccttcgggtccacactgcctttgccctcaacatctcaccggcaaccactgccagaaagagaagtgttttgagccgcaactcctgaggttcttccataagaacgagatttggtacagaaccgaacaagctgcagtggcgcggtgccagtgcaagggccctgacgcgcactgtcagcgcctcgcaagccaagcctgccgcactaatccgtgcctgcacggtggacgatgtctggaagtagaagggcaccgcctctgtcactgcccggtgggatacactggagcgttctgcgatgtcgacactaaggcgtcatgctacgacggccgcggactgtcatacagaggccttgcacggaccaccctctcaggcgctccgtgtcaaccgtgggccagtgaagcaacctaccggaacgtgactgccgaacaagcccgcaattggggactgggcggtcacgccttctgtagaaatcccgacaacgacatccgcccatggtgctttgtgctgaaccgcgacaggctgtcatgggagtactgcgatcttgcccagtgtcagacccccactcaagccgctccccccacgcctgtctcgccgcgcctccacgtgcctctcatgccagcccagccagccccgccaaaaccacagcccaccacccgcaccccgccgcaatcacagaccccgggtgccctccctgcaaagagagagcaaccgccctcgcttacccggaacggtcccctttcctgcggacagcgtcttagaaagagcctctcgtcgatgactcgcgtcgtcggcggcctggtggcgctgcgcggcgcccatccgtacattgccgcactgtattggggccattctttctgcgctggatccctgatcgctccgtgctgggttcttactgcagcacattgcctccaggaccgccccgccccagaagatctgaccgtcgtcttgggccaggaacggcggaaccattcctgcgagccgtgccagactctcgcagtgcgatcgtacaggctgcatgaagcatttagcccagtctcctaccagcacgatttggccctgttgcgcttgcaggaggatgccgacggaagctgtgcgctgctgtcaccgtacgtgcaacctgtgtgcctgccgtctggcgcggctcgcccttcagagacgaccctgtgccaagtcgcgggctggggtcaccaattcgagggagcggaagagtacgcatcgttccttcaggaggcacaagttccgtttctgtcactggagagatgctccgctccggacgtccacgggtcctctatcctgccaggaatgctttgcgccgggtttctggagggcggcaccgatgcttgccagggggacagcggcggccctctggtgtgcgaagatcaggcggccgaacgccggctcacgctccagggaatcataagctggggaagcggatgcggagacagaaacaagccgggtgtgtacaccgacgtggcctactatctggcctggatccgcgagcacacggtgtca

SEQ ID NO: 249837 - DNA, 1845 bp, synthetic construct
  misc_feature 1..1845: note = Description of Artificial Sequence: Synthetic coding sequence
  source 1..1845: mol_type = other DNA
atgcgggccctgctgcttctgggattcctcctggtgtcccttgaatccacactgtccattcctccttgggaagcccctaaggaacacaagtacaaagccgaggaacacactgtggtgctcacggtgaccggtgagccttgtcactttccctttcagtatcacagacagctgtatcacaagtgtacacataaaggacgcccaggtccgcagccatggtgcgcgacaacacccaattttgaccaggatcagagatggggatactgtctggaaccaaagaaggtcaaggaccattgctcaaagcattcaccatgccagaagggcggcacctgtgtcaatatgcctagcgggccgcactgcctgtgtccccagcacctaactggtaaccactgtcagaaggaaaaatgcttcgagcctcagctgttgcgattttttcataaaaatgaaatctggtaccggacagagcaggcagctgtggctcgatgccaatgcaaaggcccagacgctcactgccagcggctggcgagccaggcctgtcgcacaaacccctgtcttcacggtggcaggtgtttggaagtggaagggcataggctgtgccactgcccagtcgggtataccggtgccttttgtgacgtggataccaaggccagctgttacgatgggagaggtctgagctatcgcggcctggctcgaacaaccctgtcaggtgcaccgtgtcaaccttgggcaagcgaagcaacctatcgaaacgtgacagcggagcaggcccggaactggggactggggggacacgctttttgcaggaatcctgacaatgatatccgaccctggtgcttcgttttgaatcgcgacagactgtcatgggaatactgcgacctggcacagtgccagacacctactcaagccgcccctcccactcccgtatctccgagacttcatgtcccacttatgcctgcgcagccagcgccccctaaaccccagccaactacccggacgccccctcagagtcagactcctggagcgcttcctgcaaagagggagcagcctccgtccctgactcgaaacggacccctgtcatgcggccagcggctcaggaaatcactgtctagtatgacacgtgtcgtgggcggcctcgtagcactacgcggggcccatccttatattgctgcactgtactggggccatagcttctgcgccggttcccttatagctccgtgctgggtacttaccgcagcccattgtctccaggatcgccccgcccctgaggatctgaccgtcgtattggggcaggaacgaaggaatcactcatgcgaaccctgtcagacgctggcagtacggtcgtatcgcctgcacgaggccttctccccagtgagctaccagcacgatctggcgctgctcaggctgcaggaagacgccgatgggagctgtgcgctcctgagcccgtacgtgcaacctgtatgcttgccatcaggtgcagccagaccttccgaaactacgctatgtcaggtggccggatggggccaccagtttgagggcgccgaggagtatgcaagctttctccaggaagcccaggtgccatttttgagtttagaaagatgctcagcacctgatgtacacggctctagcattctgcccgggatgctgtgtgcaggcttcctggagggggggaccgacgcatgccagggggatagcggcgggcccctggtgtgcgaagaccaggctgctgaaagaagactcaccttgcagggtatcattagttggggctcggggtgcggagaccgcaacaagccgggcgtctatacagatgtcgcttattatctcgcttggattagggagcatacggtgtct

SEQ ID NO: 249838 - DNA, 1845 bp, synthetic construct
  misc_feature 1..1845: note = Description of Artificial Sequence: Synthetic coding sequence
  source 1..1845: mol_type = other DNA
atgagagccctccttctgctcggcttcctactcgtgtctctggaaagcactctatccattcccccctgggaagcaccaaaggaacacaaatacaaggccgaggagcacaccgttgtgctgacagtgaccggagagccctgtcactttcccttccagtaccatcgacaattgtatcacaagtgcactcacaaagggcgaccaggcccccagccttggtgtgcgaccacacctaatttcgaccaagatcaaaggtggggctactgcctggagcccaagaaggtgaaagaccattgtagcaaacactccccttgtcaaaagggagggacctgtgtgaatatgccgtccggtccacattgcctgtgcccacagcacctgaccgggaaccactgccagaaagagaagtgttttgagcctcaacttttacggttttttcacaaaaacgaaatctggtacagaactgaacaggccgctgtggcgcgctgtcagtgcaaaggaccagacgctcattgtcaaaggctcgcctcacaggcttgcagaacaaacccttgcctccacggcgggagatgcctcgaggtggagggccaccggttgtgccactgcccagtgggatacacaggcgcattttgcgacgtcgacactaaagcttcttgttacgatgggaggggactttcttataggggcctggcccggacaacattgtccggggcaccctgccagccttgggccagtgaggcaacttacaggaacgtcacagctgagcaagctaggaattggggattggggggacatgccttctgccggaacccagacaacgatatccgtccttggtgcttcgtccttaaccgggatcggttatcctgggaatattgcgaccttgctcagtgtcagacccctacccaggccgctccacccacacctgtgtcacccagactccacgtcccactgatgcctgctcagccagcccctcctaaaccccaacccactaccagaacccctccccagtcgcaaacaccaggtgcattaccggctaagcgcgagcagccacctagcttgacacgtaatggccctctgtcgtgcggacagcggttacgaaagtctctgtcttctatgactcgcgtggtgggggggctggtcgccctgcgaggagcacatccttatatagctgccctgtactgggggcattctttctgcgccggatctctcattgctccctgttgggtcctgacagcggcccactgtcttcaggaccgaccggcgcccgaagatctgacagtcgtactgggacaggaacgccgaaatcacagctgtgagccgtgccaaacactcgcagtgaggagttatcgactgcacgaagctttcagccctgtgtcgtatcagcatgatctggcccttctcaggctccaggaggatgccgacggatcgtgtgcccttttgtccccttatgtccagcctgtttgtctcccaagtggggccgctcggccttccgagacaaccctctgccaggtggctgggtgggggcatcagttcgagggagccgaagagtacgcaagtttcctgcaggaggctcaggtgccattcctgagcttagaacgatgcagcgcgcctgacgtgcatggcagttccatcttacccgggatgctctgtgccgggttcctggagggtggtactgatgcctgtcaaggagactcgggaggcccactcgtgtgcgaagaccaggccgctgagagacgtttaaccctgcagggtataatctcttgggggtccggttgcggggacagaaacaagccaggagtgtatactgacgtcgcgtactacctggcttggattagagaacatacggtgagc

SEQ ID NO: 249839 - DNA, 1845 bp, synthetic construct
  misc_feature 1..1845: note = Description of Artificial Sequence: Synthetic coding sequence
  source 1..1845: mol_type = other DNA
atgcgcgctctgctgctgctcggattcttgctcgtgtcgctggaatccactctctcgatcccaccttgggaagccccgaaggagcacaagtacaaggccgaagaacatactgtggtgctgactgtgaccggcgaaccgtgccacttcccatttcaataccaccggcaactctaccacaagtgcacccacaagggacgcccaggaccccagccttggtgcgccactaccccgaatttcgaccaggatcaacggtgggggtactgtcttgaacctaaaaaggtgaaagaccactgctcgaagcactccccatgccagaagggaggaacctgcgtgaacatgccgtcgggaccacactgcctctgcccacaacatctgactggcaaccactgtcaaaaggagaaatgcttcgagccacaattgctccggttcttccacaagaacgaaatctggtaccgcactgaacaggccgcggttgcccgctgtcaatgcaaaggaccagatgcacattgtcagcgcctcgcgtcgcaggcctgccggactaatccgtgccttcatggtggtaggtgccttgaagtggaaggacatagactgtgccattgccccgtggggtacaccggagccttctgcgacgtcgacaccaaggcgtcctgctacgatggccggggcctctcgtaccgcggactcgcccggacgactctgtccggcgccccgtgccagccttgggcatcagaagcaacttatagaaacgtgactgcggagcaggcgcgcaactggggactcggaggccacgcattctgccggaacccggacaacgacattagaccttggtgttttgtgctgaatcgcgatagactttcgtgggaatattgtgatctggcgcagtgccagaccccgacccaggccgcgcccccgaccccggtcagcccaaggctgcacgtgcccctgatgcccgcgcagcccgctcctccgaaaccgcaaccaaccactcggacgccgcctcagtcccagacccctggggccctgcccgcaaagcgagaacaaccgccctcgctgacgcggaatggcccactgtcatgtggacagagactccggaagtcgctgtcctcgatgacccgcgtggtggggggactcgtggctctgagaggagcccatccgtacatcgctgcgctgtactggggacacagcttctgcgccggcagcctgatcgcgccttgctgggtgctgactgccgctcattgccttcaagatcggcctgctccagaagatctgaccgtggtgctgggtcaggagcggcgcaaccactcatgcgagccgtgccagaccctcgctgtgcgctcatacagactgcatgaagcgtttagccctgtgtcgtaccagcacgatctggctctgctgagactgcaggaagatgccgacggatcctgcgctctcctgagcccatacgtgcagccggtttgcctgccgtcgggggcagcccgcccaagcgaaacgactctgtgtcaggtggcgggatggggtcaccagttcgaaggcgccgaggagtacgcgtcctttctgcaagaagcccaggtcccgttcctctcactggaacgctgttcggccccggatgtccacggatcaagcatcctgccaggcatgctgtgtgctggattcttggaagggggcacggatgcctgccagggagatagcgggggtccactcgtgtgcgaagatcaggccgcggagagaaggttgaccttgcaagggatcatcagctgggggtcaggttgtggggacaggaataagccaggcgtgtacactgacgtggcatactacctggcctggatcagggagcatactgtgtcg

SEQ ID NO: 249840 - DNA, 1845 bp, synthetic construct
  misc_feature 1..1845: note = Description of Artificial Sequence: Synthetic coding sequence
  source 1..1845: mol_type = other DNA
atgcgggcactgctgctcctcgggttccttctcgtgtcactggaatccaccctgagcattcccccatgggaagcgcctaaggaacataagtataaagcggaagaacacaccgtggtgctgaccgtgactggagagccgtgccatttcccgttccagtaccacagacagctgtaccacaagtgcactcacaagggcagacctggaccacaaccttggtgcgctaccactccaaatttcgatcaggaccaaaggtggggatactgcctggagccaaagaaggtgaaagatcactgctccaagcattccccttgccaaaagggagggacttgcgtgaacatgccctccggaccacactgtctgtgcccacagcacctgacgggcaatcactgccagaaggaaaagtgctttgagccacaattgctgcgctttttccataagaatgaaatctggtacaggaccgagcaagctgccgtggccaggtgccagtgtaagggtcccgacgctcattgccagcgcctggccagccaggcctgccgcactaatccctgcctgcacggaggccgctgcctcgaggttgagggacataggctgtgccactgcccggttggatacactggcgcgttctgtgatgtggatacgaaggcctcctgttacgacgggagaggcctgtcctaccgcggactggcgcgcaccactctgtccggggcaccatgccaaccgtgggcctcagaagcaacttacagaaacgtcactgcagaacaggcgcggaactggggactgggaggacacgccttctgtcgaaacccggacaatgatatcagaccgtggtgcttcgttctgaacagagacaggctgagctgggagtactgtgacttggctcaatgccagactcccacccaggctgccccaccaacccctgtctcgccgagactgcacgtcccgctgatgcccgctcaaccggcaccgccaaagccgcagccgactacccggacccctccacagagccagaccccaggtgcgctgccggcaaaacgcgaacaacctccatcgctcactcgcaatggaccactctcgtgcggacagcggctcagaaagtccctgtcaagcatgacccgcgtggtcggtggactggtcgctctgcgcggagcccatccgtacatcgccgcactgtattggggacactcgttctgcgccggatctctcatcgctccatgttgggtcctgaccgctgctcattgcctgcaggaccggccggcgccagaggaccttactgttgtcctgggacaggagcgccgcaatcattcgtgcgaaccatgccagactcttgcagtgcggtcctacaggctgcacgaggccttctcgccggtcagttaccaacatgatctggcgttgctccgcctccaggaggatgcggatggcagctgcgccctgctgtccccgtacgtgcaaccggtctgcctgccatccggggccgcccggccttcagaaaccaccctgtgccaggtcgctggatggggtcatcaattcgagggagcagaagagtacgcatcatttctgcaagaagcccaagtcccgttcctgagcctggagcggtgttcggcgcctgacgtgcacggatcatccattctccctggaatgctgtgcgccggcttcctcgagggcgggacggacgcctgtcaaggagactccgggggaccactcgtttgtgaggaccaagcggccgagcgcagactcactctgcaaggaatcattagctggggttcgggttgcggcgaccgaaacaagcctggagtgtatactgatgtggcctactatctcgcctggatcagagaacacactgtgtcc

SEQ ID NO: 249841 - DNA, 1845 bp, synthetic construct
  misc_feature 1..1845: note = Description of Artificial Sequence: Synthetic coding sequence
  source 1..1845: mol_type = other DNA
atgcgagcactgctgcttcttggtttcctgctcgtatccctggagtctaccttgagtattcctccctgggaggctcccaaggagcataaatacaaggccgaagaacacaccgtcgtgcttaccgtgaccggcgagccctgtcactttccatttcagtaccacagacagctgtaccacaagtgtacacacaagggccggcctgggccccagccctggtgtgctacaacaccaaactttgatcaggaccagcgctggggctactgcctggaacctaagaaggtgaaagaccattgttctaaacactcgccctgccagaaaggtggtacgtgtgtcaatatgccatccggcccccactgtctctgtcctcagcacctcactggaaatcattgccaaaaggagaaatgcttcgaaccgcagctgctgagattcttccacaaaaacgagatttggtaccgtacagagcaagctgctgttgcacggtgccaatgtaaaggtcccgatgcccattgccagcgcctcgcatcgcaggcgtgtcgcacaaacccatgtctccacggcgggcgctgtttagaggtggagggacacaggctgtgccactgcccggttggatatactggcgccttctgcgacgtggacacgaaagctagctgttatgacgggcgtggactctcataccgtggactggcgcggaccaccctgtctggagctccttgccagccatgggccagcgaagcgacctaccgcaacgtcaccgctgagcaggcacgaaattggggattgggtggccacgccttctgccgtaatcctgacaatgatattcggccttggtgtttcgttttaaaccgagaccggcttagttgggagtactgtgacctggcccagtgccagacccccacgcaggcagcaccccccactcccgtgtcaccacgactgcatgtcccgctgatgccagcacagccggccccacctaaacctcaaccaactacgaggacccctccccagtcccagacccctggtgcgctgccagccaagagagagcaacccccctcattgacccgcaacggtcctctttcctgtggtcagagactgcgcaagtcactgagtagcatgactcgagtggtaggaggtctcgtagctctcaggggcgcccacccgtatatcgcagcgttatattgggggcatagcttttgtgccggcagtttgatcgccccctgttgggtcctgacagcagcacattgtctgcaagatcggcctgcgcctgaagatcttacagtcgtcctcggccaggagcgacggaatcactcctgcgagccctgtcaaaccttggccgtgcgaagttatcggctgcatgaggcctttagcccggtatcctatcagcatgacctggccctacttcgactgcaggaggacgcagatggttcctgtgcccttttgagcccgtacgtgcagccagtatgtctaccatccggtgccgcacgtccatctgagaccacattgtgtcaggttgctggctggggccaccagttcgaaggggctgaggaatacgcaagcttcctacaggaagcccaggtccccttcctcagtctggaaaggtgcagtgcccctgatgtgcatggtagttccatccttccaggtatgctgtgtgcaggctttctggaaggtggaactgatgcatgccagggagattctggagggcccctggtgtgtgaagatcaggccgccgaaaggaggctaactctccagggaataatcagctggggtagtggctgcggtgataggaacaaacctggggtgtataccgacgtagcttactacttggcatggatccgggagcatactgtctcc

SEQ ID NO: 249842 - DNA, 1845 bp, synthetic construct
  misc_feature 1..1845: note = Description of Artificial Sequence: Synthetic coding sequence
  source 1..1845: mol_type = other DNA
atgagagccctgctattactaggatttctgctggtgtccttagaatccacattgtcaattcccccctgggaagccccaaaagagcataaatataaagcagaggaacatacggtcgtcctgacagtgactggggaaccatgtcattttccctttcagtatcaccgacagttgtatcacaaatgcacacacaaggggagacccggaccccagccttggtgtgctactacacctaatttcgatcaggatcagcgttggggatattgcttagaacctaagaaagtcaaggatcattgctccaaacactctccctgtcagaagggggggacttgtgtgaatatgccatctgggccccattgtctctgtccccagcacctaacagggaaccattgtcagaaggaaaaatgttttgaaccacagctgctccgctttttccataaaaacgagatatggtacagaactgagcaggccgctgtcgctcgatgtcagtgcaaagggcctgatgcccattgtcagagactagcatcgcaggcatgccggactaatccttgtctacacggagggcgctgtcttgaagttgaggggcaccggctttgccattgtcctgtagggtacactggggcattctgtgacgttgatacaaaagcttcctgctatgacgggagaggactgagttatcgggggctggcacggactactctctctggggcaccctgtcagccgtgggccagtgaagccacttatcgaaatgtgacagccgaacaggctcgcaactgggggctggggggacacgctttctgccgcaatcccgataacgatatccggccctggtgctttgtgctaaacagagatagactatcatgggagtactgcgatctcgcccaatgccaaacacccacacaggctgccccccccactccagtttctccccggctccacgtacccctcatgccagcccagcctgccccacctaaaccacagcccacaactcggacacccccccaatcacagacacccggagccttacctgcaaagagggaacagccaccgtcactcacaaggaacgggccattaagttgcggacagcgcttgaggaagtcattgtcctccatgactcgggtcgtgggaggactcgtagctctcaggggagcccacccctacatcgctgccctatactgggggcactctttttgtgcaggaagtctcatcgccccatgttgggtcctgacagccgcccattgtcttcaggataggccagcccctgaggatctcacagtggtgctcggacaggagaggagaaatcacagttgcgaaccatgtcagacattggcagttagatcatacaggctgcatgaagctttttcgccagtgtcctaccagcatgatctggcgcttctcagactacaagaagatgctgatggatcctgtgccttgctcagtccctatgtccagcccgtttgtctaccctcaggagccgcccgtccctcagaaacaactctctgtcaggtcgccggatggggacaccagtttgaaggagccgaggaatatgcgtccttcctccaggaagcacaggtgccattcctgtccctggaacggtgtagtgctccggatgttcatggatcatctatacttcctggaatgctgtgtgccgggtttctggaaggaggaacagatgcttgtcagggggattcaggagggccccttgtatgtgaagatcaggccgccgaacgacggttgacactgcagggaataatttcctggggaagtggatgcggagataggaataaaccaggggtgtatacagatgtggcatattatctggcttggatccgggaacatacagtctcg

SEQ ID NO: 249843 - DNA, 1845 bp, synthetic construct
  misc_feature 1..1845: note = Description of Artificial Sequence: Synthetic coding sequence
  source 1..1845: mol_type = other DNA
atgagggctctcctcctcctaggatttttactggtctcactggagtcgactctgtccatacccccgtgggaagccccaaaggaacataagtacaaggccgaggaacacacagtcgttctcactgtcactggggagccttgccatttccctttccaatatcacagacaactctaccacaagtgtacacacaaaggtcgccctgggccccagccatggtgcgcaacgacacccaatttcgaccaggaccagcgctggggctactgcctcgaacctaaaaaggttaaagaccactgttctaagcatagcccttgtcaaaagggcggaacatgtgttaacatgcctagtggccctcactgtctgtgcccccagcacctcacgggaaaccactgtcagaaggaaaagtgtttcgagccacagcttttgaggttttttcacaaaaacgaaatctggtaccgcacagagcaagcggccgtggcccggtgtcagtgtaagggacctgacgctcactgccagcggctagctagtcaggcctgtaggacgaatccttgtttacacgggggtcggtgcttagaggtggagggccaccgtttgtgtcactgccccgtcgggtacaccggggcattctgtgatgttgataccaaggcttcttgctacgacggtcggggcctgtcctacagagggctggcgcggaccaccctctctggggcgccatgccagccttgggcttccgaggcaacctataggaacgtgacagccgagcaggctcgcaattggggcctgggcggacacgcgttctgcagaaatccagacaatgatatccgcccatggtgttttgtgctgaatcgggaccgcttatcttgggagtattgtgacctggcccagtgtcagacaccgacgcaggccgctcctccaacaccagtcagcccgcgtctgcacgtgcccctcatgccggctcagccagcacccccaaaaccccaacctactacccgtacacccccacagtctcagactccaggcgccctgcctgctaagcgggagcaacctccaagtctgactcgaaatggccccctttcctgtggacagaggctcaggaaatcactctctagcatgacacgtgtggtgggaggcctggttgcccttcgcggggctcatccctacatcgcagccttatactggggacactcattttgcgccggttccttaatcgcgccatgttgggtgctcactgctgcacactgccttcaggatcgccccgctccagaggacttgactgtcgttcttgggcaggaaaggcggaaccacagctgtgagccatgtcaaaccctggccgtaagatcttataggctgcacgaggccttctcccccgtttcttatcagcatgatctagccctgcttagactgcaggaagacgccgacggttcgtgcgctcttctctccccctatgtgcaacctgtctgtcttccatccggggctgccaggccgtcagaaacaactttgtgccaggtggccggctggggtcatcaatttgagggcgctgaggagtatgcctcttttctgcaggaggcccaagtgcccttcctttccttggagagatgttcggctcctgacgtgcacggctcttctatccttccagggatgctgtgcgctggatttctcgagggtggaacagatgcgtgccagggcgactcagggggtccacttgtgtgcgaggatcaagccgccgagcgacgcctaaccttacagggaatcatcagctggggatcaggctgcggagacaggaacaagcctggagtgtatacggatgtggcatattaccttgcctggatccgcgagcacactgtgagt

SEQ ID NO: 249844 - DNA, 1845 bp, synthetic construct
  misc_feature 1..1845: note = Description of Artificial Sequence: Synthetic coding sequence
  source 1..1845: mol_type = other DNA
atgcgtgcattgctcctgcttggattcttgcttgtgtcactggagtcaactctgtcgatccctccttgggaagccccaaaagagcataagtacaaggctgaagaacatacggtggtgttgactgtaaccggagaaccgtgccatttccctttccaataccacagacaactgtaccataaatgtactcataaaggccgcccgggtccccaaccttggtgcgccactaccccaaactttgatcaggaccagaggtggggttactgtctggagcctaagaaagtcaaggaccactgttcgaaacacagcccgtgtcagaagggcggaacctgtgtgaacatgccctccgggccacattgtctctgtccccaacatcttactggaaaccactgccaaaaggaaaagtgctttgaaccacagttgttgcggttttttcataagaacgagatctggtacaggaccgaacaggcggcagtggcacgatgccaatgtaagggtcctgatgcacactgtcaacggcttgcgagccaagcatgcaggaccaatccttgtttgcatggcggaagatgccttgaagtggaggggcatcggctgtgtcactgcccggtcggctacaccggcgcattctgcgatgtcgatactaaggcatcatgttacgatggacgaggcctctcctatagaggtctggcacgcaccactctgtccggggcgccttgtcaaccttgggcctcagaggcaacctacagaaatgtgactgccgaacaagcacgcaattggggtcttggaggacatgccttttgtcgcaatccagacaacgatatccggccatggtgttttgtgttgaatcgcgacagacttagctgggagtactgcgacttggcacagtgccagacccctactcaagcagcgccccctacccctgttagtcctcgtctgcatgtgccacttatgcctgcgcaacctgcaccccccaagccgcagcctacgacgagaacccctccacaatcgcagacccctggggcactgcctgctaaacgagaacagccaccatcgcttacccggaacggacccctgagttgcggtcagcgtctcagaaagtcgcttagcagcatgactcgtgtggtgggcggtcttgttgcacttagaggagcacacccctacatcgccgcactctactgggggcactccttttgcgcggggagccttattgctccatgttgggtcctgactgcagctcactgtttgcaagacaggccagcgccggaggacctgactgtggtcttgggtcaggaacgaaggaaccattcctgtgaaccatgtcagaccctggccgtcaggtcatacagactgcacgaggctttttctccggtgtcttaccagcacgatctggccctgctgagactgcaggaagatgcagacggatcctgtgccctcctgagcccgtacgtccaacctgtgtgtctcccatccggtgcggccaggccgtcagaaactaccctctgtcaggtggcaggatggggacatcaatttgaaggagcagaagaatacgctagcttcttgcaagaggcacaagtgcctttcctgtccctcgagcggtgctcggcacctgatgtccatggctcctcgatactcccgggcatgttgtgtgcaggtttcctcgaaggaggaactgatgcatgccagggagattccggcgggccgctcgtttgtgaagatcaggcagcagagaggcggctgacgctgcaaggtattatctcctggggaagcggttgtggggatcgaaacaagcccggagtctacaccgatgtggcttactatcttgcctggatacgagagcatactgtgagc

SEQ ID NO: 249845 - DNA, 1845 bp, synthetic construct
  misc_feature 1..1845: note = Description of Artificial Sequence: Synthetic coding sequence
  source 1..1845: mol_type = other DNA
atgagagctttattacttttaggatttttattagtttctttagaatctacattatctattccaccatgggaagcaccaaaggaacataagtataaagcagaagaacatacagttgttttaacagttacaggagaaccttgtcattttccatttcaatatcatagacaattatatcataaatgtacacataagggaagaccaggacctcaaccttggtgtgctacaactcctaattttgatcaagaccaaaggtggggatattgtcttgaaccaaaaaaagttaaagatcattgttcaaagcattcaccatgtcaaaaaggaggaacatgtgttaatatgcctagtggaccacattgtctttgcccacaacatttgactggaaatcattgtcaaaaagaaaagtgttttgagccacaacttttaagattttttcataaaaatgaaatatggtatagaactgaacaagcagcagtagcaagatgtcaatgtaaaggaccagatgcacattgtcaaagacttgcatctcaagcatgtagaactaatccttgccttcatggtgggcgttgtcttgaagtcgaaggtcataggttatgtcattgcccagttggatataccggtgctttttgtgatgttgatacaaaagcatcttgttatgatggaagaggtttatcatatagagggcttgctcgtactactttaagtggtgcaccttgtcaaccttgggcaagtgaagcaacttatagaaatgttactgcagaacaagcaagaaattggggacttggaggacacgcattttgtagaaatcctgataatgatatacgtccatggtgttttgttcttaatagagatagattatcatgggaatattgtgatcttgcacaatgtcaaacaccaactcaagccgctccacctacaccagtttctcctcgattacatgttcctttaatgccagcacaacctgctccaccaaagccacaaccaactactagaacacctccacaaagtcaaactccaggagcattaccagcaaagagagagcaaccaccatctttaacaagaaatggtccattatcttgtggacaaagacttagaaaatcattatccagtatgactagagtcgtaggtggtcttgttgctttaagaggagcacacccatatattgcagctttatattggggacattctttctgtgctggttcattaattgcaccttgttgggttttgacagctgcacactgtttacaagacagaccagctccagaagatttaactgtagttcttggacaagaaagaagaaatcattcatgtgaaccatgtcaaactttagcagttagatcatatagacttcatgaagctttttcaccagtttcataccaacatgatttagcacttttaagattacaagaagatgcagacggaagttgtgcacttttatctccatatgttcaaccagtttgccttccatctggtgcagcaagaccaagtgaaactacactttgtcaagtagcaggatggggacaccaatttgaaggtgctgaagaatatgcatcttttttacaagaagctcaagtaccatttttaagtcttgaacgttgttctgctccagatgttcatggatcatcaattttacctgggatgctttgcgctggatttttagaaggaggaaccgatgcttgtcaaggtgattcaggaggacctttagtttgtgaagatcaagctgctgaaagaaggttaacacttcaaggaatcatatcttggggatctggatgtggagataggaataaaccaggtgtttatactgatgttgcatactatttagcatggattcgtgaacatacagtttct

SEQ ID NO: 249846 - DNA, 1845 bp, synthetic construct
  misc_feature 1..1845: note = Description of Artificial Sequence: Synthetic coding sequence
  source 1..1845: mol_type = other DNA
atgagagcacttctgctccttggtttcctgcttgtgtccctggagagcaccctgtcgattcccccctgggaagcgccaaaagaacataagtacaaagcagaggagcatactgtggtgttgaccgtgaccggcgaaccttgtcattttcccttccaataccacagacaattgtaccacaaatgtacccataaaggtagacctgggcctcagccatggtgtgcaactactcctaatttcgatcaagatcagcgctggggatattgtttggaacccaagaaggtgaaggatcattgctccaagcacagcccttgtcaaaagggaggtacttgtgtgaacatgccttcgggaccacattgtctgtgtccacagcatctcaccggaaaccattgtcaaaaggagaaatgttttgagccacagcttctccgtttctttcataagaacgaaatctggtacaggaccgaacaggcggcagtggcccgctgccaatgtaaaggcccggacgcacactgccagcgcctcgcaagccaggcatgtcgaaccaacccttgccttcacggaggacggtgtcttgaagtggagggccatcgcctgtgccactgccccgtaggctacactggagccttttgtgacgtggacactaaggcgagctgttacgatgggagagggctgagctaccgcgggctcgcgcggactactctgtccggtgcaccttgtcaaccctgggcttctgaagcgacttataggaacgtgactgcagaacaagcgagaaactggggtcttggagggcatgcattttgcagaaaccccgataacgatatccggccatggtgttttgtgctgaaccgcgaccgacttagctgggaatattgtgatctggcacaatgtcagactcccacgcaggcagctcctccgacgcctgtgtcgccgagactccatgtgccactgatgccagcacaacctgcaccccccaaaccacagccgaccactcggacccctcctcagtcccagaccccaggtgcgctccctgcaaagcgtgaacagcctcctagccttaccaggaacgggcctctgtcctgtggccaaagactcagaaagtcgttgagctccatgacccgcgtcgtgggcggtcttgtcgcccttcgcggcgcacatccgtacattgctgcactttactgggggcacagcttttgtgcaggaagccttattgcgccttgttgggtcctgaccgcagcacactgtctccaagatcgtccagcacccgaagatctcaccgtcgtgcttggacaggaaagaaggaatcactcgtgcgaaccatgtcagactcttgcagtgaggtcgtaccgactgcatgaagcatttagccctgtctcataccaacatgacctggccctgcttcgcctgcaggaggatgccgatggatcgtgtgccctgctgtcaccatacgtgcagcctgtgtgtctgccctccggtgcggctagacccagcgaaaccactctttgtcaagtcgcaggctgggggcatcaattcgaaggtgcagaagaatacgcttcgttccttcaagaggcccaggtgccttttttgtcccttgagagatgttcggcaccggatgtgcacggatcctccatcctccccggtatgctctgcgcaggttttcttgaagggggaaccgacgcttgtcagggtgacagcggaggaccgcttgtgtgcgaggaccaggcagcagaaagacgccttactttgcaggggataatctcttggggctcgggttgcggcgatcggaacaagcctggtgtctacaccgacgtggcgtactacttggcatggatacgcgaacatactgtgtct

SEQ ID NO: 249847 - DNA, 1845 bp, synthetic construct
  misc_feature 1..1845: note = Description of Artificial Sequence: Synthetic coding sequence
  source 1..1845: mol_type = other DNA
atgcgcgctctcctcctcctgggttttctcctcgtcagcctggaaagcaccctttcaattcctccctgggaagcccccaaggagcacaaatataaggctgaggagcacaccgttgtcctgactgtgaccggtgaaccatgccacttcccatttcaataccaccgtcagctttaccacaagtgtacccataaaggaaggcccggtccacagccctggtgcgctactaccccaaactttgatcaggaccagcgttggggctattgcctggaacctaagaaagttaaggatcactgcagcaagcacagcccatgccagaagggcggtacctgtgtaaatatgcccagcggcccccattgcctgtgccctcagcacttgaccggtaaccactgccagaaggaaaagtgcttcgaaccacagcttctgcgtttcttccataagaatgagatttggtaccgtaccgaacaggccgcagttgctcgttgccagtgcaagggaccagacgctcactgtcagaggctggctagtcaggcttgtagaaccaatccctgtttgcacggtggtaggtgtctggaagtcgagggccatcgtctctgccactgtcccgttggttacactggcgctttctgcgatgtagacacaaaagctagctgctacgatggtcgtggtctgtcttatcgcggtttggctagaaccaccttgtccggagccccatgccagccctgggcctcagaggcaacctaccgtaacgtgacagccgagcaagcacgcaactggggtttgggcggccatgccttttgtcgcaatccagataatgacatccgcccttggtgttttgtgctgaaccgtgatcgcctctcttgggagtactgtgatctggctcagtgccagacccccactcaagccgccccacccaccccagtctccccaaggctgcatgttcctctgatgcctgcccagccagcaccccctaaacctcagcctacaacccgcactcctccccaatctcaaaccccaggagcactgcccgctaaaagagaacagccaccttcactcacaagaaacggtcctttgagctgtggccaacgcctgcgtaagagcctgtcaagtatgactcgcgtggtgggtggtctggtggcactgcgtggtgcccatccttacatagccgctctctactggggacactctttctgtgctggctcactcatcgccccatgctgggtccttaccgctgcacactgtctgcaggacaggcccgccccagaggacctgaccgttgttctgggtcaggagcgcaggaaccactcctgcgaaccttgccagactctggctgtaagatcatacagactgcacgaggcattctctcccgtctcttatcagcatgacctggctttgctgaggttgcaagaggatgcagacggctcctgtgctctgctcagtccctatgtgcagcccgtatgcctgcccagtggagccgctcgtccctctgagacaactttgtgccaggttgccggctggggacaccaattcgagggtgctgaagagtacgcttcttttctgcaggaagcacaagttccctttctgagtctggagagatgtagcgcccccgacgtgcatggatcatccatcctgcctggcatgctttgtgctggctttctggaaggcggaaccgacgcctgccaaggagatagcggtggacccctggtctgtgaggaccaggccgccgagcgtaggctgaccctccagggcataatctcttggggatccggatgtggcgaccgtaataagcccggtgtttacaccgacgttgcctactacctggcttggatcagggagcacaccgtctcc

SEQ ID NO: 249848 - DNA, 1845 bp, synthetic construct
  misc_feature 1..1845: note = Description of Artificial Sequence: Synthetic coding sequence
  source 1..1845: mol_type = other DNA
atgagagctcttctgttgctgggctttttactggtgagcctcgaaagtactttgtcaattcctccatgggaggcccctaaagagcacaaatacaaggccgaggagcacaccgtggtcctcacagtcaccggagagccttgccattttcccttccaatatcaccggcagctgtaccacaagtgtactcataaaggccgacctggcccacaaccctggtgtgccacaactccaaattttgaccaagatcagcgctggggttattgccttgaaccaaagaaggttaaagaccattgtagtaagcatagcccatgtcagaagggtggaacgtgtgtcaacatgccctcaggtccacattgcctgtgcccgcagcatcttaccggtaatcattgccaaaaggaaaagtgtttcgaaccacaattactgcggttcttccacaagaatgaaatctggtatcgtacggaacaagctgcggtggcacggtgccagtgtaaggggccggatgctcattgccagagactggcttctcaagcctgccgtaccaatccctgtctgcacggaggccgttgtctggaagtggagggacaccggctttgccactgtccagttggatacactggcgcattctgtgacgttgacacgaaggccagctgctacgacggccgagggttgagctacagggggctcgctcggaccaccttgagcggcgccccctgtcagccgtgggcaagcgaggctacgtacagaaacgtcacagctgaacaagccaggaattggggcctgggaggccacgccttttgcagaaatcctgataatgacatcaggccttggtgtttcgtgctcaatagggaccggctgagttgggagtactgtgacctggcccagtgccagacgccaactcaggcagccccacccacacctgtcagcccgcgcttacatgttcctctgatgccggcccagcccgctccgccgaaaccgcagcccactacccgcacacctccccaatcacaaacccccggagccctgcctgcgaagcgcgaacagccgccgtctctcacaagaaacgggcccctgtcctgcggccaacgcttaagaaaaagtctttcatccatgacccgagtggtgggcggcttggtcgcgcttaggggggcccacccttacatcgccgccctctactgggggcatagcttctgtgccggctcgctgatcgccccttgttgggtgcttacagctgcccattgtctccaggacaggcctgcacccgaagacctgactgtggtgctggggcaagagcgcagaaatcattcttgtgaaccctgccagacgctggccgtcagatcttatcgcctgcacgaggcattctctccagtgtcataccaacacgacctagccctgttacggctgcaagaagacgcggatggctcctgtgcacttctctccccatacgtgcaaccagtgtgcctgccatctggcgctgcccgcccatccgagacaactctctgtcaggttgcagggtgggggcaccagtttgagggcgccgaagagtacgcttctttcctgcaagaggcccaagtaccattcctgtccctggaacgttgctcagcccccgatgtgcatggatcttccatcctacctggcatgctatgtgccgggtttttagaaggaggcaccgacgcctgtcagggggacagtggcggacccctcgtgtgcgaagaccaggcagcagagcgtaggttgacgcttcagggtatcatcagctgggggtccgggtgtggtgatcggaataagccgggggtgtacaccgatgtcgcgtattaccttgcatggattcgggaacatacagtgtct

SEQ ID NO: 249849 - DNA, 1845 bp, synthetic construct
  misc_feature 1..1845: note = Description of Artificial Sequence: Synthetic coding sequence
  source 1..1845: mol_type = other DNA
atgagagcgcttctgttgctggggttcctcttggtttcactcgaatctaccctcagcatacctccatgggaggcaccaaaggagcacaagtacaaggccgaggagcacactgttgttctgacagtgaccggagagccttgtcatttcccctttcagtaccatcgacagctttaccacaagtgcacacacaaaggcaggcccggcccccagccgtggtgcgccacaacccctaatttcgaccaggatcaacgctggggatattgcctggaaccgaagaaggttaaggatcattgtagcaagcactcaccttgccagaagggaggtacatgcgtgaatatgccctccggaccccattgtctctgtcctcagcaccttaccgggaatcattgccaaaaggaaaagtgttttgaacctcagctgttgagattctttcataagaacgaaatctggtaccgaaccgagcaggcagcggtggcccgatgtcagtgtaaggggcctgacgcccactgtcaaaggttggccagtcaggcttgtagaaccaatccctgcctgcatgggggaaggtgcctggaggtagagggccaccgcctgtgtcattgcccagtggggtataccggtgcattctgcgacgttgacactaaagccagttgctatgacggcagagggctctcttatcggggcctcgctaggaccactctgtcaggtgctccctgtcaaccgtgggcttccgaagctacttacaggaatgtgaccgccgagcaggctcgcaactggggtctggggggacatgcattctgccgcaaccctgataacgacatccggccatggtgtttcgtgctcaatcgggatcggctgtcatgggagtattgcgaccttgcccaatgtcaaactccaacccaagccgctcctcccacacccgtgtcaccccggttgcacgtaccactgatgccggcccagccagcgccgccaaagccacaaccaacaacccgaacaccccctcagtctcaaaccccgggggccctgcccgccaaaagagaacaaccaccatccctgacgaggaacggtcccctgtcttgtggccagcggctgcgcaaatctctgtcctccatgacgcgggttgtgggtgggctggtggctctcaggggagctcacccttatatcgccgccctgtattgggggcactccttctgcgctggtagcttgatagccccctgttgggtcctcaccgccgcccattgcctgcaagacaggcctgctcccgaggatcttactgttgttttgggacaggaaagaagaaatcactcctgcgaaccatgtcaaacgctcgccgtaaggtcttatcgactgcacgaagccttttctccagttagctaccaacacgacctggccctcctgaggcttcaggaggacgccgacggaagctgtgccctcctttccccgtacgtgcaacctgtctgcctgccttcaggggcggcaaggccctctgagaccacactgtgtcaagtggccgggtggggccaccagttcgaaggggccgaagagtacgcttctttcctgcaggaagcccaagtcccgtttctgtccctggaaagatgtagcgcccccgatgtgcacggttcatctatactgccgggtatgctgtgtgccggcttcctcgaggggggaacagatgcctgccaaggtgacagtgggggcccccttgtttgcgaggatcaggctgcagagcgacggctgaccttgcagggcatcatctcctgggggagtggctgcggagaccggaacaagcccggtgtgtatactgacgtggcctattacctggcttggatccgcgaacatactgtcagt

SEQ ID NO: 249850 - DNA, 1845 bp, synthetic construct
  misc_feature 1..1845: note = Description of Artificial Sequence: Synthetic coding sequence
  source 1..1845: mol_type = other DNA
atgagagctctgctgcttctgggttttctgttggtgagcctggagtcaacacttagcatcccaccgtgggaagcgccgaaagagcacaagtacaaggcggaagagcacaccgtcgtgttgacagtgaccggtgagccgtgccactttccattccaataccaccgccagctgtaccataaatgcacccacaaaggtcgtcccggtccgcagccatggtgtgcgaccactccgaattttgatcaggaccagcgttggggttactgtctggagccgaagaaggtcaaagaccactgcagtaaacacagcccttgtcagaaaggtggtacatgcgttaacatgccaagcgggccgcactgtctgtgtcctcaacacttgacaggcaatcactgccaaaaggaaaaatgctttgaaccgcagctgctgcgattttttcacaaaaacgaaatatggtaccgtaccgaacaagccgccgtggcccgctgtcaatgcaagggcccagatgcccactgtcaacgactggcctctcaagcatgccgcaccaacccgtgcctgcacggtgggcgctgtctcgaggtggagggccaccgcttgtgtcattgccctgtgggttatacaggcgcgttttgtgatgtcgataccaaggcgagctgctacgacgggcgcggtctcagctatcggggcctggcgcgcacaacgctgtctggcgcaccgtgccagccttgggcctccgaggcgacctaccgcaacgtaacagctgaacaagcaaggaactggggtctgggtgggcacgcgttctgccggaacccagacaatgatatcaggccatggtgcttcgtcctgaaccgcgacagactgagctgggaatactgtgacctggctcagtgtcagactccaacccaggctgcccccccaaccccagtgagcccgcgccttcacgttccgcttatgcccgcccagccagcaccgccaaagccacagccgactactcggactcccccacagagccagactcctggggctttgcctgccaagagggagcagcctccatccctgacacgcaacggtcctctgtcgtgcggccagcggctgaggaagtccttgtcctctatgacccgcgtggttggtggcctggtggcgcttcgcggtgcccatccttacatcgccgccctgtattggggtcatagcttctgtgcgggttctttgatcgccccgtgctgggtgctgaccgccgcgcattgcctccaggatcgaccagctccagaggatctgaccgtcgtgctgggccaggagcgtagaaatcacagctgtgaaccatgccagaccctggcggttcgctcatacaggttgcatgaggcattcagccctgtgagctaccagcatgacctggcgctgctgaggctgcaggaggatgccgacggatcttgtgctctgctgtcgccttacgttcagcctgtctgcctgccgtccggagctgcacgtccaagcgaaacgaccttatgccaagtggcaggttggggtcaccagttcgaaggagcggaagaatacgcgtcctttctccaggaggctcaagtgccgtttttgtctctggagcgttgtagcgctccagacgtgcatggcagcagcattctgcctgggatgctgtgcgcaggtttcctggagggcggtacggacgcttgtcagggtgattccggtgggcctctggtgtgcgaagaccaagctgcggaacgccgcctcactttgcaggggattatatcttggggtagcgggtgcggggatcgaaacaaaccaggcgtgtacactgacgtggcgtactacctggcgtggattcgggagcacaccgttagc

SEQ ID NO: 249851 - DNA, 1845 bp, synthetic construct
  misc_feature 1..1845: note = Description of Artificial Sequence: Synthetic coding sequence
  source 1..1845: mol_type = other DNA
atgcgagcacttcttctcctgggctttctccttgtctccctggagagtacactgtcgatccccccttgggaggccccaaaggagcataaatataaagctgaagagcacactgtggttttgacagttactggagagccttgtcattttccttttcagtatcaccgccagctgtatcacaagtgcacacacaagggcaggcctggaccacaaccctggtgtgcgacaacccccaatttcgatcaggaccagaggtggggctactgtctcgaacccaaaaaggtgaaggaccactgctccaaacacagcccttgtcagaagggcggtacctgtgtcaatatgccttcagggccccactgcttgtgcccgcaacaccttacagggaatcactgtcagaaggagaagtgctttgagcctcaactcctgcgattctttcacaaaaatgaaatatggtaccgcactgaacaggctgctgtggcgcggtgtcagtgtaaggggcccgacgctcactgccagcggctcgcctctcaggcctgccgcacgaacccttgtctgcacgggggacgttgtctagaagtcgagggccacagactgtgtcattgtcctgtcggctataccggtgctttttgcgacgtcgacacgaaagcttcatgctacgacggccgcgggctgtcttacagaggtttggcccgaaccacacttagtggggccccttgtcagccttgggccagtgaagcaacatatagaaacgtgacggcagagcaggctcggaactggggcttgggagggcatgctttctgccgtaatcctgacaacgacataagaccttggtgcttcgtcctcaacagagacagactgtcttgggagtattgcgacttggcacaatgccagacccccactcaggccgcgccacctacacctgtctctcctagactccacgttcctctgatgccagctcaaccggcaccccccaagcctcaacctaccacaagaacaccaccccagtcccagacaccgggagccctgcccgcaaaacgagagcagcctcccagtctgacccgtaatggaccactctcttgtggccagcgcttgaggaaatccctgagttcaatgacacgcgtggtagggggactcgtcgcgctacgcggggctcacccatacattgccgccctgtattggggacactcgttttgcgctggatccctgatcgccccgtgctgggtcctcaccgctgcccattgtctgcaagatcgccccgccccagaggacctcactgtagttctgggccaggagcgcaggaaccactcttgtgagccatgccagacgctggctgtgcggagttaccgcttacacgaggccttctctcctgtgtcataccagcacgatttggcattactgagactacaggaggatgcagacggctcttgtgctctcctgtccccttacgtgcaacccgtctgcttgccgtccggagcagcccggccttccgagacgacactgtgccaggtcgcaggatggggccatcagtttgaaggtgctgaggaatacgccagctttttgcaggaggcgcaggtgccctttctatctttggaaagatgctctgcccccgacgttcatggaagttcaatcctccctgggatgctgtgtgccggttttctggagggggggaccgacgcctgtcagggggatagcggaggccccctggtgtgcgaggaccaggccgcagagcgacgactgaccctgcagggaataatctcatgggggagtggttgtggggaccgcaataaaccgggggtttatacagacgtggcatactatctggcctggatccgggagcatactgtttcc

SEQ ID NO: 249852 - DNA, 1845 bp, synthetic construct
  misc_feature 1..1845: note = Description of Artificial Sequence: Synthetic coding sequence
  source 1..1845: mol_type = other DNA
atgcgagcattgctgcttttgggttttttgttggtttcattggagtccacattgtctatccctccttgggaggcccctaaagagcacaaatacaaggccgaggagcacaccgtagtattgactgtcacaggtgaaccatgccatttcccttttcagtatcacaggcaactttatcataagtgcactcataaaggtagacctggccctcaaccatggtgtgctaccactcccaacttcgaccaggaccagcgttggggttactgcctagaacctaagaaagttaaagaccactgtagcaaacatagtccttgccaaaagggtggaacttgtgtcaatatgccttccggacctcactgtttatgcccacaacatctcactgggaatcattgtcaaaaagagaaatgtttcgagccccagttacttaggtttttccacaaaaacgaaatttggtaccgcacagagcaggcagctgtggcaagatgccaatgcaagggaccagatgctcactgccagaggcttgcatcccaggcctgtagaacaaacccgtgtctccatgggggacgttgtctggaggtcgagggtcaccgactttgccattgtccagtcgggtacacgggtgcattctgtgatgttgataccaaagcttcatgctatgacgggagaggtttgtcatatcgtggactcgcacggactactctgtccggggctccctgccagccttgggcatcagaggctacatacagaaatgttaccgcagagcaggcgcgaaactggggcctgggtggccatgctttctgtaggaaccctgataacgacataaggccttggtgcttcgttttaaatcgggataggctgagttgggagtattgcgatctggcgcagtgtcaaactcctacccaagctgcaccacctacgccagttagcccacggctgcatgttccgcttatgccagctcaacctgctccacctaagccacagcctaccacccgaactccccctcaatcacaaaccccgggtgccttgccagccaaaagggagcaaccaccatccttgacgaggaacggccccctctcctgcggtcaacggttgagaaagtctctttccagtatgaccagggtcgtaggcggtctggtggctctaaggggggcccatccttacatcgcggcgctttattggggtcattcattttgtgctggaagccttattgctccgtgctgggtcctgaccgcggcacattgtcttcaagacaggcctgcaccagaagatctgacagttgttctaggtcaagaacgtcgtaatcactcgtgtgagccttgtcagacactggccgtcaggtcctatcgcctgcacgaagctttcagtccagtgagctatcagcatgacttggccttgcttcgtttacaagaggatgcagatggatcatgtgccctattgtccccttatgtccaacctgtttgtcttccaagtggagcagcaaggccttctgaaacaactttgtgtcaggtggccggatggggacatcaatttgagggggccgaagagtatgcttccttcttacaggaagcccaggtaccttttttgtccctggaaagatgcagcgcccccgatgtgcacggttcctcgattcttccagggatgctgtgcgctggatttttagaaggtggaactgacgcttgccaaggcgactctggaggacctttagtgtgcgaagatcaggcagctgagcgaaggcttacactccaaggtatcatttcgtggggtagtggttgcggagaccgaaataagcctggtgtgtacacagatgtcgcctattatctggcttggattagggaacacacggtctct

SEQ ID NO: 249853 - DNA, 1845 bp, synthetic construct
  misc_feature 1..1845: note = Description of Artificial Sequence: Synthetic coding sequence
  source 1..1845: mol_type = other DNA
atgcgggctctgctactcctggggttcctactggtctcactggaatcgaccttgagcatccccccttgggaggcccctaaggaacataagtacaaagctgaggaacatacagtggtgctcaccgtgacaggagagccttgccatttccctttccagtaccaccggcagttgtatcacaagtgtacccacaagggccgacccggccctcagccatggtgcgcaactaccccaaatttcgaccaggaccaaagatggggctattgtctcgagccaaaaaaagtaaaggatcactgtagcaagcactccccctgtcagaagggcgggacttgcgttaacatgcctagcggcccgcactgtctatgccctcagcatctgactggtaaccattgtcagaaggagaagtgcttcgagccacagcttttacggtttttccacaaaaacgaaatttggtaccgcaccgaacaggccgcagttgcccgctgtcagtgtaaaggcccagatgctcattgccagagacttgcctcacaggcctgtcgcacaaatccctgtctgcacggcggtcggtgcttggaagtagaggggcatcggctttgccactgtcccgtaggatacaccggggctttctgcgacgtcgataccaaagccagctgttacgatggacgcgggctgtcctacagaggtctcgctcgtactaccctgtcaggcgcgccttgccagccctgggcctcggaggcaacctacaggaatgtgacagccgaacaggcccggaattgggggctgggcggacacgcgttctgtcgaaatcccgataacgacatcaggccttggtgctttgttctaaacagagatagattgtcgtgggagtattgcgatttggctcagtgtcagacacccacgcaggccgccccgcctaccccagtgtcacccaggctgcacgtccctctcatgccagctcagcctgctcccccaaagccacagccaacaacccgcacaccgcctcagtcccagacacccggcgctttacctgccaaacgtgaacagccgcctagtctgacaagaaacgggccactgtcctgcggccagaggttgcgaaagtccctaagctccatgacccgagtggtgggggggttggtggccttgagaggcgcacacccctacattgcagcactatattggggccatagcttttgcgctggatcactgatagctccctgttgggtcctgactgcagctcattgtttacaagataggccagccccggaggatctgacggtggtattgggtcaggagaggcgcaaccattcctgcgaaccttgtcagaccttggccgtccgatcttacaggctgcacgaggccttctcccccgtctcctatcagcacgatttggcactgctacgacttcaggaagatgctgatgggagttgtgctctgctcagtccatacgtacaaccggtgtgtcttccctccggggctgcccggccctctgaaacgactctctgccaggtggccggctggggacaccaattcgaaggagccgaggagtatgcatcctttctacaggaggctcaagtccctttcctctctctggagcgatgtagtgctccagatgtgcacggttcttcaattttacctggaatgctgtgcgccggctttttagagggcggaactgacgcttgccaaggggatagtggagggccactagtctgtgaggaccaagctgcagagaggcgtctgaccctgcagggcatcatttcctgggggtccggttgcggcgaccggaacaagcctggcgtctacacagacgtggcctattacctggcatggattcgggagcacaccgtctcc

SEQ ID NO: 249854 - DNA, 1845 bp, synthetic construct
  misc_feature 1..1845: note = Description of Artificial Sequence: Synthetic coding sequence
  source 1..1845: mol_type = other DNA
atgagagctctgctgctgctgggattcctgctcgtttcccttgaatcgactctgagcattcctccctgggaagcacctaaagagcataagtacaaggccgaagagcatactgtcgtgcttaccgtcactggggagccttgtcatttcccattccagtaccaccgccagctctaccacaaatgtactcacaaaggcaggcctggaccacaaccgtggtgcgccaccactccaaacttcgaccaggaccagcggtgggggtattgcctcgagccgaagaaggtgaaggaccactgctccaagcactcgccatgccagaaaggaggaacctgcgtcaacatgccaagcggcccacactgcctctgcccgcagcacctcactggcaaccattgccagaaagaaaaatgcttcgaaccgcagctgctgcggtttttccataagaacgagatttggtatagaacggaacaggcagccgtcgcacggtgccagtgtaagggtccagatgcccactgtcagagattggcctcccaggcctgccggaccaatccgtgcctgcatggcggaaggtgcctggaggtggagggacatcgtctctgtcattgcccggtcggatacaccggagccttctgcgacgttgacaccaaggcctcctgctacgacggacggggactttcataccggggactggcgcgcaccaccttgtccggtgcgccgtgccaaccgtgggctagcgaagccacttaccgtaacgtcaccgcggaacaagcgaggaactggggacttggaggacacgccttttgtagaaatccagacaatgacattcgaccctggtgcttcgtgctgaacagggaccggctttcctgggagtactgcgacctggcccaatgccagactcctactcaggcagctcccccgacgccagtgtcgccgcggctgcacgtcccgctgatgcctgcccaaccagctccaccgaagccacagccaactacgagaactcctccacaatcacagaccccgggagctttgccagccaaacgggaacagccgcctagcctgactcggaacggccctctttcatgcggacaaaggctcagaaaatcgctttcatcaatgacccgagtcgtcggaggcctggtcgcgctccgcggcgcgcacccgtacattgccgccctctactggggtcactcattttgcgccggatccctgatcgccccgtgctgggtgctcaccgctgcacactgcctgcaggacagaccggcccctgaggacctgacggtggtgttgggacaggagaggcgcaaccactcgtgcgaaccgtgtcagaccctggccgtgcgcagctacagactgcacgaagcgtttagcccggtttcctaccagcatgacctggcgctgcttaggctgcaggaggatgcggacgggagctgcgccctgctgtctccttacgtgcagccggtctgcctgccgagcggcgccgcgaggccttcagaaaccactctttgccaagtggcaggttggggtcaccaattcgagggggcggaagagtacgcatcgttcctccaggaagcacaggtgcccttcctgtcccttgaaagatgctcggcaccggatgtccatgggtccagcatccttcctggaatgctgtgtgccggcttcctggaaggaggaaccgacgcctgccagggagattcgggcgggccgttggtgtgcgaggaccaggcggcggagcgccgcctgactctgcaaggaatcatctcgtggggctctggatgtggcgatcgcaacaagcccggggtgtacaccgacgtcgcgtactatctcgcctggatccgcgaacacaccgtctcg

SEQ ID NO: 249855 - DNA, 1845 bp, synthetic construct
  misc_feature 1..1845: note = Description of Artificial Sequence: Synthetic coding sequence
  source 1..1845: mol_type = other DNA
atgagggctttgttgctcttaggattcctcctagtgagcctggagtccacactgagtatccccccgtgggaagcaccaaaggagcacaaatataaagccgaggagcacacagtggttctaacagtgactggcgagccttgccactttccgttccagtatcaccggcagttgtatcacaaatgcacgcacaagggacgacccggtcctcagccttggtgtgctaccacccccaatttcgatcaggaccagcggtggggatactgtctggagcccaagaaggtgaaggatcactgcagtaagcactcaccctgtcagaagggaggaacttgcgttaatatgcccagcggccctcactgtctctgtccccaacacctcacgggcaatcattgccagaaggagaaatgtttcgagccacagctgctccgtttctttcacaagaacgagatttggtatcgcactgagcaggcggcggtcgctagatgtcaatgcaaggggccagacgctcattgtcagagactggcgagccaggcatgtaggaccaacccttgcctgcacgggggcagatgtttggaggtggaagggcaccgcctgtgtcattgtcccgttgggtataccggcgcattttgtgacgtggatacaaaggcctcatgctatgacggtagaggtctctcctatcgagggttggctcggaccaccctctctggagctccttgtcagccctgggctagcgaggccacctacagaaatgtgacagctgagcaggccagaaattgggggttgggcgggcacgcgttctgccgcaaccccgataatgacattagaccctggtgttttgtattgaatagagacagacttagctgggagtactgtgacctagcccagtgtcagacgcctacccaggccgccccgccaacccctgtgagcccaagactgcatgtgcctctcatgcctgcacagccagccccgccaaagccacagcccactacaagaacgccccctcaaagccagacccccggggcccttccagccaaacgggagcagcccccaagcttgaccaggaacggccccctctcctgcggtcagagattgcggaaaagtctctcatctatgactcgggtagtgggagggcttgtggcactgaggggcgcacatccttatatagccgctctgtattggggacacagtttttgtgcagggtcactcatcgctccctgctgggtgctcaccgccgcccactgtttacaggacaggccggccccagaagatctaacagtggtgctggggcaggaacggagaaatcacagttgtgaaccctgccaaaccctagctgtgcgcagttatcgcctccatgaagcttttagccctgtttcttaccagcatgatcttgctctcctgcggcttcaggaagatgccgacgggagttgtgccctgctgtccccgtatgtgcagccggtttgtttgccaagtggcgccgcacgtccttccgaaaccacgctctgtcaggtagcgggatggggccatcaatttgagggcgcagaggagtatgcctcatttctacaagaggcccaggtaccattcctctcactagagcggtgctctgctccagacgtgcacgggtcctcaattcttcccgggatgctctgcgccggtttcctcgaaggtggaactgatgcttgtcagggtgatagcgggggacctctagtatgtgaggaccaggcagctgagagaaggctgactctgcaaggaataatttcctggggctccggatgtggagacagaaacaagcccggtgtgtacactgacgtcgcctattatctagcctggattagggagcatactgtatct

SEQ ID NO: 249856 - DNA, 1845 bp, synthetic construct
  misc_feature 1..1845: note = Description of Artificial Sequence: Synthetic coding sequence
  source 1..1845: mol_type = other DNA
atgagagctctgctgctgctgggatttctgcttgtgtccctggagagcaccctctcgatcccgccatgggaggccccgaaggagcacaaatacaaagctgaagaacacactgtggtactcaccgtgactggcgaaccgtgtcacttcccattccagtaccaccggcaactgtaccacaagtgcactcataaggggcgcccgggaccgcagccatggtgcgcaactactccaaatttcgaccaggaccaacggtggggatactgcttggaacctaagaaggttaaagatcattgtagcaagcattcaccttgccaaaaaggtggaacctgcgtgaacatgccgtcgggaccccactgcctgtgtcctcagcacctgactggaaaccactgtcaaaaagagaagtgcttcgagccacagctgctgcgattcttccataagaatgaaatttggtaccgcacggagcaagctgcagtggccaggtgccagtgcaagggacctgatgcccattgccagagattggccagccaggcctgtcggacgaatccgtgcctccacggaggcagatgcctggaagtcgagggccacagactgtgccactgcccagtcgggtacaccggtgcgttttgcgacgtggacactaaggcgtcgtgttacgacgggcgcggtctgagctaccgcgggctcgcacggaccaccctgtcgggagcaccctgccagccgtgggcgtccgaagccacttaccggaatgtgactgcggaacaggccagaaattggggacttggagggcacgcgttctgccggaatccagataatgatatccggccgtggtgctttgttcttaatagggatcggctttcgtgggagtactgcgacctggcacaatgccaaaccccaacccaagcagcaccgcccactccggtgagccctagattgcacgtgcctctcatgccggcccagcctgcgccaccgaagccgcagcctacgactcgcaccccgccgcaatcgcaaacgccgggggccttgccggccaaacgcgagcagccgccttcgctgaccagaaatggacccctctcctgcggtcaaagactgaggaagagcctctcgtccatgacccgggttgtgggcggactcgtggccctgcggggagcgcacccctacatcgcagcgctgtactggggacattccttctgcgctggatcactgatcgcaccttgttgggtgcttaccgccgcacactgccttcaggaccgcccggccccggaggacctgaccgtggtgcttgggcaggaacgaagaaaccacagctgtgaaccatgtcaaaccctggctgtcagatcgtacaggctgcatgaagccttctcgcccgtctcgtaccagcatgatctcgcccttctgaggctgcaggaggatgcggatggttcatgtgccctgctttccccgtacgtccagcctgtgtgtctgccgtcaggagcagcccggcccagcgagactaccctgtgccaggtggcgggatggggacaccagttcgaaggcgccgaggagtacgcgtcattccttcaggaagcgcaggtcccattcctgtccttggagaggtgctctgcgcctgatgtccacggatcgtcgatcctcccggggatgctgtgtgctggattcctcgaaggtgggaccgacgcttgtcaaggagactcgggtggcccgctggtttgcgaggaccaggccgcagaaaggcgcctgactctgcagggaatcattagctggggatccgggtgcggagatcgcaataaaccgggagtgtacaccgacgtcgcctactacctggcgtggatccgcgaacataccgtgtct

SEQ ID NO: 249857 - DNA, 1845 bp, synthetic construct
  misc_feature 1..1845: note = Description of Artificial Sequence: Synthetic coding sequence
  source 1..1845: mol_type = other DNA
atgagggcgctgctgctgctgggttttttgcttgtctccctcgaaagcaccctcagcattcccccctgggaagcaccaaaagaacataagtacaaggcggaagaacataccgtcgtgctgacggtgactggagaaccttgtcatttcccttttcagtaccatcgccagttgtaccacaagtgtacccataagggacgccccggacctcagccttggtgtgcaaccactcccaactttgatcaagaccaacggtggggttactgcctggaacctaagaaagtgaaggatcattgctccaagcattctccttgtcagaagggtggtacttgtgtgaatatgccaagcgggccacactgcctgtgtccgcagcaccttaccggaaatcactgtcagaaggaaaagtgttttgaacctcaactgctccgatttttccacaaaaatgagatatggtaccgcaccgagcaagcagccgtggccaggtgtcaatgtaagggacctgatgcacattgtcaaaggctggcatcccaagcctgtcgtaccaacccttgtctgcacggaggtagatgcctcgaagtggaggggcaccgcctttgtcattgcccggttggttacaccggagctttttgcgatgtggacactaaggcgagctgttacgatggaagaggattgtcataccggggtcttgcacggactaccctgtccggtgccccctgtcagccttgggcatcagaagcaacgtacaggaacgtcaccgcagagcaagcccggaactggggacttggaggccacgcattttgtaggaaccctgataatgatataaggccttggtgttttgtcctcaacagagatcgcctgtcctgggaatactgtgatcttgcccaatgccagacccctacccaggcagcgcctccgacgcccgtcagcccccgacttcacgtgcccctcatgccagcacaaccagcgccaccaaagcctcaaccaactacgaggaccccaccacaatcacagaccccaggagcactcccggcgaaacgggaacagcctccttcgctgaccagaaatggacctctttcatgtggtcaacgtctgagaaagtcactgagcagcatgactcgcgtggtcggtggtctggtggccctgcgcggggcccatccttacattgcggcactttattgggggcactcattttgcgcgggctccctcatagctccttgttgggtgctgaccgccgcacattgccttcaggataggcctgcacctgaagatctgaccgtggtgctcggacaagaacggcgaaaccattcctgtgagccctgtcagaccctcgccgtgcgtagctaccggcttcacgaagcattctccccagtatcataccaacacgatctggcattgcttaggttgcaagaggacgccgacggctcgtgcgccctgctttcgccatacgtgcaacctgtgtgtctcccgtcaggagccgccagaccctccgaaaccactctttgccaggtggcaggctggggacatcagttcgagggcgctgaagaatacgcgtcatttcttcaggaagcgcaggttcctttccttagccttgagagatgttctgctccagacgtgcatggctcctcaattcttcctggcatgctttgtgcagggtttctcgaaggtggaacggatgcttgccaaggagacagcgggggtccactcgtgtgcgaggaccaagccgcagaaagacgcttgacccttcagggaattatcagctggggaagcgggtgtggggacagaaacaaacctggcgtttacacggatgtcgcctactacctggcatggattcgggaacataccgtgtcg

SEQ ID NO: 249858 - DNA, 1845 bp, synthetic construct
  misc_feature 1..1845: note = Description of Artificial Sequence: Synthetic coding sequence
  source 1..1845: mol_type = other DNA
atgcgggccttactgttgttagggtttctgttggttagtttagaatctacgctttcaataccaccgtgggaagcaccgaaggagcacaaatataaagctgaggagcatacggtggttcttacagtcacgggcgagccctgtcattttccgttccagtaccatcgacaactgtatcataaatgcacacacaaaggccgaccgggacctcaaccttggtgcgccacaacgcctaacttcgaccaagatcagagatggggttactgtctggagccgaaaaaagtcaaggatcattgtagcaagcattcaccgtgtcagaaaggcgggacctgtgtgaacatgccgagcgggccacattgcctgtgcccgcaacaccttacaggaaaccattgtcaaaaagaaaagtgttttgagccgcagttacttcggttttttcataaaaacgagatttggtatagaacggaacaggccgctgtcgctaggtgtcaatgcaaaggccctgatgctcattgccaacgactggcaagtcaagcatgcaggacaaacccgtgtttacatggcggccgttgcctggaagtagagggtcatagactgtgccattgtccggtggggtacacaggcgcattttgcgatgtggacaccaaggctagttgctatgatggacgcggtctttcttatcggggattggcgaggacgactctttcaggagctccgtgtcaaccgtgggctagtgaagcaacgtatagaaatgtgacagctgaacaggcccgcaattggggactgggtggccatgctttttgtcgtaatcctgacaacgacattcgcccttggtgctttgtgctcaatcgtgacaggttaagctgggaatattgtgatctggcgcagtgccaaacacctacacaagctgcacctccaacacctgtctcccctcgattgcatgtccctctcatgccggcccagccagcgcctccgaaacctcaacctacgacacggacaccgccacagtcacaaacaccgggagcgcttccagctaaacgcgaacaaccgccatccttaacgagaaacggcccgctttcatgtgggcaaagactaagaaaaagcctatcttcaatgactcgcgttgtagggggcttagtggctctgaggggtgcacatccttacatagcggccttgtattgggggcattctttttgtgcggggtcgctgatagcaccatgttgggtattaacagccgcccattgcctgcaggaccggccagcaccggaagatcttacagtggttctagggcaggaaagacgaaatcattcttgtgagccttgccagacccttgcggttcgttcttatcgcttacatgaagcattttcccccgtctcatatcagcatgacctggctttactgcgattacaagaagatgcagatggctcgtgtgcactgttaagtccgtacgtacagccagtttgcttaccttctggcgcggccagaccgtcagaaaccaccctgtgccaagttgccggatggggccatcagtttgagggagctgaagagtacgctagctttttacaggaagcacaggtgccgtttctttctcttgagaggtgctctgctcctgacgttcatggaagctctatactcccaggcatgctttgtgctgggtttctggaaggtggcacagatgcctgtcaaggcgattctggtggacctctcgtgtgcgaagatcaagcagcggagcgtaggctcacattacaggggattatctcttggggaagtgggtgcggcgatcgtaataaaccgggggtttatactgatgtagcctattatttggcctggattcgtgagcatactgtttca

SEQ ID NO: 249859 - DNA, 1845 bp, synthetic construct
  misc_feature 1..1845: note = Description of Artificial Sequence: Synthetic coding sequence
  source 1..1845: mol_type = other DNA
atgagagcacttctccttctcggctttcttcttgtttcgcttgaatcgactctttcgattccgccctgggaagcaccaaaggaacataagtacaaggccgaagagcatactgtggtcttgaccgtgaccggagaaccgtgccactttccttttcaataccatcgtcaactgtaccacaaatgcactcataagggccggcctgggcctcaaccatggtgcgcaactacccctaacttcgatcaagatcagagatgggggtattgtcttgaaccgaaaaaagtgaaggatcactgcagcaaacattcaccttgtcagaagggcgggacctgcgtgaacatgccttcgggccctcactgcctgtgtccacagcacctgactggtaaccattgccaaaaggaaaaatgttttgaacctcagctgctccgcttctttcacaaaaatgaaatttggtaccggactgagcaggcagccgtggcaagatgtcagtgtaagggaccagacgcccactgtcaaagacttgcatcgcaggcatgtcgcaccaatccctgtctccacggaggccgctgtctggaggtcgagggtcatagattgtgtcattgccctgtcgggtacaccggcgccttctgtgacgtggacactaaggcctcgtgttacgatggaagaggattgagctatcggggtctggccagaaccactctgtcaggagccccgtgccagccctgggcctccgaagccacctaccgcaacgtcaccgccgaacaggcacgcaactggggccttggaggacatgcgttttgccggaaccctgacaacgatatacggccttggtgttttgtcctgaatagagacagactgagctgggaatactgcgaccttgcacaatgtcaaacgccaactcaggcggcaccgcctacccctgtgtctcctcgtttgcatgtgccccttatgccagcacagcccgcccctcctaaacctcagcctaccactcgcactcctccccaatcccaaacccctggagcactcccagcgaaacgggaacagccacccagcctgaccaggaatggcccgctctcctgtgggcagagactgcgcaagagcctgtcatcaatgactcgagtcgtgggcggtctggtggcgctgcgtggtgcgcatccctacattgcagccctctactggggtcatagcttctgtgctggatccctcatagcaccctgttgggtcctgaccgcggcccattgcttgcaagatagacccgcaccagaagatctgactgtggtgctgggacaagagcggaggaaccattcctgtgagccttgccaaaccctggccgtgaggagctacagactgcatgaagcctttagcccggtgagctatcagcatgatcttgcactgcttcgactccaggaagatgccgatggttcgtgtgcactcctttccccatacgtgcagcccgtttgcctcccttccggtgctgcgaggcctagcgaaaccactctgtgtcaagtggcagggtggggccaccagtttgaaggggcagaggaatacgcttcgtttctgcaagaagcccaggtgccttttctttctctggaacggtgctccgcaccagacgttcatgggtcaagcatcctgcccggaatgctttgcgcaggctttctggaaggaggaaccgacgcttgccagggagattcgggcggacctctcgtctgtgaggaccaagcagccgaacggaggctgacccttcaggggataatctcttgggggtcgggatgcggcgatcgcaacaaaccaggcgtctacactgatgtggcctactacctggcctggatcagagagcacacggtgtcc

SEQ ID NO: 249860 - DNA, 1845 bp, synthetic construct
  misc_feature 1..1845: note = Description of Artificial Sequence: Synthetic coding sequence
  source 1..1845: mol_type = other DNA
atgcgcgctcttctgctcctcggattcctgctcgtatcacttgagtcaaccctgtctattccgccgtgggaagcgccgaaggagcacaagtacaaggcagaagaacatactgtggtactcaccgtcaccggcgaaccatgccacttcccgttccagtaccatcggcagctgtaccacaaatgcactcataaaggacgaccggggcctcagccgtggtgcgcgacgacccccaacttcgaccaggatcagcgctggggttactgtctggagcccaagaaggtgaaggaccactgctccaagcactcgccctgccagaagggcggcacgtgtgtcaacatgcctagcggaccacattgtctgtgcccgcaacacctgaccggaaaccactgtcagaaagaaaagtgctttgagccacagctcctgagattctttcacaaaaatgaaatatggtaccgaaccgagcaggccgcagtggcacgctgtcagtgtaaggggcctgatgcgcactgccaacgacttgcatcacaggcatgccgcaccaacccttgcctccacggaggccgctgcttggaagtggaaggtcatagactctgccactgcccggtcgggtacactggagccttctgtgatgtggacaccaaggcttcgtgttatgacggacgaggactttcttaccgtggactggcccgtacgactctctccggagccccatgtcagccctgggcctcggaagctacttacagaaatgtcaccgcagaacaagcacgcaattggggacttgggggtcatgccttctgccgcaatccggataacgatatccgtccttggtgcttcgttctgaacagggaccggctttcctgggaatactgcgacctcgcgcagtgtcagaccccaacgcaggctgcaccgcctactccggtgtccccgaggctgcacgtgcccctcatgccggcccagccggccccaccgaaacctcaaccaactacccggacgccgccgcagtcgcagaccccgggggctttgccggccaagcgggaacaaccaccatctctgacccgcaacggcccgctgtcgtgtggccaaaggcttcgcaagtcactgtcaagcatgactcgcgtcgtgggaggactggtggcgctgcggggcgctcacccctacatcgccgccctgtactggggacacagcttttgcgctgggtcactcatcgcgccttgctgggtcttgactgccgcacattgcctgcaagaccggccagccccagaggacctgaccgtggtcctggggcaggagcggagaaatcactcctgcgagccctgccaaactctggccgtgcgcagttaccgcctgcacgaggccttctctccagtctcataccaacatgaccttgcacttctcagactccaagaagatgccgatggatcttgcgctctgctgagcccatatgttcagccagtgtgcctcccttcgggcgccgcgcggccctcggaaactactctgtgccaagtcgcaggatgggggcaccaatttgagggcgctgaagaatatgcctcgttcctccaagaggcccaggtgccgtttctctccctcgaaaggtgctcggcaccggatgtgcatggctcctcgatcctgcctggaatgctctgcgcgggattccttgagggcggaactgacgcctgccagggtgattccggaggccctctcgtgtgcgaggaccaggctgccgagcggcggctgaccttgcagggtatcatctcctggggatccggatgtggtgacaggaacaaacctggagtgtacactgacgtggcttactacttggcgtggattagagaacataccgttagc

SEQ ID NO: 249861 - DNA, 1845 bp, synthetic construct
  misc_feature 1..1845: note = Description of Artificial Sequence: Synthetic coding sequence
  source 1..1845: mol_type = other DNA
atgagggcgctgctcctgctcggttttctgttggtcagcctggaaagcactctgtcaattcccccctgggaggcgccaaaagaacataagtacaaagcagaagaacacactgtggtcctcaccgtgaccggagagccttgtcatttcccattccagtaccataggcagctctaccataagtgcactcataaaggaaggcctggcccacaaccatggtgtgccaccactcccaatttcgatcaagatcaacgttgggggtactgcctggaacccaagaaggtgaaggatcattgttccaagcattcaccatgtcaaaaggggggaacgtgtgttaacatgccttcgggtccccattgtctctgtccccagcatctcaccggtaaccactgtcagaaagagaagtgtttcgagccccaactgctgcgctttttccataagaacgagatttggtaccgtactgagcaagcggccgtggctcggtgccagtgtaagggtccggacgcacattgtcaaagactggcgagccaagcctgtagaacgaacccgtgcttgcatgggggccgctgtcttgaagtcgagggacatagattgtgtcactgcccagtggggtacaccggagcattctgtgacgtggacactaaggcaagctgctacgacggtcgagggctgtcttataggggtctggcccgcaccactctttccggggcaccatgtcagccatgggcgtccgaggccacctaccgtaacgtgaccgccgaacaggcgagaaactggggtcttggaggtcatgccttttgtagaaaccctgacaacgatatacgaccctggtgttttgttcttaacagggatcgattgtcgtgggaatactgcgatcttgctcagtgtcagaccccaacccaagccgcaccgcctaccccagttagccctagacttcacgtcccactgatgcccgcgcaacctgcaccgccaaagccgcaaccaaccacccgaacgcctccacaatcccagacgcctggggcacttccagcaaagcgggaacagcctcctagccttacccgcaatggacccctgtcatgtggtcagagactgagaaagagcctttcctccatgactagagtcgttggaggacttgtcgcgcttaggggagcacatccttacatagcagcactttattggggccacagcttttgtgcaggatccttgattgctccatgctgggtgctgactgccgcacattgtttgcaggacagacccgctcctgaagatcttaccgtggtgcttggccaggaacgaaggaatcattcctgtgagccatgccaaactctcgctgtgagatcatatagactgcacgaagcgttttcgcctgtgagctaccagcatgacctcgcccttcttaggctgcaggaagatgcagatggcagctgtgcccttctgtcaccatacgtgcagcccgtctgtctcccttcgggagcggcaagacccagcgaaactactctgtgccaagtggccggttggggacatcagtttgaaggagcagaagaatacgcatcctttctccaagaagcgcaagtgccatttctgtccctcgaaagatgctccgcacctgacgtccatggatcgtctatccttccagggatgctgtgtgctgggtttctcgaaggaggaactgacgcctgtcagggagattccggtggcccactggtctgtgaagatcaggcggcagaacgaaggctgactcttcagggaattatctcgtgggggagcggctgtggcgatcgcaataagcccggcgtgtacaccgacgtggcatactacctcgcatggattcgtgaacataccgtgtcg

SEQ ID NO: 249862 - DNA, 1845 bp, synthetic construct
  misc_feature 1..1845: note = Description of Artificial Sequence: Synthetic coding sequence
  source 1..1845: mol_type = other DNA
atgagagcacttcttctgctgggattccttcttgtctcacttgaatcaaccttgtcgataccaccatgggaggcaccgaaggaacataagtacaaggctgaagagcatactgttgtgcttaccgtgaccggagaaccttgccattttccctttcaataccaccgacaactgtaccataagtgtactcataaggggcgccctggtccccaaccgtggtgtgcaaccacccctaactttgaccaagatcagagatggggatactgtctcgaaccaaaaaaggtgaaagaccattgctctaaacactccccctgtcagaagggaggaacttgtgtgaacatgccctccggacctcattgtctttgccctcagcatcttactggaaaccattgccaaaaagaaaagtgctttgagccacaactcctgcgctttttccacaaaaacgaaatttggtaccggacggagcaagcggccgtggcaagatgtcaatgcaaaggtcctgatgcacactgtcaacgcctggcatcacaggcatgtcgtacgaacccatgtctgcacggcgggcggtgcctcgaggtggaagggcatcgactttgtcattgtcccgtcggatacacgggagcattttgtgatgtggataccaaggcctcgtgttacgatggcagagggctgtcctataggggactggcccggaccaccctgtccggtgcaccctgccagccatgggcctcggaggcaacctacagaaatgtgactgcagaacaggcccggaattggggcctcggtggtcacgcattctgtaggaacccagacaatgatattcgcccttggtgtttcgtgttgaatagggatcgcctgtcatgggagtattgtgatcttgcgcaatgccagacccctacccaagcagcccctcctacccctgtcagccctagactccatgttccacttatgcctgcacaaccagcgcctccaaagcctcaacctaccactcggacgccccctcagtcacaaactccgggagctttgcctgcaaagagagaacagccccctagccttactcggaacggtcctctctcctgcggccaaaggctgcggaagtcactcagcagcatgactcgtgtcgtaggcggactggtggcgcttcgcggagcccatccatacatcgctgcactctactgggggcacagcttctgtgcagggagccttattgccccatgttgggtgctcaccgccgcacattgccttcaggatcgccccgcacctgaagatctcaccgtggtgctgggacaggaaaggcgaaatcactcctgtgaaccatgtcagacgctggcagtgagaagctacaggctgcatgaagcattctcgcctgtgagctatcagcatgaccttgcacttcttagattgcaagaagatgcagatggctcctgcgcactcctgtccccatacgtgcaacctgtctgccttccaagcggtgcagcacggccatccgaaaccactctgtgtcaggtggcggggtggggccaccagtttgagggagccgaggaatacgcctcctttctgcaggaggctcaagttccgtttctgtcactggaacgatgttcggccccagacgtacatggttcgtccattctgccgggtatgctctgcgccggatttcttgaggggggcactgacgcttgtcaaggggacagcggaggaccacttgtctgtgaagatcaagccgcagagcggagactcactcttcagggtattatctcttggggaagtggctgcggggaccggaacaagccgggagtatacactgatgttgcctactacctggcatggataagagagcacactgtgagc

SEQ ID NO: 249863 - DNA, 1845 bp, synthetic construct
  misc_feature 1..1845: note = Description of Artificial Sequence: Synthetic coding sequence
  source 1..1845: mol_type = other DNA
atgcgcgcattgcttctgctcggattcttgctggtgtcccttgaatcgactctgagcatacccccgtgggaagccccaaaagagcataagtacaaggcagaagaacacactgtcgtcctgaccgttaccggagagccatgtcactttccattccagtaccatcggcagctgtaccacaaatgcacccacaagggccgcccgggccctcagccgtggtgcgctaccacgcccaatttcgatcaggaccagcggtggggttactgcctggagccaaagaaggttaaggaccattgctctaagcatagcccatgccagaagggagggacctgcgtgaatatgccgagcggaccccattgcctctgcccacaacacctcactggcaaccactgccagaaagaaaagtgcttcgagccacagctgctgagattcttccacaaaaatgagatctggtacaggaccgagcaagcggcggtcgcccgctgccaatgtaaaggtccggacgcccactgccagaggctggcctcacaagcctgccgcaccaacccttgcctccacggaggaagatgtctggaagtcgaggggcaccgtctttgccattgcccggtgggatataccggtgctttttgcgacgttgataccaaggcatcgtgttacgatggacggggactgagctacagaggcttggcgcggactaccctgtctggagcgccgtgtcagccgtgggcgtcagaagcaacctatcgcaacgtgactgcagagcaggctcgcaattggggccttggagggcacgccttctgtcggaacccggacaacgacatcagaccttggtgctttgtgctgaaccgcgaccgcttgagctgggagtactgcgatttggcccagtgccagacccctactcaggcggccccgccgactccggtgtcgccccgactccatgtgccattgatgccagctcagccggcgccaccaaagccgcaaccaaccacccgcactccgccgcaatcgcagactccgggggccctcccagctaaaagggagcagccgccgtccctgactagaaatggaccgctgtcgtgcggacagcgcctcagaaagtcactgagctcgatgactagagtggttggtggactggtggcccttcggggagcgcacccttacatcgcagccctgtactggggacattcgttttgtgccggatccctcatagcaccgtgttgggtgctgactgcagctcactgcctccaagaccgccctgcaccagaagatctgaccgtggtgctgggacaagaacggagaaaccacagctgtgaaccgtgccaaaccctcgccgttcggtcgtaccgcttgcacgaggcattttcacccgtgtcctatcagcacgatctcgctcttctgcggctccaggaggatgccgacggaagctgtgcgttgctgtcaccttacgtgcaaccggtctgcctcccatcgggggcggccaggccttccgaaacgaccctgtgccaggtcgcaggatggggtcaccaattcgagggagccgaagaatacgcctccttcctccaagaagctcaagtgccgtttttgtcgctggaacgctgctcggcgccagacgtgcatggatcgagcatcctgccaggaatgctctgtgcggggttcctcgaaggtggaacggatgcctgtcagggcgactccggtgggcccctggtgtgcgaagatcaggcggcggaacgccggttgacgctgcaaggtattatctcgtggggcagcggttgcggggacaggaacaagccaggcgtgtacacggacgtggcgtactacctcgcgtggatccgcgaacatacggtgtcc

SEQ ID NO: 249864 - DNA, 1845 bp, synthetic construct
  misc_feature 1..1845: note = Description of Artificial Sequence: Synthetic coding sequence
  source 1..1845: mol_type = other DNA
atgcgcgcactccttcttctggggtttcttctggtgtcgctggaatcaactctctcgattcccccctgggaagcacctaaggaacacaagtacaaggcagaagaacacactgtggtcctcaccgtgaccggagaaccttgccacttcccatttcagtaccatcggcagctttaccataagtgtactcataagggtcgtccaggtccccaaccatggtgtgccaccaccccgaatttcgatcaggatcagcggtgggggtattgtctggaacctaagaaagtcaaggaccattgtagcaaacatagcccttgccaaaagggaggtacttgcgtgaacatgccatccggtccacattgcctgtgtccacaacatctcaccggaaaccattgtcagaaggaaaaatgttttgagccgcaactccttcggttctttcataagaacgagatatggtaccgcaccgaacaggcagcagttgcacggtgtcaatgcaaaggccctgatgcacactgtcaacgcctggcaagccaggcctgcagaaccaacccatgcctccatggcgggcgttgtctggaagtggaaggccatcggctttgtcattgtccagtgggttacaccggtgctttctgcgacgtggataccaaggcctcctgctatgacgggcgcggcctttcgtacagaggcctggcccgtactactctgtccggtgccccttgtcagccatgggcaagcgaagcgacgtatagaaatgtcaccgcagaacaggcacgaaactggggtcttggaggacacgcattttgccgtaaccctgataatgatattcggccttggtgtttcgtgctcaaccgcgacagattgtcatgggaatactgtgacttggcccagtgccagactcccacccaagcagccccgcctactccagtgtcgccccgtctccatgtgccgctgatgccagcacaacctgcgcctccaaagcctcagccaaccactaggacccctcctcagtcgcaaacccctggcgcactgcctgccaaaagagagcaaccaccgtcgttgaccagaaatggtccactttcgtgcggccaacgactgaggaaatccctctccagcatgacccgggtggtgggaggtcttgtagcactgcggggagcccacccctacatagcagcgttgtactggggacactccttctgcgctggtagcttgattgccccctgctgggtcctgaccgccgcacattgtttgcaagaccgccctgcccccgaggatcttaccgtagtgcttgggcaagagcgtaggaatcactcttgtgaaccgtgtcaaactctggcggtgagatcgtaccgcctccatgaggctttctccccggttagctaccaacacgatctcgctttgctgcgcctgcaagaagatgcagacggaagctgtgcactgctctctccatacgtccagcctgtgtgtctgccctcaggtgcggctcggccatcggaaactacgctgtgtcaggtggcaggatgggggcaccaattcgagggcgccgaggaatacgcatcgtttctccaagaggcccaagtcccctttctgtcacttgaaagatgttccgccccagatgtccacgggtcaagtattctccctggaatgctgtgcgctggctttcttgagggcggaaccgatgcgtgtcaaggagactccggtggtcctcttgtctgcgaagatcaggcggcagagcgacggcttaccctccagggaatcatttcgtggggttcaggttgtggcgaccgcaacaagcctggagtgtacacggatgtagcatactacttggcttggattagagagcatactgtgtcg

SEQ ID NO: 249865 - DNA, 1845 bp, synthetic construct
  misc_feature 1..1845: note = Description of Artificial Sequence: Synthetic coding sequence
  source 1..1845: mol_type = other DNA
atgagggctctcctactgttgggattcctccttgtctccctggaatctacgctatcaatcccaccatgggaggccccaaaagaacataaatacaaagcggaggagcatacggtggtcttgactgtgacgggagaaccctgtcattttccgtttcaataccatcggcaattatatcataagtgtacccataaaggtcgaccaggcccccaaccttggtgtgctacgactccaaatttcgatcaggaccagcggtggggctattgtcttgagccaaagaaagtgaaagaccactgctccaagcatagcccatgccaaaagggtggtacgtgtgtaaatatgccctcgggtccacactgcttgtgcccgcaacatcttacgggtaaccattgccaaaaggagaagtgtttcgagccacagctgctacggttcttccacaaaaacgaaatatggtacaggacagagcaggcagccgttgcccgttgtcagtgcaaaggccccgatgcccactgccagcgtctcgcctctcaggcatgcagaactaacccttgcctgcatggtggtagatgtttggaagtcgaagggcaccgcctttgtcactgtccggtagggtacaccggtgccttctgtgacgtagataccaaagcgagttgctatgatggacgcggtctttcctatcgtggactcgctcgcaccacattatcaggagcaccttgccagccctgggcctctgaagcaacttaccgcaacgtcacagcagaacaagcacgtaattggggactgggaggtcatgccttctgtcgcaacccagacaatgatattagaccgtggtgttttgtgctaaatcgtgatagactgtcgtgggagtactgtgatctggctcagtgtcagaccccgacccaggctgcaccgcccaccccagtatcgccccgcttacacgtccctctcatgcccgcacaaccggccccgcccaagccacagccgaccacacgtacgcccccccagtcccagaccccgggtgcccttcctgccaaacgggagcagccgccttctctcacccgtaatggcccactcagttgtggacagcgcctcagaaaatcactcagctccatgacccgggtggttggcggcttggttgctttgaggggcgcacacccttatattgcagctctttactgggggcattcgttctgcgcaggatcgttgatcgcgccttgttgggtgttgacggccgcgcattgtctccaggacaggccggccccagaggatttgacggtggtgcttggtcaagaacgacgcaatcactcatgtgagccctgtcagacacttgctgtacgcagttaccgtctgcacgaagcattctcgccagtatcctatcagcacgatctggccttgttgagactgcaggaggatgcggacgggtcctgtgccttactctcaccttatgttcagccggtctgtctgccttcgggcgctgcaagaccaagcgaaaccacgctgtgtcaagttgctggttggggtcaccagttcgaaggcgcggaagagtacgcctcctttttgcaagaagcgcaggttcctttcctcagcctcgagcgctgctcagccccagatgttcatgggagctccatcctgcccggcatgttgtgcgccggcttcttggagggtggaacagatgcctgccagggggactctggaggacctctggtctgtgaggatcaggctgctgaacgtcgcctgactctacaggggatcatttcgtgggggagtggatgtggagatcggaataaaccgggcgtctacactgacgtggcttattacctcgcctggatccgtgagcatactgttagc

SEQ ID NO: 249866 - DNA, 1845 bp, synthetic construct
  misc_feature 1..1845: note = Description of Artificial Sequence: Synthetic coding sequence
  source 1..1845: mol_type = other DNA
atgcgagctttgctgctgcttggctttctactcgtgagcctggagtccacattgtctatacctccgtgggaagcgcctaaagaacataaatacaaggccgaggagcacacagtggtcctcaccgtcactggggagccctgccactttccctttcaataccatagacagctctaccacaagtgcacacataagggcagacccggcccacagccatggtgcgcaactacacctaatttcgaccaggaccagcgctggggctactgcctggagccaaaaaaagtaaaagaccactgctcaaaacattctccgtgtcagaaagggggcacatgtgttaatatgccttccggaccacattgcctgtgtcctcagcacctgacaggcaaccactgtcaaaaggagaaatgttttgagccccagttgttgaggtttttccacaaaaacgagatctggtatcgcactgagcaggctgccgtcgctcgctgtcagtgtaaaggccccgacgctcactgccaacggctcgcctcacaggcctgtagaacaaacccttgtctgcacggggggcggtgccttgaggttgaaggacaccgcctctgccattgccccgtggggtatacgggcgccttttgcgatgtggacacaaaggcttcctgttacgatggccgcggactgtcgtatcgaggactggcccggactaccttgtcaggagccccctgccaaccgtgggcttctgaggcaacctacaggaatgttactgccgaacaggctaggaactggggcctgggtggccacgccttttgtcggaatcccgacaacgacatcagaccatggtgcttcgtgcttaatcgcgacaggttgtcatgggagtattgcgacctggcccagtgccagacccccacccaggccgcaccccctacccccgtgagtccgcgcctgcacgtgccattaatgccagcgcagccggctccacccaaaccgcagcccactactcgtacaccaccacagagtcagacccctggggcgctccccgctaagcgtgaacaacctccttcactcaccaggaacggcccactgtcttgtggtcagcggttgcggaagagcttgtcttcaatgacgcgggtcgttggaggacttgtcgcgctgagaggcgctcatccctatatagctgccctgtactggggccattctttctgtgcggggagtttgatcgccccttgctgggtcctgacagcagcgcactgtctgcaggatcggccagcccccgaggaccttaccgtagtcctgggacaagagaggaggaatcactcgtgtgagccatgtcagacactcgctgtgcgctcctaccggctccacgaggctttcagcccggttagttatcagcacgatctggcccttttgcgattacaggaagacgcagatggctcctgtgcattgctctctccgtacgtgcagccggtctgtctaccgtctggcgcagcccggccttccgagacgaccctttgccaggtggctgggtggggacaccagttcgaaggggccgaggaatacgccagctttttacaggaggcccaagtgccattcctaagtcttgagcgctgcagtgccccagacgtgcatggaagcagcattctacctggcatgctgtgtgctggatttctcgagggcggcactgacgcctgccagggagattcaggtggaccactggtatgtgaagatcaggctgcagagcgtagattgactctgcagggaatcatctcttggggcagtggctgcggggatcggaacaagccaggggtctacacagacgtcgcctactatctggcctggattcgggaacacacagtgtct

SEQ ID NO: 249867 - DNA, 1845 bp, synthetic construct
  misc_feature 1..1845: note = Description of Artificial Sequence: Synthetic coding sequence
  source 1..1845: mol_type = other DNA
atgcgcgcacttctgcttctgggattcctgttggtgtcactggagtccactctttccataccaccttgggaagcccccaaggaacataagtataaggcagaggaacacaccgtcgtgctgacggtgacgggagaaccatgtcactttccctttcagtatcatcgccaactgtaccacaagtgtactcacaagggtaggcctggaccacagccatggtgcgcaaccactccaaactttgaccaagatcagagatgggggtattgtctggaacctaagaaagtgaaggatcactgttcgaagcatagcccttgccagaaaggtggaacctgtgtgaacatgccgtcgggacctcactgcctgtgtcctcaacatttgactggcaatcactgtcaaaaagaaaagtgtttcgaaccccagttgctgcggttcttccacaaaaatgagatttggtaccgaacggagcaggccgcagtggcaaggtgtcagtgtaagggacccgatgcacattgccagcggcttgcgtcgcaagcatgtaggaccaatccttgtctgcacggaggccggtgtctcgaagtcgaaggtcatcgcctttgtcactgccccgtgggttacactggagcgttttgtgatgtggataccaaagcctcatgttacgacggtcgtggactcagctacaggggcctggccaggaccaccctttccggggccccgtgccagccatgggcaagcgaagcaacttacaggaatgtcactgcagaacaagcccgaaattggggactgggcggccatgcgttttgccggaatccagataacgacatacggccttggtgttttgtcctgaacagagatcggctctcgtgggaatactgtgatctcgcccagtgccaaaccccaactcaagccgccccacccactcccgtgtcccccagacttcatgtgcctctcatgcctgcacagcctgccccacccaagcctcaacctaccactcgcacccctccccagtcccaaacccctggcgcactgcctgcgaagagagagcaaccaccttcgctgaccagaaacgggcctctgagctgtggacaaagactccgcaagtcgctctcgtccatgacccgtgtggtgggcggacttgtggcacttagaggtgcacatccctacattgcagccctgtactggggacatagcttctgcgccggctcccttatagcaccatgttgggtcctgactgccgcacactgcctgcaagatcgacctgcaccagaggaccttacggttgtgctcggacaggaaagacgtaatcattcgtgcgaaccatgccaaactctcgccgtccggtcctaccgtctgcatgaggccttttcaccggtaagttaccagcacgacctggcgctgcttcggctccaggaggacgccgacggttcgtgcgcactcctttccccttacgtccaaccagtgtgtctcccttcaggagccgccagacccagcgaaaccaccctttgccaagtggcaggttggggccatcaatttgagggagcagaggaatacgcgtcatttctccaagaggcgcaagtgcctttcctttcgctggaacgttgctcggcacctgacgtgcacgggtcgtcgatactgcccggtatgctttgtgcaggatttcttgaaggtggtaccgatgcatgtcaaggagacagcggggggcccctcgtctgtgaagatcaggcagcagagcgcagacttactctgcagggtatcatttcctggggtagcggatgtggagatagaaacaaaccgggagtgtacaccgatgtcgcatactacctcgcatggataagagaacatactgtgagc

SEQ ID NO: 249868 - DNA, 1845 bp, synthetic construct
  misc_feature 1..1845: note = Description of Artificial Sequence: Synthetic coding sequence
  source 1..1845: mol_type = other DNA
atgagggccctcctattgctcgggttccttttagtctcactcgagtcgaccttgtcaatccccccctgggaagcaccaaaagaacacaagtataaagctgaagaacataccgtcgtgctgaccgtcacaggggagccctgtcacttcccctttcagtaccatagacaactatatcacaagtgcacgcacaagggaaggccagggccccaaccatggtgtgctacaacacctaatttcgatcaggaccagcgatgggggtactgtctggagcctaaaaaagtcaaagatcactgttcaaagcacagcccatgccagaaggggggcacctgtgttaatatgccgagtggtccacactgtttgtgtccccaacacctgacaggtaaccattgccagaaagagaaatgcttcgagccccaactgctgaggttctttcacaaaaacgaaatctggtatcgaactgaacaagctgctgtggcccgctgccagtgtaagggtcccgacgcccattgccagcgactggcgtcccaggcgtgtagaacgaatccatgtctccacggcggtcgctgcctggaggtggagggccatcgcctctgccactgccccgtgggctatacaggcgccttctgcgacgtcgataccaaggcctcatgctatgacggccgggggttgtcatataggggcctagccagaacaacgctgagtggtgccccatgccaaccatgggcatctgaggctacatatcgcaacgtaaccgccgagcaagccagaaattgggggctggggggtcatgccttctgccgtaatccagacaacgacatcagaccctggtgcttcgtactcaaccgagatagactgagctgggagtactgcgacctggctcagtgtcagaccccaacccaggcggcaccacccacacctgtgtccccgcgactgcacgtgcctttgatgcctgcacaaccagctccgcccaagcctcagccaacaacgcgcacccccccacagtcccagacgccgggtgccttgccggctaagcgcgagcagccgccttctctgacacgcaacgggccactaagctgcggtcagcggttgcgaaagagcctgtcttctatgaccagggtcgtgggggggctggtcgccctgagaggggcccacccctacatcgccgcactgtattggggacacagtttttgcgccgggtctttaattgccccatgctgggtgctgactgcagctcactgtctgcaagaccgtcccgctcctgaagatctgacagtcgttctgggacaggagcgccgcaatcactcttgcgaaccctgtcagacgctggccgtcagatcctacaggctgcacgaggcattctctccagtatcgtaccagcacgatttggctctcctgcggctgcaggaagatgccgacggatcatgtgccctcctctccccctatgtgcaacctgtgtgtctaccctccggtgccgcccgccctagtgaaactacattgtgccaggtcgcagggtggggccaccagtttgaaggcgccgaggaatatgcctcattcctgcaggaagcccaagtcccattcctgtccctcgaaaggtgttctgcccctgacgtgcacggatcctctatcctgccaggaatgctctgtgctggctttctcgaaggaggcacggatgcttgtcagggagatagcggggggcccctggtctgcgaagatcaagctgccgagagaaggttgaccctgcagggaatcatttcctggggcagcggctgcggtgacaggaacaagcccggtgtgtacacagatgtcgcgtattaccttgcttggatacgggaacataccgttagc

SEQ ID NO: 249869 - DNA, 1512 bp, synthetic construct
  misc_feature 1..1512: note = Description of Artificial Sequence: Synthetic coding sequence
  source 1..1512: mol_type = other DNA
atgatgacgacgtcgttaatatggggtatagcgatagcggcgtgttgttgtctatggctaatactaggtatacgtcgacgtcaaacgggtgaaccgccgctagaaaatggtttaataccgtatttaggttgtgcgttacaatttggtgcgaatccgctagaatttctacgagcgaatcaacgaaaacatggtcatgtttttacgtgtaaactaatgggtaaatatgttcattttataacgaatccgctatcgtatcataaagtactatgtcatggtaaatattttgattggaaaaaatttcattttgcgacgtcggcgaaagcgtttggtcatcgttcgatagatccgatggatggtaatacgacggaaaatataaatgatacgtttataaaaacgttacaaggtcatgcgttaaattcgctaacggaatcgatgatggaaaatctacaacgaataatgcgtccgccggtatcgtcgaattcgaaaacggcggcgtgggtaacggaaggtatgtattcgttttgttatcgtgttatgtttgaagcgggttatctaacgatatttggtcgtgatctaacgcgtcgagatacgcaaaaagcgcatatactaaataatttagataattttaaacaatttgataaagtttttccggcgctagtagcgggtttaccgatacatatgtttcgtacggcgcataatgcgcgagaaaaactagcggaatcgctacgtcatgaaaatttacaaaaacgagaatcgatatcggaattaatatcgttacgaatgtttctaaatgatacgctatcgacgtttgatgatttagaaaaagcgaaaacgcatctagtagtattatgggcgtcgcaagcgaatacgataccggcgacgttttggtcgctatttcaaatgatacgtaatccggaagcgatgaaagcggcgacggaagaagtaaaacgtacgctagaaaatgcgggtcaaaaagtttcgttagaaggtaatccgatatgtttatcgcaagcggaattaaatgatttaccggtattagattcgataataaaagaatcgttacgtttatcgtcggcgtcgttaaatatacgaacggcgaaagaagattttacgctacatttagaagatggttcgtataatatacgaaaagatgatataatagcgttatatccgcaactaatgcatttagatccggaaatatatccggatccgttaacgtttaaatatgatcgttatctagatgaaaatggtaaaacgaaaacgacgttttattgtaatggtttaaaactaaaatattattatatgccgtttggttcgggtgcgacgatatgtccgggtcgtttatttgcgatacatgaaataaaacaatttttaatactaatgctatcgtattttgaactagaattaatagaaggtcaagcgaaatgtccgccgttagatcaatcgcgagcgggtctaggtatactaccgccgttaaatgatatagaatttaaatataaatttaaacattta

SEQ ID NO: 249870 - DNA, 1512 bp, synthetic construct
  misc_feature 1..1512: note = Description of Artificial Sequence: Synthetic coding sequence
  source 1..1512: mol_type = other DNA
atgatgaccacgtctctcatttggggcatcgctatagccgcctgctgttgtctgtggctgatcctgggaattagacggagacaaacaggcgagccacccctggaaaatggcctgattccgtatctggggtgcgcgctgcagtttggcgccaatcctctcgagttccttagagcaaatcaacgcaaacacggccatgtgttcacctgtaaacttatgggcaagtacgtccattttatcactaatcccttgtcctatcacaaggttttatgtcacggaaaatacttcgattggaaaaaatttcattttgcaacttcggccaaagctttcggccaccgcagcatcgacccaatggacggaaacaccaccgagaacatcaatgacacctttattaagacactgcaagggcacgctctgaactcactgacagagtccatgatggaaaatcttcaacgcatcatgagaccacctgtgtcgtctaacagcaaaaccgcggcctgggtgaccgaaggcatgtacagcttttgttaccgggtaatgttcgaggccggatacctgaccattttcggcagggacctgacaagacgcgacacacagaaagctcacatcctgaacaatctggacaatttcaagcagttcgacaaggtgttccctgccctggtggcaggcctacctattcatatgtttcgcactgctcataatgcgagggagaagctcgccgagtcactgagacatgaaaacctacagaaacgagagtctatctcagagctgatttcactccgtatgtttctgaacgacaccctgtcgacttttgacgatctggagaaagccaagacacacctggtggttctatgggcatcgcaggcgaacacaattcctgccacattttggtcactgtttcaaatgatcaggaatccggaggccatgaaggcagctacagaagaggttaagaggactctggaaaacgcaggacaaaaggtctctttagagggcaacccgatctgcctgagccaggccgagcttaatgacctgcctgtgctggactccataatcaaggaatcgctgcgtttgagcagtgcctctctcaacatcaggactgccaaagaggatttcacactgcacttggaggatggaagctataacatccgcaaggacgatataatcgctctgtatccccaactgatgcatctggacccagaaatctatccggatccgctcacgttcaaatatgacaggtacttggacgaaaacggaaagaccaaaacgacgttttactgtaatggactcaagttgaagtattattatatgcccttcggctctggcgccactatctgtcccggcaggttgtttgcgattcacgagatcaaacagttcctgatcctaatgctctcatacttcgagctggaacttatcgagggtcaagctaaatgcccacccttggatcagagtcgggccgggttggggatcttgcctcctctgaatgacatcgagtttaaatataagttcaagcattta

SEQ ID NO: 249871 - DNA, 1512 bp, synthetic construct
  misc_feature 1..1512: note = Description of Artificial Sequence: Synthetic coding sequence
  source 1..1512: mol_type = other DNA
atgatgactacctccttgatctgggggattgccatcgctgcctgttgctgtctgtggctgatactggggattaggcgcagacaaaccggcgaacccccgctcgagaacggactgatcccttacctgggttgtgctctgcaattcggtgcaaatcctctcgaatttcttcgcgccaatcagcggaaacacggccacgtgttcacgtgcaagctgatgggaaagtacgtgcacttcatcaccaacccattgtcctaccacaaggtcctgtgtcacgggaagtacttcgattggaagaagttccattttgcgactagcgcaaaggcgttcggccacagaagcatcgatccaatggacggtaacaccaccgaaaacatcaatgacacgttcatcaagaccctccaaggccatgcgctcaattcacttactgaatccatgatggaaaacctgcagcggattatgcggccacccgtctcctcgaacagcaagactgccgcgtgggtgactgagggcatgtactcgttctgctatcgggtcatgttcgaagccgggtacctgaccattttcggaagagatctgaccagacgcgacactcagaaggcgcatatcctgaacaatctggacaactttaagcagtttgataaggtgtttcccgctctcgtggccggactgccgatccacatgttccgcaccgcccacaacgcaagggagaagctggctgagtccttgaggcacgaaaacctccaaaaacgagaatcgatctccgaactgatctccctccgcatgttcctcaacgacaccctctcgactttcgatgatctcgaaaaagcaaaaacccaccttgtggttctttgggcgtcgcaggctaacaccataccggctactttctggtcattgttccagatgatccggaacccggaggccatgaaggccgcgactgaagaagttaaacgcactttggagaatgcaggccaaaaggtcagcctcgaaggcaatccgatctgcctctcgcaagcggaactgaacgacctccctgtgctcgattcgatcatcaaggaatcgctgagactgtcatcggcatcattgaacattcgcacggccaaggaggacttcactttgcatctggaggatggttcatacaatattcggaaagacgacataatcgcgctgtacccccagttgatgcacctggacccggaaatctacccagacccactgacctttaagtacgatcgctacctggatgagaatggaaagactaaaactactttctactgcaatggcctgaagctgaaatactactatatgccgttcggatccggagctaccatctgcccgggccggctgttcgccatccacgaaatcaaacaattcctcatccttatgctgtcctactttgagctggaattgatcgagggacaggcgaaatgtccgccactcgatcagtcacgggcaggactgggcatccttcctcctctcaacgacatcgaattcaagtacaaattcaaacatctg

SEQ ID NO: 249872 - DNA, 1512 bp, synthetic construct
  misc_feature 1..1512: note = Description of Artificial Sequence: Synthetic coding sequence
  source 1..1512: mol_type = other DNA
atgatgaccactagcttgatctgggggatcgcaattgcggcatgttgttgtctgtggctgattctgggaattcgcagacggcagaccggggaacccccacttgaaaatggtctgatcccatacctcgggtgtgccctccaattcggtgccaaccctctggaatttctccgcgctaatcagcgaaaacacgggcacgtgttcacgtgcaaactgatgggcaaatatgtgcactttatcaccaaccctctctcgtaccataaagtgctttgccacggcaaatacttcgattggaagaagttccatttcgcgacttccgccaaagcattcgggcatcgttcgattgaccccatggatggcaacactacggagaacatcaatgacacttttatcaaaaccctgcaggggcacgcattgaattcgctgactgaaagcatgatggaaaatcttcagcggatcatgcgcccgccggtcagctcaaacagcaagaccgccgcttgggtgaccgaaggaatgtactccttctgctaccgtgtgatgtttgaagcgggctacctgactatcttcggtcgcgaccttactaggagagacactcaaaaagcgcacatcctcaacaacctggataactttaagcaattcgacaaggtgttccccgcccttgtcgccggactgcccattcatatgtttcgcactgcccataatgccagagaaaaactcgcggaatcactcaggcatgagaatctccagaagcgggaatcgatctccgagctgatctcgctgaggatgtttctcaacgacacgctgtctacctttgatgacctggaaaaggcaaagactcacttggtggtgctgtgggcctcacaggccaataccatcccggccaccttttggagcctgttccagatgatccgcaacccggaagcaatgaaggctgccaccgaagaggtgaagaggactctcgaaaacgcgggccagaaggtgagcctcgagggcaatccgatatgcctgtcccaagccgaactgaatgacttgccagttcttgatagcatcatcaaagagtccctccggttgtcatcagccagcctgaacatccggaccgcaaaagaggacttcactctgcatctcgaagatggaagctacaatatccggaaggacgatatcatagcgttgtacccgcaactgatgcacctggaccccgagatctaccccgacccgcttacgtttaagtatgatagatacctggatgagaatggaaagactaagacgaccttttactgcaacggactgaagctgaagtactattacatgccatttggaagcggagctactatctgcccgggacgcctctttgccatccacgagatcaagcagtttctcatcctcatgctgtcatacttcgagttggagttgatcgaaggacaagctaagtgccctcctctcgatcagagccgcgcaggactgggcatcctgcctcctctgaacgatatcgaattcaagtacaagttcaagcacctc

SEQ ID NO: 249873 - DNA, 1512 bp, synthetic construct
  misc_feature 1..1512: note = Description of Artificial Sequence: Synthetic coding sequence
  source 1..1512: mol_type = other DNA
atgatgactacgagcctgatttggggtatcgcaattgccgcctgttgctgtctctggcttatcctgggcattcggcggcggcaaactggagaacccccactcgagaatggcttgattccatacctcggatgtgctctccaatttggagctaacccccttgagtttttgcgagcaaaccaacggaagcacggacacgtgtttacttgtaaacttatgggaaagtacgtgcatttcatcactaacccccttagctaccataaagtcctgtgtcatgggaagtactttgattggaagaagtttcattttgccacttccgcaaaagcatttggacatcgatcgattgatcccatggacggtaataccaccgaaaacatcaatgacaccttcataaagaccttgcagggacatgcccttaacagcctcactgagtcaatgatggaaaatctgcagagaattatgcggcctccggtgtcctccaattcgaaaactgctgcgtgggtgactgaggggatgtacagcttctgttaccgtgtcatgtttgaagcaggttacctgaccatttttggtagagatctcactcggagggacacccagaaggcacacattctcaacaatttggacaactttaagcaatttgataaggtgtttccagcactcgtcgcaggacttccaattcacatgttcagaaccgcacataacgcgagggaaaagttggctgagtccctgcgtcacgagaaccttcaaaagcgtgaatcaatttccgaacttatatcgctgcgcatgttcctgaacgataccctgtcaaccttcgatgatctggagaaggcaaagacgcacctggtggtgctgtgggcaagccaggcaaacactatcccagcaaccttttggtccctttttcaaatgatacggaaccctgaagcgatgaaggcagcaaccgaagaagtcaagcgcaccctggagaatgcaggccaaaaagtgtctctggagggaaaccctatttgcctgtcccaagcggaactgaacgatcttccggtccttgactccatcatcaaagagtcccttaggctctcctccgcctcgcttaacattcggaccgccaaagaagattttactttgcatctggaggacggatcatacaacattcgaaaagatgacatcattgccctgtacccacaactgatgcatcttgaccctgaaatctacccagacccactgacttttaagtacgatcgctaccttgatgaaaatggtaagacgaaaaccaccttttactgtaatgggcttaaactcaaatactactacatgccgtttggttcgggagcaactatttgcccaggtcgcctttttgctatccacgagattaagcaattccttatcctgatgctttcgtacttcgagctggaacttatcgagggtcaagcaaagtgtcctcctcttgatcaatcacgtgccgggctggggattctgcctcctctcaatgacattgagttcaaatacaaattcaagcatctg

SEQ ID NO: 249874 - DNA, 1512 bp, synthetic construct
  misc_feature 1..1512: note = Description of Artificial Sequence: Synthetic coding sequence
  source 1..1512: mol_type = other DNA
atgatgaccacttctctcatttggggaattgcaatcgctgcttgctgctgcctgtggctgattctgggcattcgcaggagacagacgggagaacccccgcttgagaacggattgatcccatacctgggctgcgcgcttcaatttggagctaatcctctcgagttcctcagggctaaccagcgcaaacatggccacgttttcacctgtaagctgatggggaagtacgtccatttcattactaatccgctgtcatatcacaaagtgctgtgccacggaaagtacttcgactggaagaagttccatttcgccacctcggcgaaggcattcggccatcggtccatcgatcccatggatggaaatactaccgagaacattaatgacactttcatcaagaccctgcagggccacgcactgaactcacttactgagtccatgatggaaaacttgcagcgaatcatgcgcccgcctgtgtccagcaactccaagacggctgcatgggtcactgagggaatgtactccttctgctatcgggttatgtttgaagcggggtacctcactatcttcggaagagacttgactcgccgggatactcaaaaggcccatatcctgaacaacttggataactttaaacaattcgacaaggtgttcccggccttggtcgctggactgccaatccacatgttcagaaccgcccataacgcaagggaaaagctcgcagagagcctcaggcacgagaatctccaaaaacgcgaatcaatcagcgagctgatctcgctgagaatgttcctgaatgataccctgtcgaccttcgacgatcttgagaaggcaaagacccacttggtggtcctgtgggcttcccaagccaacaccatcccggccaccttctggtccctctttcagatgatccgcaatcctgaagccatgaaggccgccacggaagaggtgaagcgcactctggagaacgccggacaaaaagtctccttggaagggaaccctatctgcctgtcgcaagctgaactgaacgatctgccagtgctggatagcattatcaaggagtccctgaggttgtcgtcagcttccctgaatatccggaccgccaaggaagatttcaccctgcacctcgaggacggctcatacaatatccggaaggacgatatcatcgcactgtatccacagcttatgcaccttgacccggaaatctatccggatccccttacctttaagtacgatcggtacctggacgagaacggaaaaactaagaccaccttctactgcaacggactgaagctgaagtactactacatgccattcggatccggcgccaccatctgcccgggacgcctctttgcaatccatgagatcaaacagttcctgatcctgatgctgtcctacttcgaattggaacttatcgaaggtcaagcaaagtgcccaccgttggatcagagccgggccggccttggaatcctgcctccgctcaacgatatcgaattcaagtataagtttaagcacctc

SEQ ID NO: 249875 - DNA, 1512 bp, synthetic construct
  misc_feature 1..1512: note = Description of Artificial Sequence: Synthetic coding sequence
  source 1..1512: mol_type = other DNA
atgatgactacttctctcatttggggcattgccatcgcagcctgctgctgcctatggctgattctagggatcagacgtcggcagacaggagagccccccctggagaatgggttgataccttacctggggtgtgctctgcagtttggagctaacccgctggaattcctgcgcgcaaatcagcgaaagcatggacacgtgtttacatgtaagctcatgggaaaatacgtccactttattaccaatccactgtcctaccataaggtcctgtgccacggcaaatattttgattggaaaaagttccactttgcaacttctgctaaagctttcggacatcgctctatcgatccaatggacgggaataccaccgagaatatcaatgacactttcattaagacgttgcaagggcacgcattaaattctctgactgaaagtatgatggagaaccttcaacggattatgcgcccccctgtgtcaagcaactccaagactgctgcttgggtgacagagggcatgtactcattctgctatcgagtgatgttcgaggcggggtaccttactatattcgggagagacctgactagacgggatacccagaaggcacacatcttaaataaccttgataattttaagcagttcgataaggtttttccggccttggtggccggtctgcctatacacatgttcagaacggctcacaatgccagggagaaattggcagaaagtcttcgccatgagaacctgcagaagagggagtctatttctgagctcatcagtttacgcatgtttctcaatgatactttatccacttttgacgatcttgaaaaggcaaaaacacaccttgttgttctctgggcgagtcaggccaacaccattccggcaacgttctggagcctctttcagatgatccgcaacccagaggctatgaaggcggccaccgaggaagtcaaaagaacactcgagaacgctggccagaaggtaagtctggaggggaacccgatatgcctcagtcaggccgagttaaacgatttacccgtgttggactcgatcataaaggagtctcttaggctgagttctgccagtcttaatatcaggacagcaaaagaggatttcacgctgcaccttgaggatggatcgtacaacatccgcaaggatgatatcattgcactttatccccagcttatgcacctggaccccgagatatatccagacccactgacattcaaatacgaccgctacctcgatgagaacggaaaaactaagacaaccttctactgcaatggccttaaactgaagtattattacatgcccttcggctctggcgccactatatgccctgggaggctcttcgctattcacgaaataaaacagttcttaatattgatgcttagttactttgaattggagttgattgagggccaggcaaaatgtcctccattggaccaatctagggcaggtctgggcatcctgcccccccttaacgacatcgaatttaagtacaagttcaagcatcta

SEQ ID NO: 249876 - DNA, 1512 bp, synthetic construct
  misc_feature 1..1512: note = Description of Artificial Sequence: Synthetic coding sequence
  source 1..1512: mol_type = other DNA
atgatgaccacttcgctcatctggggcatcgcaatcgcggcctgctgctgcttgtggttgatcctgggcattaggaggcgccagaccggagagccacccttggaaaacggtctgatcccttatcttggatgtgcactgcagttcggagcgaaccctctggaatttctgcgggcgaatcaacgcaaacacggccatgtgttcacgtgcaaactgatgggcaaatacgtccacttcataaccaacccactgtcctaccacaaggtgctgtgccatggaaagtacttcgactggaagaaatttcacttcgccaccagcgccaaggcctttggccatcggtcgatcgatccaatggacgggaacactaccgaaaacataaatgacaccttcatcaagactctgcaaggacacgccctcaattcgctgactgaatcaatgatggaaaacctgcaacgtatcatgcggccgccagtgtcctccaactccaagaccgccgcttgggtgaccgagggaatgtacagcttctgctacagggtcatgttcgaggcaggatacctgaccatcttcggacgggacctgacgcgcagagatacccagaaggcccatattctcaacaacctcgacaacttcaaacaattcgacaaggtctttccagccctggtggcgggacttccgatccacatgttccgcaccgcccataacgcccgtgaaaaacttgccgagtcgctccggcatgagaatctgcaaaagcgggaatcaatttcagagctcatctccctccggatgttcctgaacgacacccttagcaccttcgacgacctcgagaaagccaagacccacctcgtggtcctgtgggcctcgcaagcgaataccatcccagcaactttttggtcgctgttccagatgatccgaaacccagaggccatgaaggcggcaaccgaggaggtcaaacgcacccttgaaaacgccgggcagaaggtgtcgctcgaggggaatccgatttgtctgtcgcaggctgagctgaatgacctgccggtcctggactcgatcatcaaggagtcattgcggctgagctcggccagcttgaacattcggaccgccaaggaagatttcactctccacctggaggacggatcctacaacatccggaaggacgacatcatcgcgctctacccgcagctgatgcatctggatccggaaatctacccagacccgctcactttcaaatacgatcgctatctggatgaaaacgggaaaactaaaacgaccttttactgcaatggacttaaactcaagtactactacatgccattcggtagcggagctaccatctgtcccggccggcttttcgccattcatgagattaagcagttcctgatcctgatgttgtcctactttgaactcgaacttatcgaggggcaggcgaagtgcccgcctctggatcagtcacgggcaggactcggaatcctcccgccgctcaatgatatcgagttcaagtacaaattcaagcatctg

SEQ ID NO: 249877 - DNA, 1512 bp, synthetic construct
  misc_feature 1..1512: note = Description of Artificial Sequence: Synthetic coding sequence
  source 1..1512: mol_type = other DNA
atgatgactacttcactgatttggggcattgcaattgcagcctgttgttgcctttggctgattctgggaattcggcgcagacaaactggcgaacctccgcttgagaatgggctgatcccttacttgggatgtgcccttcagtttggagcaaaccctcttgagttcctcagagccaatcagcgtaaacacggtcatgtgtttacgtgcaagctcatgggcaagtacgttcactttatcaccaaccctctgtcctaccacaaggtcctgtgtcacggaaagtactttgactggaagaaattccattttgcaaccagcgcaaaggcattcggacaccgttcaattgacccaatggacggtaacaccaccgagaatatcaacgacaccttcataaagacgctgcaaggacacgctcttaacagcctcaccgaatcgatgatggaaaatctgcagagaatcatgcggccaccggtgagctccaactcgaaaaccgccgcatgggtgaccgaaggaatgtactccttctgctaccgcgtgatgtttgaagccggatatctgacgatctttgggagggatttgacccgtcgcgacacgcagaaggctcatattctcaacaacctggacaatttcaagcaattcgataaagtttttcctgcactggtcgcaggtttgccaattcatatgttcagaaccgcacataatgccagagaaaagctggcggagtcgctgaggcatgagaatctgcagaagcgggagtctatttcggaactgatttcccttcgcatgtttcttaacgacaccctcagcactttcgatgatctggaaaaggctaagactcatctcgtcgtgctttgggcatcccaagccaacaccatacccgccactttttggtcgctttttcaaatgattcgaaaccctgaggccatgaaggcggccactgaggaggtcaaacgcactcttgaaaacgcaggccaaaaagtctctttggaaggaaaccccatctgcctctcgcaagcagaacttaatgatctccccgtgttggattccatcatcaaggaatcacttcggctctcttccgcatcgcttaacattagaaccgcaaaggaagatttcactctgcacttggaggacggctcgtacaacatccgtaaggatgacattatagcgctctaccctcagcttatgcatcttgatccagaaatctaccctgatccccttactttcaagtacgataggtaccttgatgaaaacggcaaaaccaagactaccttttactgcaatggactgaagctgaagtactactacatgccattcggctcgggagcaaccatctgcccaggacgcctgtttgcaatccatgagatcaagcaatttctgatcctgatgttgtcctactttgaacttgaactcattgaaggtcaggcaaagtgtcccccgcttgaccaatcacgtgctgggcttggaatccttcctcctcttaacgacattgaattcaagtacaaattcaaacatctg

SEQ ID NO: 249878 - DNA, 1512 bp, synthetic construct
  misc_feature 1..1512: note = Description of Artificial Sequence: Synthetic coding sequence
  source 1..1512: mol_type = other DNA
atgatgaccacttccctgatctggggaatcgccatcgcagcctgctgctgcctgtggctgatcctgggaatcaggagacgccagacgggggagccaccactggaaaacggactgatcccctacctcggctgcgccctgcagtttggtgctaacccactggagtttctgagggcaaatcagcgaaagcacggacacgtgttcacctgcaaacttatgggaaagtatgtccactttatcaccaacccactctcgtatcacaaggtcttgtgccacggtaagtacttcgactggaagaagttccacttcgcgacctcagccaaggccttcggacatcgaagcatcgatccgatggacggaaacactactgagaatatcaacgacacgttcatcaaaaccctgcaggggcatgcactgaacagcctgactgaatctatgatggaaaacctgcagagaatcatgaggccgccagtctccagcaattcaaagactgctgcgtgggtcaccgaaggtatgtacagcttctgctaccgggtgatgttcgaagcgggttacctcactattttcggaagggatctgacccgccgcgatacccaaaaagctcatatccttaacaatttggacaactttaaacaattcgacaaagtgttcccagctctcgtcgcgggactgcccatccatatgttcagaaccgcccacaatgctcgcgaaaagttggcggaatccctgagacacgagaaccttcagaagagagagagcatctcggagctgataagcctgcgcatgttcctcaatgacacgctctcaaccttcgatgatctggaaaaggccaaaacccatcttgtcgtcttgtgggcatcgcaagctaatactattccggcaaccttttggtccctgttccaaatgatccgcaatccggaggcgatgaaggcagccactgaagaagtgaagcggaccctggagaacgcaggtcagaaggtgtcattggagggaaacccgatctgcttgtcccaggccgaattgaacgatctcccggtgctcgactcaataatcaaagaatcccttcggctgagctcggcctcgctgaatatcaggacggcgaaggaggattttacgctccaccttgaggacggctcatacaacattcgcaaggacgatatcatcgccctgtatccgcaactgatgcatctggaccctgaaatctacccggatccactcactttcaagtacgaccgctaccttgatgagaatggaaagaccaagactaccttctactgcaacggactcaagctgaagtactactacatgccgttcggctcgggtgctaccatatgcccgggaagattgttcgcgatccacgaaatcaagcagtttcttatcctgatgctttcatactttgagctggaacttatcgaaggacaggcaaagtgtccacctctggatcagagccgggcgggcttgggtattctccctcccctcaacgacattgagttcaagtacaagtttaaacacctg

SEQ ID NO: 249879 - DNA, 1512 bp, synthetic construct
  misc_feature 1..1512: note = Description of Artificial Sequence: Synthetic coding sequence
  source 1..1512: mol_type = other DNA
atgatgactacttcccttatctggggaatcgccatcgctgcctgctgttgtctgtggctgatcctcggaattcgcaggcgccagaccggtgagcctccacttgagaacgggctcattccatacctcggctgcgccttacaattcggagctaatcccttggaattcctgcgagcaaatcagcgtaaacacggacacgtcttcacctgtaagcttatggggaaatacgtgcactttataacgaatcccctgtcttaccacaaggtcctgtgccacggaaaatactttgactggaagaaattccactttgctaccagcgcaaaggcctttggccacaggtccatagaccccatggacgggaataccacggaaaacatcaacgataccttcattaagaccctgcaggggcatgcgctgaactccctgaccgagtcaatgatggagaatctgcaaaggataatgcgacctcccgtgtcttccaacagcaaaacggcggcctgggtgactgagggaatgtacagcttttgctaccgggtcatgttcgaagccggttatctgactatcttcggcagagacctcacaaggcgcgacactcagaaggcccacattttgaataacctagacaacttcaaacagtttgataaggtcttcccagcactcgtggcgggccttcctatccacatgttcaggacagcccacaacgcaagggagaaattagctgaaagtcttaggcacgaaaacctgcagaaacgcgagagcatatctgagcttataagtctgcgcatgtttttaaacgacacccttagcaccttcgatgatttggaaaaggctaagacccatttggttgttctgtgggcctctcaagccaacactatccccgctaccttctggtccctcttccagatgattaggaacccagaagccatgaaggccgcaaccgaagaggttaagagaacgttggaaaatgctggacagaaagtgtctctcgaaggcaacccaatctgtctaagccaagctgagctcaatgacctgccagtgctggattccataatcaaagagtcccttagactgtctagcgcgtctctgaatatccggaccgctaaggaagatttcaccttgcatctggaggatggctcatacaacatccgaaaggatgatattatcgccctatacccccagctgatgcacctggaccctgaaatttaccccgatcctctgaccttcaaatatgatcgttatttggatgaaaacggcaaaacaaaaaccactttttactgcaatggccttaaactgaagtactattacatgccgtttggatcaggggccactatatgcccgggcaggttgttcgccattcatgagatcaagcagtttcttatcctcatgctgagctatttcgaactggaactgatagaggggcaggcgaagtgcccccccctcgaccagtcacgtgcagggctaggaatcctgccacctttaaatgatattgagttcaaatacaagttcaagcactta

SEQ ID NO: 249880 - DNA, 1512 bp, synthetic construct
  misc_feature 1..1512: note = Description of Artificial Sequence: Synthetic coding sequence
  source 1..1512: mol_type = other DNA
atgatgacgacctccctgatatggggaattgcaatcgccgcctgttgttgcctttggctgatcttaggcatcaggcgacgtcagactggcgaaccaccactcgaaaatggacttattccatatctcggatgcgccctgcagttcggcgcaaatcccttggagttcctgcgggcaaaccagcgaaagcacggacacgtgttcacgtgtaagcttatgggcaagtatgtgcactttattacgaacccactgtcatatcacaaggtgttgtgtcatggaaagtacttcgattggaaaaagtttcatttcgcaacaagtgctaaggctttcggacacaggtcaattgatcccatggacgggaatacgacagagaacataaacgacaccttcatcaaaacgttgcaaggacatgccctgaattcactgactgagtcaatgatggagaatttgcaaaggattatgcgtccaccagtgtcttcgaattcaaagacggctgcttgggtgactgaaggaatgtatagcttttgctatcgtgtgatgttcgaagccggatatttgactatcttcgggagagatctcacacggcgggacacgcaaaaagctcacattctgaacaacctcgacaattttaagcagttcgataaggtgttcccagctctggtggctggcttgcccattcatatgtttcgtacagctcacaatgccagggaaaagttagctgaatccctgcgtcacgaaaacctccagaaacgggagagcatttcagaactgataagcttgcgaatgttcctgaacgatacactctctacttttgacgatcttgaaaaggcaaagacccacctggtggtgctgtgggcaagtcaggcaaataccatccccgctacattttggagcctgtttcagatgatcaggaaccccgaggcaatgaaagccgctacggaagaagtcaaaagaacacttgaaaatgctggccagaaggtctccttggaaggaaatccgatctgcctgtcccaggctgagctaaacgacttgcccgtgctggacagcataatcaaggagtcgctgcgattgtcgagcgctagcctaaatatccggaccgctaaagaggacttcaccttacacctggaggacggaagctataatatcagaaaggacgacatcatagctctatatccccagctgatgcacctcgatcctgagatctacccagatcccctgacttttaagtatgataggtacttggatgagaatggcaagactaagacaaccttctactgcaacggccttaaactaaagtattactatatgccctttgggagtggagccaccatttgtccaggcaggctcttcgccatccatgaaattaagcaatttctaatcctgatgttatcctactttgaacttgaacttattgaggggcaagccaagtgccccccactcgatcagtcaagagccggcttaggtattctacctccactgaacgatatcgagttcaaatataaatttaagcacctc

SEQ ID NO: 249881 - DNA, 1512 bp, synthetic construct
  misc_feature 1..1512: note = Description of Artificial Sequence: Synthetic coding sequence
  source 1..1512: mol_type = other DNA
atgatgaccacaagccttatttgggggatagcgatcgccgcatgctgttgcctgtggctcatccttggcatcagacgcaggcagacaggcgagccgcctcttgaaaatggcctgatcccgtatctgggatgtgcacttcagttcggggcgaaccccctcgagttcctgcgcgcgaatcagagaaaacacggccatgtatttacatgcaagcttatgggaaagtatgtgcacttcattacgaatcctctgtcttatcataaggtactttgtcacgggaaatattttgattggaagaaattccactttgcgacaagtgccaaagccttcggccaccgcagtatcgaccctatggatggaaatacgacagagaacatcaacgacacttttattaaaactctgcagggtcacgctttgaactctttgactgagagtatgatggagaacctgcagagaatcatgaggccgcccgtctctagcaatagtaagactgctgcatgggtcacggaaggcatgtattctttttgctaccgggtcatgtttgaagctggctacctgacgatctttggtagggatcttacccggagggacacacagaaggctcacatactgaataacctggacaactttaagcagtttgataaggtctttcctgccctggtggcggggttgcctatacatatgttccgaacggcccataacgctagagagaagttggctgagagtctgagacatgaaaatctgcagaaaagggagtcaatatctgaacttataagcctgaggatgttcttgaacgacactctgtcaaccttcgacgatctggaaaaagccaaaacacatcttgtagtactgtgggcttcccaggctaatacgatccccgccacattttggtctctcttccagatgatccggaacccggaagcgatgaaagccgccactgaggaagtgaagagaacccttgagaacgccggccagaaggtgtcccttgaagggaatcccatttgtctttcacaagccgagctcaacgacctgcccgtcctggactccattattaaagaatccttgcgcctttccagtgctagtctgaacatcagaacggccaaagaagacttcaccctgcacctcgaagacgggtcatacaacatccggaaagacgacattatcgctctctacccccagctcatgcatctggaccctgaaatataccctgacccactgacctttaaatacgatcgctacctggacgaaaatggaaaaacaaaaacaacgttttactgtaatgggctcaagctgaaatactactatatgcccttcggctccggagcgacaatatgtccaggccggctcttcgcaatacatgagattaagcagttcctcatcctcatgctgtcctatttcgagctcgagttgattgagggtcaggccaagtgccctccccttgaccaaagcagggccggattgggcatactgccacctctgaacgatattgaattcaagtacaagttcaaacacctc

SEQ ID NO: 249882 - DNA, 1512 bp, synthetic construct
  misc_feature 1..1512: note = Description of Artificial Sequence: Synthetic coding sequence
  source 1..1512: mol_type = other DNA
atgatgaccaccagcttaatatgggggattgcaatcgctgcctgttgctgcctgtggcttatactgggaatccgtcgccggcagaccggggagcctccattagagaacggactgatcccttacctgggttgtgcattgcagttcggcgccaatccgctggaattcctgagggcaaatcagcgcaaacacgggcatgtgtttacctgcaaactcatgggtaaatatgtccactttatcaccaaccctctgagctaccataaagttctgtgtcatggcaagtattttgactggaagaaatttcacttcgcaaccagcgcaaaggccttcggacaccgcagcatagacccaatggatggtaataccacggagaatatcaatgatacgttcatcaagactttgcaaggacatgccctcaactcattgaccgaaagcatgatggagaacttgcagcggattatgcgaccgcctgttagcagcaattctaagaccgcggcgtgggttactgagggcatgtatagtttttgctatcgcgtcatgttcgaagcgggttacctgaccatcttcggtcgcgacttgacgcgtcgggacacgcagaaggcgcacatattgaataacctggacaacttcaagcaattcgataaggtttttccagcccttgtggcgggtctgcccattcacatgtttaggacggcacacaatgcccgcgaaaagctagctgaatccctgcggcatgaaaacctgcagaagcgtgagagcatcagcgagctcatctctctccggatgtttctgaacgacaccctctccactttcgacgatctggagaaagccaagacacacctggtggtgctgtgggcatcgcaagcaaatactatcccggccactttctggtctctgttccagatgatccggaatcctgaggcgatgaaagcggccaccgaggaagtaaagcgtaccttagaaaatgcaggccaaaaggttagcttggagggcaacccaatttgtctgagccaggctgagctgaatgatctgcctgttttagattcaattatcaaggagagcctgcgtctgtcctccgcctcccttaacattagaaccgcgaaggaggattttactctgcatctggaggatggtagctacaatatccgcaaagacgacatcatcgcactttatccccaactgatgcacttggaccctgagatctatccggacccgctgacgtttaaatacgaccgttacttggatgaaaatggtaaaaccaaaactacattctattgcaatggtcttaaactgaaatactattacatgccttttggtagcggtgcaacgatctgtccgggtcgtctgttcgcaatacatgaaatcaaacaatttctgatcttaatgctatcctacttcgagcttgagctgattgagggtcaggcgaagtgcccgccactggaccagtcccgggctggtctgggcattctgcctcctttgaatgatattgagtttaaatacaagtttaagcatttg

SEQ ID NO: 249883 - DNA, 1512 bp, synthetic construct
  misc_feature 1..1512: note = Description of Artificial Sequence: Synthetic coding sequence
  source 1..1512: mol_type = other DNA
atgatgacaacaagtttgatctggggtattgctattgcagcctgttgttgtttgtggctgatattagggattagacggaggcagaccggagaacctccacttgagaatgggttgatcccatacttaggttgtgctcttcagttcggcgccaatccactcgagttcctgagagccaaccagcggaaacacggacacgtgttcacctgcaaactaatggggaagtacgttcattttataaccaacccgctctcataccacaaggttttgtgtcacggcaagtattttgattggaagaaattccacttcgctacatccgccaaagcctttggtcatcgctcaattgatccaatggatggtaacaccaccgagaatataaatgatacattcattaaaactctacaaggtcacgcactgaactctttgaccgagtctatgatggaaaatctccagaggatcatgcgccctcccgtgtcatctaattcaaaaacagccgcttgggtcaccgaggggatgtattcgttttgttaccgggttatgtttgaagctggctacctcaccatcttcgggcgggacctgacaaggagagacactcaaaaggcacatattctaaataacttggacaatttcaagcagttcgacaaggtgttcccggctctagtcgccgggctccccatacatatgtttcgcacagcacacaacgctcgtgagaagttagccgaaagtctgcggcacgagaacctccagaagcgcgagagtatttctgagttgatttcgctgaggatgtttctcaacgatacactgagcacgtttgacgacttggagaaggccaaaacgcacttggtggttctctgggcaagccaagccaatacaatcccagccaccttctggtccctgtttcagatgatcaggaatcctgaagcaatgaaagccgctactgaagaagtgaaacggaccctggagaatgccggacagaaagtgagcctggagggcaatcccatttgtttaagccaagcggagttaaacgacttgcccgtgctggatagcatcattaaggaaagtcttcgtctgtcaagcgctagtcttaacatccgtacagcgaaagaggatttcactttgcacctcgaggatgggagttacaatattcggaaagatgatataattgcactttatccgcagctcatgcacctggaccctgaaatttaccctgacccgttaactttcaaatacgaccggtatctggacgagaatggcaaaactaaaaccacgttttactgtaatgggctgaaattaaagtactactatatgcctttcggctccggcgccacaatttgtccgggtaggctgtttgctatccatgaaatcaaacagttcttgatcttgatgctatcttactttgaacttgagctcatagaaggtcaggctaagtgtccaccattggaccagtcgagagccggacttggcatactgccgcccctgaatgatatcgagttcaagtataaatttaaacattta

SEQ ID NO: 249884 - DNA, 1512 bp, synthetic construct
  misc_feature 1..1512: note = Description of Artificial Sequence: Synthetic coding sequence
  source 1..1512: mol_type = other DNA
atgatgaccacctcgctcatctggggcatagccattgccgcgtgctgttgtctgtggttgatcctcggcatcagacgacgacagaccggggaaccaccccttgagaacggacttattccctacctcggctgtgccctgcagttcggagcaaacccccttgagtttcttcgtgccaaccagcgcaagcatgggcatgtgttcacctgtaagctcatgggcaagtacgtgcactttatcaccaatcctttgtcataccataaagtgctgtgccacggaaaatactttgattggaaaaagtttcatttcgcaacgagcgcaaaggcattcggacatcggtccattgatccgatggacggcaataccactgaaaacataaacgacacgtttatcaaaacgcttcaggggcacgcactcaactcccttaccgaaagcatgatggagaaccttcaaagaatcatgcggccgccagtgagcagcaattctaagactgcggcctgggtgaccgagggtatgtactcattttgttacagagtgatgttcgaagcgggttaccttacgatttttggcagggaccttacccgccgggatacccaaaaggctcatatccttaacaaccttgacaactttaagcagtttgacaaagtgtttcccgcccttgtcgccggactcccaattcacatgtttagaactgctcataatgcacgcgagaagttggccgaaagcctccggcatgagaatctgcagaagagggaatccataagcgaactgatctcgctgcgcatgtttcttaacgatactctgtcaacctttgatgaccttgaaaaagctaagactcacttggtggtcctctgggcatcgcaagctaacaccatacctgcaaccttttggtcgctttttcaaatgattaggaatccagaggcaatgaaagcagctacggaagaagtgaagcggacccttgaaaacgccggacaaaaagtgtcacttgaaggaaaccctatttgtctttcacaagcagagctgaatgatctgcctgtgttggactcgattatcaaggaatccctgagacttagctccgcatcactcaacattcgtactgcaaaggaagattttactcttcatctggaagatgggtcatacaacatcaggaaggatgacattattgccctctacccccagcttatgcatctggatcctgagatctaccccgacccactgacgttcaaatacgatcgctacctggacgagaacggcaaaaccaagactaccttttactgtaatggtctgaagctgaaatactactacatgcctttcggcagcggcgcgacgatctgtccagggcgcctgtttgcaattcacgagattaaacaattcttgattctcatgctcagctacttcgagctggagctgatagaaggacaagcgaaatgtcctccactcgatcagtccagagcaggacttggtattcttccaccacttaacgatattgaattcaaatacaagtttaaacatctt

SEQ ID NO: 249885 - DNA, 1512 bp, synthetic construct
  misc_feature 1..1512: note = Description of Artificial Sequence: Synthetic coding sequence
  source 1..1512: mol_type = other DNA
atgatgaccacgtcactgatctggggcatcgctatagcagcatgttgctgcctgtggctgatcctggggatacgccggaggcagactggcgagcccccactggagaacggactgatcccctacctgggatgtgccctccagtttggggccaaccccttggagttcttgagagccaaccagaggaagcacggtcacgtgttcacttgtaagttgatgggcaagtatgtgcacttcatcaccaatccactttcctaccataaagtcctctgccatggcaagtactttgattggaagaaattccactttgctacctctgctaaagctttcggccatagatctatcgaccccatggatgggaatacaacagagaatattaacgatactttcattaaaacactgcagggccatgccttgaactcattgactgagtctatgatggagaaccttcaaaggattatgcggccaccagtctctagcaactccaaaacagctgcctgggtaacagagggcatgtactccttctgctacagggtgatgttcgaagcaggttacctgaccattttcggccgggatctgaccagacgcgatactcagaaggcccatatactcaataacctggacaacttcaagcagtttgataaagtattccccgctctggttgcgggactgccgattcatatgttccgaaccgcccacaatgcacgggagaagcttgctgaatctctccgacatgagaatcttcagaagcgcgagagcatttccgagttgatcagcctcagaatgttcttgaacgacacactctcaaccttcgatgatctcgagaaggcaaagacccatttggtcgtgttgtgggcctcccaagctaacacaattcctgccaccttttggagtcttttccagatgatccgaaatcccgaagccatgaaagccgccactgaagaagtcaagcgaactcttgagaatgcaggacaaaaggtgtccctcgaggggaatcccatctgtttgagtcaggccgaactcaacgacctgcccgtcttggatagcatcatcaaagagagcctgcgcctgagttcagctagtctgaacattcgcaccgccaaagaggacttcacactgcatctggaagacggatcctataacatacgcaaagacgacatcatcgctctctatccccagcttatgcacctggacccagagatctaccctgacccactgacctttaaatatgaccgctacctggatgaaaatggcaagaccaaaacaacgttctattgtaatggtctgaagctgaagtattactatatgcccttcgggtccggagccactatttgcccaggacggctctttgccattcacgagatcaagcagttcttgatactgatgctcagttatttcgaactggaactgattgaagggcaagccaaatgtcctccactggatcagtctcgagccggactgggtatacttccgcctctgaatgacatcgagttcaaatacaaattcaaacatctg

SEQ ID NO: 249886 - DNA, 1512 bp, synthetic construct
  misc_feature 1..1512: note = Description of Artificial Sequence: Synthetic coding sequence
  source 1..1512: mol_type = other DNA
atgatgactacttcactaatatggggaattgcaattgcagcatgttgttgtttgtggttaattttagggattcgaagaagacaaacaggtgaacctccacttgaaaatggacttattccatatctaggatgcgctttacaatttggagctaatccattagaatttcttagagcaaaccagagaaaacatggacatgtttttacatgtaaacttatgggtaaatatgtacattttattaccaatcctcttagttatcataaagttttatgtcatggaaaatattttgattggaaaaaatttcattttgctacttctgcaaaagcattcggacatagaagtatagatccaatggatggaaatactacagaaaatattaatgatacatttattaaaacacttcaaggtcatgctttaaattcacttacagaatcaatgatggaaaatcttcaaagaattatgagacctccagtatcttcaaatagtaaaacagcagcttgggttactgaaggtatgtattccttttgttatagagttatgtttgaagcaggatatcttacaatttttggaagagatttaacaagaagagatacacagaaggcacatattctcaataatttagataattttaaacaatttgataaagtatttccagcattagttgctggattaccaatacatatgtttagaacagctcataatgctagagaaaaacttgcagaatctttaagacatgaaaatctccaaaaaagagaatctatttcagaacttatttctttaagaatgtttcttaatgatacattgtcaacatttgatgatttagaaaaagcaaaaacacatttagtagtattatgggcatcacaagctaatactattcctgccacattttggagtttatttcaaatgattagaaatccagaagctatgaaggcagctacagaagaagttaaaagaactttagaaaatgctggtcaaaaagttagtcttgaaggaaatcctatttgtctttcacaagcagaattaaatgatcttccagttcttgatagtataattaaagaatctcttaggttaagtagtgcatctttaaatattagaacagctaaagaagactttacattacatttagaagacggaagttataatattagaaaagatgatattattgcactttatccacaattaatgcatcttgatccagaaatctatccagatccacttacttttaaatatgatagatatttagatgaaaatggaaaaacaaaaacaacattctactgtaatggacttaaacttaaatattattatatgccttttggatctggtgcaactatttgtccaggaagattattcgcaattcatgaaattaaacaatttcttattttaatgctttcatactttgaacttgaattgattgaaggacaagcaaagtgtccacctttagatcaatcaagagcaggattaggaattcttccaccacttaatgatatagaatttaagtataagtttaagcatctt

SEQ ID NO: 249887 - DNA, 1512 bp, synthetic construct
  misc_feature 1..1512: note = Description of Artificial Sequence: Synthetic coding sequence
  source 1..1512: mol_type = other DNA
atgatgactacctcgctgatttggggtattgccattgccgcctgctgttgtctgtggcttattctcggaattcggagacggcagactggtgagccaccccttgaaaatgggctgattccttatttggggtgtgcactgcaatttggcgccaacccactggaattcctccgggcaaaccaacggaaacacggacacgtgtttacttgcaagctgatggggaagtacgtccatttcattactaacccactgtcctaccataaggtgctttgtcacggcaagtactttgactggaaaaagtttcattttgcaaccagcgcaaaggcattcggtcatcggagcattgacccaatggacggcaatacgaccgaaaacatcaacgatacctttatcaagaccctgcaaggacatgcacttaattcgcttacggaatccatgatggaaaaccttcaaagaataatgcgcccccctgtgtcgtcgaattcaaagactgcagcttgggtgacggaagggatgtactctttctgttaccgtgtgatgtttgaagcaggctatctgactatcttcggacgggatctgaccagacgtgatacccagaaggcccatattctgaacaatcttgataactttaaacagttcgataaagtgtttcctgcactcgtcgcaggacttcctatccatatgtttagaactgcccataatgcccgggaaaaacttgctgagtcccttagacatgaaaacctgcagaagagggagtcaatttccgaactcatttccctgagaatgtttctgaatgacactctgagcaccttcgacgatctcgagaaagcaaagactcatttggtggtcctttgggcatcccaagcgaataccatcccagccactttctggtccctctttcaaatgatcaggaatccagaagcgatgaaggcagcaaccgaggaagtgaagcgcaccttggaaaatgcaggccaaaaggtgtcgctcgaaggaaatcccatctgtctttcgcaggcggagctcaacgacttgccagtgctcgattccatcatcaaggaatcccttcggctctcttcagcgtctctgaacataagaactgcaaaagaggacttcactcttcacctggaagatggttcgtacaacatcaggaaagatgacatcattgctctctaccctcaactgatgcatcttgatcctgaaatctaccctgatccactcactttcaagtacgacagatacctcgatgaaaacggtaagacgaaaactaccttctactgtaacggacttaagttgaagtactactacatgcctttcggatccggcgcaactatttgtcctgggagactttttgccatacatgaaatcaaacaatttctgattcttatgcttagctactttgaactggagctcattgagggacaagcaaaatgtccgccgctggatcaatcgcgcgctgggctggggattctgcctccactgaatgatatcgagtttaagtacaagtttaagcacctg

SEQ ID NO: 249888 - DNA, 1512 bp, synthetic construct
  misc_feature 1..1512: note = Description of Artificial Sequence: Synthetic coding sequence
  source 1..1512: mol_type = other DNA
atgatgaccacatctctgatttggggcatcgcaatcgccgcgtgctgttgtttgtggttgatactgggaattaggcgccgccagacgggtgaaccgccgctggaaaacggtctcatcccctacctcggctgtgccctccagttcggagctaacccactcgagttccttagagcgaaccaaagaaagcatggtcacgtgtttacctgtaaattgatgggcaagtatgttcattttatcaccaatcccctttcttatcacaaggtgctgtgtcacggcaagtatttcgactggaaaaagttccacttcgccacctcagctaaggctttcggacacagaagtatagaccctatggacggaaatactaccgagaacatcaatgacaccttcattaagaccttgcagggccatgctcttaactctttgacagagagtatgatggagaacctgcagcgcataatgaggccacccgtatcttctaattccaaaacagccgcctgggtgacagagggcatgtatagcttctgttacagagtgatgttcgaagcgggctatctgaccattttcggtagggacctgacgaggagggacacccagaaagctcatatcctgaataatttggacaattttaaacagttcgacaaggtgttcccggcgctcgtcgccggcctcccgattcatatgttcaggaccgctcacaatgctagagagaagctggccgaaagtcttagacatgaaaacctgcagaaacgcgagtcaatttccgaactgatctcccttcgcatgttcctgaacgataccctcagcaccttcgatgacttggaaaaggcgaaaactcacctggtagtcctgtgggcctctcaggctaacactataccggcgaccttttggtctctgttccagatgatcagaaacccagaggcgatgaaggccgctacagaagaagtgaagcgcacccttgaaaacgctggacagaaggtttcactggaaggcaacccaatctgccttagtcaggcagaactgaatgacctcccagttttggattctattatcaaagaatcattgagactctcctccgccagcttgaacatccgcaccgccaaggaggacttcacccttcacctcgaagacggtagttataacatcaggaaggacgatataattgccttgtacccacaactcatgcacttggatccagagatttaccctgatccccttacttttaagtacgacaggtacctcgacgagaatggcaagactaagactactttttactgcaacggactcaagctcaaatactactacatgccgttcggttctggagcgactatctgtcctggcagactgtttgccattcacgagatcaagcagtttctgattctcatgctgtcatattttgagctcgaactgatagagggacaggcgaagtgtccaccgcttgaccagtccagggccggtcttggtattttgccacctctgaatgatatcgagttcaaatataagttcaaacacttg

SEQ ID NO: 249889 - DNA, 1512 bp, synthetic construct
  misc_feature 1..1512: note = Description of Artificial Sequence: Synthetic coding sequence
  source 1..1512: mol_type = other DNA
atgatgacaacgagcttaatttggggtatcgcgatagctgcatgctgttgcctgtggttaatcttgggtatccgtagaagacaaacaggcgagccgccgttagaaaatggtcttatcccgtacctaggatgcgccctccaatttggtgctaatccgcttgaattcttacgcgcgaatcaacgaaaacatggacatgtgttcacgtgtaaattgatgggaaaatacgttcattttatcacaaaccctttatcataccacaaagttctttgccatggaaaatactttgattggaagaaattccattttgcaacatcagcaaaagcgtttggccatcgtagcatcgaccctatggacggtaacacaacagaaaatataaatgatacttttatcaaaacactccaaggacatgccctgaattcccttacagaaagcatgatggaaaacttacagagaattatgcgacctccggtgagctctaacagtaaaaccgctgcgtgggtgaccgaaggaatgtatagcttttgctaccgagttatgttcgaggccggatacttaacaattttcgggcgagatcttacacgccgcgatacccagaaagcccatatcttgaataatcttgacaacttcaaacagtttgacaaagtatttcctgccttggtcgccgggctgccgatccatatgtttcgtacagcgcataacgctagagagaaattagcagaatcactgagacatgaaaatcttcaaaaaagagaatctatttccgaacttatcagcttacgtatgtttcttaatgacactttatctacgtttgatgacctggaaaaagccaagacacacttagtcgtgctttgggcatctcaagctaatacaatcccggctactttttggtccctttttcagatgatccggaatccggaagccatgaaggcggcgactgaagaagtgaagagaacacttgagaatgccggccaaaaagttagcttggagggaaatccaatttgcctttcgcaggcggagctgaatgatttacccgtgctagacagtattatcaaagagtcactccgtctgagtagcgcttctttgaacattcgcactgctaaagaagatttcaccttacacctcgaggatgggtcttataacatccggaaagacgatattatagcactttatcctcaacttatgcaccttgacccggaaatttaccccgatccgttaacgtttaaatatgaccgatacctggatgagaacggcaaaacgaagacgacgttttactgtaatggattaaagctgaagtattattacatgccgtttggcagtggtgcaacgatctgtcccgggcgactttttgctattcatgagatcaaacaatttcttatccttatgcttagttactttgaattagagcttattgagggacaagcgaaatgtccgccactggatcagtctagagccgggctgggaattcttccgcctctgaacgatatcgaatttaaatacaaattcaagcattta

SEQ ID NO: 249890 - DNA, 1512 bp, synthetic construct
  misc_feature 1..1512: note = Description of Artificial Sequence: Synthetic coding sequence
  source 1..1512: mol_type = other DNA
atgatgaccactagtctaatctggggcatcgctatcgcagcttgctgctgtctgtggctgatactggggatccgacgtaggcaaacaggagagccaccattggagaatgggctcatcccttatcttgggtgtgccctgcaatttggcgccaaccctctggaatttctgagggcgaaccagcggaagcacgggcatgtgtttacttgcaagttaatgggaaagtacgttcactttattacaaatccgctttcctaccataaagttctgtgccacggaaaatacttcgattggaagaagttccattttgctacctctgcaaaggcgtttgggcaccggtcaattgacccaatggacggcaacacgactgagaatatcaatgatacattcattaaaacgctgcaaggccatgcccttaacagtcttacagagtccatgatggagaatctccagagaataatgaggcctccggtctctagtaactcaaagacagcagcctgggtgaccgagggtatgtactcattctgctatcgtgtcatgttcgaagcagggtacctcacaatttttggcagagaccttactagacgagacactcagaaagcacacattctgaataatctggataacttcaagcagtttgataaagtgtttccagccctggtggctggcttgccaattcacatgttccgcaccgctcataatgcccgtgaaaagttagcagaatccttgagacacgagaatctgcagaagcgggagtctatatcagagctcataagcctccgtatgtttctgaacgatacgctctctacctttgatgatctcgagaaggccaagactcaccttgtagtgctgtgggcctcacaagctaatactatacccgctactttctggtcactctttcagatgattaggaacccagaggctatgaaggcagccaccgaggaagttaagcgcacattagaaaacgctggacagaaggtgtccttagagggaaacccgatttgtctgtcccaggctgagcttaacgatctgcctgtgctggatagcatcatcaaagaaagtctaagactgagttcagcgagcctcaacattagaaccgcgaaggaagatttcaccctgcacctggaagacggctcttataatatacggaaagacgacatcatcgcactgtatccccaactcatgcaccttgacccagagatctatcctgatcctctaacatttaagtacgacaggtatttggatgaaaacggcaagaccaagacgaccttttattgtaacggcctaaagctgaaatattattacatgccgtttgggtccggcgccacaatttgccctgggcgcttgttcgctatccatgagattaagcagtttctaattttaatgctaagctattttgaactcgaactgatcgaaggccaggccaagtgccctcctctggatcaatcccgtgctggtttaggaatcctacctccactaaacgacattgagtttaaatataagtttaagcacctg

SEQ ID NO: 249891 - DNA, 1512 bp, synthetic construct
  misc_feature 1..1512: note = Description of Artificial Sequence: Synthetic coding sequence
  source 1..1512: mol_type = other DNA
atgatgactaccagccttatttgggggattgccatagccgcatgttgttgcctttggttgatcttggggatacgccggcggcaaactggggagccacccttggaaaatgggcttatcccttaccttggatgtgcgttgcagtttggtgcaaaccctttggaattccttagagccaaccagagaaagcatgggcacgtgttcacgtgtaaactcatgggcaagtacgtgcatttcataaccaatcctctgtcctaccataaggtcttgtgtcacggcaagtacttcgattggaaaaagtttcactttgcaacttcagcaaaggcatttggacatcggagtatagaccctatggatggcaataccaccgaaaacattaacgacaccttcatcaagactctgcaaggccatgcacttaatagcctcactgagtcaatgatggagaacctgcagcgaatcatgcggccacccgtcagctcgaactccaagaccgcagcctgggttacggagggaatgtactccttttgttatcgggtgatgttcgaggccggttacctcactatctttgggcgcgacctgaccaggcgggatactcagaaggcacatattctcaacaacctggataacttcaaacaatttgataaggtttttcctgcactggtggcagggcttccaattcacatgtttcgcactgctcataacgcccgtgaaaaacttgctgaaagcctgaggcatgaaaacttgcagaaaagagagtccatttcagaacttatttcgctgcgaatgtttttgaatgataccctttcaacttttgatgacttggagaaagctaagacccacctggtggtgctttgggcaagccaagcaaacaccataccggcaaccttttggtccctttttcagatgattcggaatcctgaagctatgaaggcagcaaccgaagaagtgaagcgtaccctggagaacgcgggacaaaaagtctcacttgaaggcaaccccatttgcctttcgcaggcagaactcaacgacctcccggtgctggattccataatcaaagaatcgctgcgcctgtcgtcggcgtcattgaacattagaaccgccaaggaggactttactctgcatctcgaagatgggtcgtacaacatcaggaaggatgatatcattgccctgtacccacagcttatgcatctggatccggagatctaccctgatcctctcacctttaagtacgatcgatacctggatgagaatggtaagaccaaaaccactttctattgtaatggtcttaaactgaagtactactacatgccctttggcagcggtgcaaccatctgtccaggaagattgtttgccattcatgagataaagcagttccttatactcatgctctcgtatttcgagctcgagcttattgaaggccaagcaaagtgccccccattggatcagtcgagagcaggacttggaatccttcccccactcaatgatattgaattcaagtacaagtttaaacacctg

SEQ ID NO: 249892 - DNA, 1512 bp, synthetic construct
  misc_feature 1..1512: note = Description of Artificial Sequence: Synthetic coding sequence
  source 1..1512: mol_type = other DNA
atgatgaccaccagcttgatctggggcatcgccattgccgcatgctgttgtctctggctcatacttggaatccggaggaggcagactggagagcctcccctcgaaaacggactgatcccctatttgggatgcgctctccaattcggcgccaaccctctcgagttcctgagagcaaaccaaaggaagcacggccatgtgttcacatgtaaactcatgggcaagtacgtgcactttatcaccaacccgctgtcatatcataaagtgctgtgccatgggaaatatttcgattggaagaagttccatttcgcaacatcagctaaagccttcggacacaggagcatagaccccatggacgggaacacaaccgagaacatcaacgatacatttatcaaaaccctgcaaggacatgcactgaacagtcttacagagtctatgatggaaaaccttcagaggatcatgcgtcccccagttagttctaactcgaagactgcggcatgggtaaccgagggcatgtacagcttttgctatagggtgatgtttgaagccggatacctgacaatcttcggcagggaccttacaagaagagacactcagaaggctcatattctcaacaacctggataacttcaaacagtttgacaaggtctttccggctttggttgccggactgcccatccacatgtttcgcaccgcgcacaacgcccgggagaagctggctgagtctctgcgccatgaaaacctacaaaaaagggaatcaatttccgaactcatttcactgcgaatgttccttaatgatacccttagtacttttgacgatctcgagaaggctaaaacccatctcgtggtattgtgggcttcccaggccaacacaatcccagctaccttctggagtctttttcagatgattcgaaacccggaggctatgaaggctgccacagaagaggtaaagcgcacactcgaaaacgctgggcagaaagtgtctctcgagggaaaccccatctgcctgtcacaggctgaactgaatgatctgcctgtcctggatagcatcatcaaggaaagcctgcgactgtctagcgcaagcctgaacatccgaacagctaaagaggacttcacactacacttggaggacggttcttacaacatcagaaaagatgacatcattgctctgtacccacagttgatgcatctcgacccagaaatctacccagatccactcacttttaaatacgatcgctacctggacgaaaacgggaagacaaagacaaccttctattgcaacggactcaaactgaagtattactacatgccgttcggcagtggagcaactatatgtcccggacgcctgtttgctattcacgaaatcaaacagtttcttatcctgatgttgagttacttcgaactggagctgatcgagggccaggctaaatgtcccccacttgatcaatccagggcaggcctcggaatacttcctcctctgaacgacatcgaatttaagtataagtttaaacatctg

SEQ ID NO: 249893 - DNA, 1512 bp, synthetic construct
  misc_feature 1..1512: note = Description of Artificial Sequence: Synthetic coding sequence
  source 1..1512: mol_type = other DNA
atgatgactacgtcccttatatggggaatcgccattgccgcttgttgctgtctgtggttgattctcggcatccgacggcgacagacgggtgagccgccgctcgaaaatggattaatcccataccttgggtgcgctctccagttcggcgctaatccattggagttcctccgagcaaaccaacggaagcatggacacgtgtttacatgtaaactcatgggaaaatacgtacattttataacaaacccactctcctatcataaggtactatgtcacggtaaatactttgactggaaaaaattccacttcgctacttcagccaaagcattcggacatcggtcaattgatcccatggatggaaatacaactgagaatatcaatgatacctttattaaaacccttcaaggacatgccctgaatagtcttacggaaagcatgatggagaatctgcaacgaattatgagaccaccagtctcaagtaacagcaaaacagcagcttgggttactgagggaatgtattccttttgttacagagtgatgtttgaagcaggataccttaccattttcggtagagatttgacgaggagagatacacaaaaggctcatatcttgaataatttggataactttaaacagttcgacaaggttttcccagccttggttgcaggcctaccaattcacatgtttaggacagctcataacgctagggagaaacttgcggaatcacttcggcatgaaaacttgcaaaagcgagaatctatctcggagttgatctcactcagaatgtttcttaatgatacactttcaacgtttgatgacctcgagaaggctaagacccatctggtcgtcctctgggctagtcaagctaataccatcccggcaacattttggtctctctttcagatgatccgtaatcccgaggcgatgaaagctgctacggaagaagtgaaacggaccctcgaaaacgccggacaaaaggtgtcccttgaaggaaatcccatttgcctttcacaagcagaacttaacgatctgccggtattggactcgattattaaggagtcattgagactttcttctgcatctcttaacattcgtacagccaaggaggatttcacactccacctcgaagacggaagttataacattcgtaaggatgacattatcgcactgtacccacaattgatgcatttagatccagagatttatccggatccgcttactttcaagtacgatagatatcttgacgagaatggaaaaacgaagactacattctattgcaatgggttgaagctcaaatattattatatgccatttggatccggagctactatatgcccaggacgactatttgccatacatgagattaagcagtttttgattttaatgctgtcgtatttcgaattagaactcatagagggacaagccaaatgtccgccactggatcaaagtagagcaggacttggaattttaccacctttgaatgatattgaatttaaatataaatttaagcatttg

SEQ ID NO: 249894 - DNA, 1512 bp, synthetic construct
  misc_feature 1..1512: note = Description of Artificial Sequence: Synthetic coding sequence
  source 1..1512: mol_type = other DNA
atgatgaccacctctttgatctggggtattgcgattgcagcttgctgttgcctgtggctcatcctcggcattcgacggcgccagaccggggagcctcctctggaaaatgggctgataccttatctggggtgtgctctgcaattcggggccaacccgcttgagttcctgcgggccaatcagagaaagcatggacatgtgttcacttgtaagcttatgggaaaatatgtccactttattacgaacccgctcagctaccacaaggtactttgccacggcaagtactttgactggaagaaatttcacttcgcaacttcagcaaaggctttcgggcatagaagcatagaccccatggatggaaataccaccgagaatatcaacgatacatttattaagactcttcaagggcatgcactgaatagcctgaccgaaagtatgatggaaaatttgcaaagaataatgagacccccagtctctagtaattcaaagaccgctgcatgggtgaccgagggcatgtactctttctgctatagggtcatgttcgaggccgggtacctgacgatttttggccgagacctgacacgaagagatacccaaaaggcacacattctgaacaatctggataactttaaacagtttgacaaggtttttccagccctcgttgccggactaccaatacacatgtttcggaccgctcataacgcccgggaaaagctggccgagagcctgcggcatgaaaatttgcagaagcgagagtcgattagtgaactaatctcattgcggatgttcctcaatgatactctctctaccttcgacgaccttgagaaggctaaaacacaccttgtggtgctgtgggcctctcaagccaatacgatacccgcaactttttggtctcttttccagatgatacgaaaccctgaggcaatgaaagctgctaccgaagaggtgaagcgaacgctagagaacgccggtcagaaagtgtcgctcgaagggaaccccatctgcctctctcaggccgagttgaacgatttgcctgtcctagacagtatcataaaggagtcgctaaggctctcctctgcttctctcaatatccggacagctaaggaggactttacactgcatctggaagacggttcatataacatccgaaaggacgatatcatcgccctatatccacaactgatgcatcttgatcccgagatctaccctgaccccctcacgtttaaatatgacaggtacctggacgaaaacggcaaaaccaagacgacattttactgtaatgggttaaaactgaagtactactatatgccttttggatctggcgcaaccatctgtccagggagattattcgcgatccacgaaataaaacagtttctgatcctgatgctgtcatacttcgagctggagctgatcgaagggcaggccaaatgcccccctctggaccagagccgtgcagggctgggcatactgccccctttgaacgacatcgagttcaagtacaaattcaaacacctg

SEQ ID NO: 249895 - DNA, 1512 bp, synthetic construct
  misc_feature 1..1512: note = Description of Artificial Sequence: Synthetic coding sequence
  source 1..1512: mol_type = other DNA
atgatgacgacctccctcatctggggtattgcgatcgccgcctgttgctgcctctggcttatactgggcattcggagacgacaaactggggagccacctctggagaatggcctgatcccatacctcggctgcgctctgcagtttggagccaaccctctcgagttcctgagggccaaccagagaaagcatggccacgtgttcacctgtaagctcatggggaaatacgtgcactttatcaccaaccctttgagctaccacaaagtcctctgccatggcaagtacttcgactggaagaagttccacttcgcaacgtcggcaaaggcttttggtcaccggtccattgatccgatggatgggaacaccaccgaaaacatcaatgacacctttatcaaaactctccaaggacacgccttgaacagcctcactgaatcaatgatggaaaatcttcaaaggatcatgcgcccccctgtgtcctcgaactcaaagaccgcagcttgggtgaccgaagggatgtactcgttctgctatagggtgatgttcgaggctggatacctgactatctttggacgcgaccttacccggcgcgacactcagaaggcacatatcttgaacaacctggacaatttcaagcagttcgataaagtatttccagctctggtcgccggactccctatccatatgtttcggactgcccacaacgccagagagaagttggccgaatcccttcgccatgagaatctgcagaagcgcgagtccatttcggaactgatctcgctgcggatgttcctgaacgataccttgtcgaccttcgacgacttggaaaaggcaaagacccacttggtggttctctgggcgagccaggcgaacacgatcccggccactttctggtccctgttccagatgatcaggaatcctgaagcaatgaaggcggccactgaagaagtcaagcgaacgctggagaacgccggacagaaagtcagcctggaaggtaaccctatctgcctgtcacaagcagaattgaacgatttgccagtcctggactcgattatcaaggaatcgctgcgcctgtctagtgcgtcactcaatatccggaccgccaaagaggatttcaccctgcaccttgaggacggaagttacaatatcagaaaggatgacataatagcgctgtatccccaactcatgcaccttgaccctgaaatctaccctgacccgctcacgttcaagtacgatagatacctggacgaaaatggaaaaaccaagactactttctactgtaacgggctgaaactgaagtactattacatgccgtttggaagcggggcgaccatctgccctgggagactgttcgctattcatgagattaaacagtttctcatcctgatgctgtcctacttcgagcttgagctgatcgagggacaggctaagtgcccgcccctggatcaatccagagccggcctcggcatcctcccaccattgaatgatatcgaattcaagtacaaattcaaacatctg

SEQ ID NO: 249896 - DNA, 1512 bp, synthetic construct
  misc_feature 1..1512: note = Description of Artificial Sequence: Synthetic coding sequence
  source 1..1512: mol_type = other DNA
atgatgactaccagcctcatctggggtattgccattgcggcgtgctgttgtttatggctcattctggggatccggaggagacaaactggtgagcccccgctcgaaaacggcctgatcccctaccttggatgtgccctgcagtttggagcaaacccccttgaatttctgcgggcgaatcaacggaagcatggccacgtgtttacctgtaaattgatgggcaaatatgtgcatttcataacgaatcccctgagctaccacaaagtactctgtcacggtaagtattttgattggaaaaagttccactttgccacctctgccaaggctttcggccacagatctatagatccaatggacggcaacacgaccgagaatatcaacgacacctttatcaaaacactccaggggcatgcgctgaactccctgacggaatccatgatggagaatttacaaagaatcatgcgccccccagtgtctagcaactctaagaccgctgcttgggtcaccgaggggatgtattccttttgttacagagtgatgtttgaggccggctatcttacaatcttcggacgtgatctgacaaggcgggatacccagaaggctcacatacttaacaacctggacaactttaaacagtttgacaaagttttcccggccttggtggcaggactccccattcatatgttccggactgcccataatgcccgcgaaaaactagcggagagtttgcgtcacgaaaacttgcagaagcgcgaatccatctctgaactcatctctctgcggatgtttctgaacgataccctgtccacattcgacgatttggagaaagctaagacccatttggtggtcctctgggcgagccaggcaaacacaattccagctactttttggagtctgttccaaatgatccggaaccccgaggccatgaaagctgcaacagaggaagtgaaaagaaccctggaaaacgcaggccaaaaggtgtccctggaaggtaacccaatatgcctgagccaagccgagctaaacgacctccctgttcttgactctatcatcaaggaatcactgcggctgtcctcagcatccctgaacattcgaaccgctaaagaggactttactctacatctggaggacggctcatacaacatccgcaaagatgacataattgctctgtatccccaactgatgcatttggatcccgagatctaccctgatcctctgacctttaagtatgacaggtacctagatgagaatggaaagaccaagactaccttctattgtaacggcttgaaactgaaatactattacatgccttttggaagtggtgccactatttgtcctggccggctatttgctatccatgaaattaagcagttcctaatactgatgctatcttacttcgagttggaactcattgaggggcaagcaaaatgccctcccttagaccaatccagagccgggttgggaattctgcctcctctcaacgacattgaattcaaatacaagttcaagcatctc

SEQ ID NO: 249897 - DNA, 1512 bp, synthetic construct
  misc_feature 1..1512: note = Description of Artificial Sequence: Synthetic coding sequence
  source 1..1512: mol_type = other DNA
atgatgacaacttctcttatatgggggatcgccattgccgcctgctgttgtctttggctcattttgggcatccgcagaagacagaccggggaacctcccctcgagaatggcctgatcccatatctgggctgtgctctgcaattcggcgccaaccctctggaattcctgcgagccaatcagcgaaagcacggacatgtgtttacctgcaagcttatgggcaagtatgttcactttataactaaccccctgagttaccacaaggtgctgtgccatggcaaatactttgattggaaaaagttccactttgccacttctgcaaaggcatttggacacagaagcatcgatcctatggacggcaatactaccgagaacatcaatgatacatttatcaagactttgcagggtcacgcacttaactcattgacggaaagcatgatggaaaatctccaacggattatgcgaccgccggtctcctcaaactcaaagaccgcagcatgggtgacagaaggaatgtactccttctgctatcgggtgatgttcgaagcagggtacctcacgatttttggcagggatctcacgaggagagacactcagaaagcccatattttgaacaatcttgataacttcaaacagtttgataaagtttttcctgcattggtagcaggccttcccatacatatgttcagaacagcccacaacgctcgagaaaaattggctgaatctctgagacatgagaatctgcaaaagcgcgagtccatctccgagcttatatctctgagaatgtttctcaacgacacactgtccacctttgatgatctggagaaagccaaaacccatctggtcgtcctttgggcctcccaggctaacactattccagccacattttggtcattgttccagatgatccggaatccagaagctatgaaggccgcaacagaagaggtgaagcgcacgctcgagaacgccggccagaaggtgtccctggaaggcaaccccatttgcctgtcacaagctgagctcaacgacctgcctgtgttggatagtattataaaggagtccctgcgcctgagctctgccagtctgaatatccggactgccaaggaagatttcaccctgcacctggaggacggcagttataatattcgaaaagacgatatcatcgcgttgtacccccagctcatgcacttggatccagaaatttacccggacccccttacattcaagtacgatagatatctcgacgaaaacggtaaaacaaagaccaccttctattgcaatggcctgaagctgaagtactactacatgccttttggaagcggtgctactatttgtccaggtagactgtttgccatccacgaaattaagcagttcttgatcttgatgctgagctatttcgagctcgagctcattgaagggcaggcaaagtgtcctcccctggaccagtctagggctggacttggtatcctgccgcctttgaacgatatcgaattcaaatacaagttcaagcatctt

SEQ ID NO: 249898 - DNA, 1512 bp, synthetic construct
  misc_feature 1..1512: note = Description of Artificial Sequence: Synthetic coding sequence
  source 1..1512: mol_type = other DNA
atgatgacaacatctttgatttggggcattgccatcgcagcctgttgctgcctgtggctcattctggggatcaggagaaggcagacaggagagccacccctagagaatggtctgattccctatctgggctgcgcgctgcagtttggagcaaatcctctagagttcctgcgcgccaaccagaggaagcacggacatgtatttacctgtaaactgatgggaaagtatgtgcactttatcacgaacccgctcagttatcataaggtattatgccatggaaagtatttcgattggaagaaattccactttgctacgtcagctaaggcattcggacacagaagtatcgaccctatggatggtaatactaccgagaacatcaacgatacatttattaagaccctgcagggacatgccctgaacagtctgacagagagtatgatggagaacttgcagcgaattatgcgaccacctgtgtctagcaactctaagaccgctgcttgggtgactgagggcatgtattcattctgctaccgagtcatgttcgaagcaggataccttactatattcggtagagacctgacacgacgcgatacccagaaagcgcatatattgaacaatctcgataacttcaagcaatttgacaaggtcttcccagccttggttgcaggactgccgattcacatgttcagaacggcacacaatgccagagagaagttggcagaaagtctgagacatgagaacctacaaaaaagagagagcatatctgagctaatctctctgcgtatgtttctgaatgatacacttagcacatttgatgacttggagaaagccaaaacccatcttgtcgtgctgtgggcgtcgcaggcaaacaccatccccgccaccttctggtcgctgtttcaaatgattaggaatccggaggccatgaaggccgcgaccgaagaagttaagcggactctggaaaatgcgggtcagaaagtcagcctcgaaggtaatcccatctgcttaagccaggcagagcttaatgacttgcctgtcttggactccattattaaagagagtctacgactcagctcagccagccttaatattagaacagccaaggaggacttcaccctccatctggaggatggaagttataacatcagaaaggacgatatcatcgcattgtacccgcagctgatgcacctggatcctgagatctaccccgatcccctgaccttcaaatatgaccgctaccttgacgaaaatggcaaaacaaagaccactttctactgcaacggactgaagctgaaatactactacatgccattcggaagtggagccacgatatgccccggtaggttattcgcaattcacgaaatcaagcagtttttgattctgatgttgagttattttgagttggagttgatcgaaggccaggctaagtgtccacccctagaccagtcgagggcgggtctcgggatactgcctccactcaatgacatagaattcaagtataaatttaaacatctg

SEQ ID NO: 249899 - DNA, 1512 bp, synthetic construct
  misc_feature 1..1512: note = Description of Artificial Sequence: Synthetic coding sequence
  source 1..1512: mol_type = other DNA
atgatgaccacctccctgatttggggcattgcgattgccgcgtgctgttgcctttggcttatccttggtatccgtcgaaggcaaaccggggaaccgccccttgaaaatggacttatcccatacctgggttgtgctcttcagtttggtgcaaacccccttgaatttcttcgagcaaatcaaagaaagcacggtcacgttttcacttgtaaactgatgggcaagtacgtgcatttcattacgaaccccctttcctaccataaagtgctttgccatggaaagtactttgactggaagaagtttcattttgctacttccgccaaggcattcggacaccgatctattgaccctatggatggcaatacgaccgaaaacataaacgacacttttatcaaaactctgcaaggccatgcactgaattcgctgaccgagagcatgatggaaaatctccaacgtatcatgcgaccacccgtgtcctctaacagcaagaccgctgcatgggtgaccgaaggaatgtattccttttgttacagagtgatgtttgaagccggttacttgacgatctttgggagagatctgacccgacgcgatactcaaaaggcgcatattctgaacaatcttgacaatttcaagcaatttgataaggtgtttccagctttggtggccggcttgccaatccatatgttcaggaccgcgcacaacgcacgggaaaaacttgccgagtcgttgcgccacgaaaacttgcagaagcgggaaagcatatccgagcttatctcgttgagaatgtttcttaacgatactctgtcgacttttgatgatctggagaaggcaaagacccatctggtggtgctgtgggcctcgcaagcaaatactataccggcaaccttctggagcctttttcagatgatccgaaatcctgaagccatgaaagccgcaactgaagaagtcaaaagaactttggaaaacgcgggccaaaaggtgtccctcgaaggaaatcccatatgtctttcgcaggctgagctgaatgaccttcctgtgcttgactcaattatcaaggaaagccttcggctttcctcagcaagcctgaacatccgcaccgcaaaggaggattttacccttcacctcgaagatggatcatacaacatcaggaaggacgatatcattgcgctgtaccctcagctgatgcatctcgatccagagatatatcctgatcccctcacttttaagtacgaccgttatcttgacgagaatggcaagaccaagaccacgttttactgtaatggactgaagttgaagtactactatatgccattcggatcgggtgcaaccatttgtccaggtagactctttgccatacacgagatcaaacaattccttattctgatgcttagctactttgagctcgaattgatcgaaggtcaggctaaatgccctccgctcgatcaatcaagagccggcctcggtatcctgccaccactgaacgatatcgaattcaagtacaaattcaagcacctc

SEQ ID NO: 249900 - DNA, 1512 bp, synthetic construct
  misc_feature 1..1512: note = Description of Artificial Sequence: Synthetic coding sequence
  source 1..1512: mol_type = other DNA
atgatgactaccagtctaatctggggaatcgccattgctgcgtgctgctgtctgtggctcatactgggaatacgcagacgccaaaccggggaacctcctctagaaaatggcctgatcccctatctcggttgcgccctgcagtttggagccaatcccctcgagtttctgagggccaaccaaagaaagcatggacatgtctttacttgtaaactgatggggaagtatgtgcactttatcaccaaccccctgtcctaccacaaagttctgtgtcatggtaagtacttcgactggaagaaatttcattttgcgacctcagctaaagccttcgggcatagaagcatcgatcctatggatgggaacactacagaaaatattaacgacacattcatcaaaactctccagggccacgctctcaactctttgacagagtccatgatggagaacctccagcggataatgcgtcctccggtcagttcaaacagtaagacggctgcatgggtgacggagggtatgtactccttctgctatcgagtcatgttcgaagctggatacttgacaattttcggtcgagacctgactcgaagggacactcagaaagctcacattctcaacaacctcgataacttcaaacagtttgacaaagttttccctgccctggtagctggattacctattcacatgttccgaaccgcgcataatgcccgagaaaagctggcagaatcactacgacatgagaatctacagaaacgagaatctatatctgagctgattagcctgcgaatgttccttaatgataccctgtccacattcgatgacttggagaaagccaagacccatctggtcgtcctatgggcttcccaggcaaatacgattcccgcgaccttttggtctctgtttcagatgatacgaaatccagaggcaatgaaagcagcgaccgaagaagtcaagaggaccctggagaacgcaggtcagaaagtcagccttgaaggcaacccaatttgcctcagccaggctgagctcaacgatctgccagtgttggacagtatcattaaggagtctttgaggttgagctccgcctcgctcaatatcaggacggctaaggaagattttacgctccatctcgaagacggaagctacaatatcaggaaggacgacataatcgctctgtacccccaactgatgcacctggatcccgagatatatccagatccattgacttttaagtacgataggtatttggatgaaaatggtaaaaccaagaccaccttctactgcaatgggctgaagctgaagtactactacatgccattcggcagtggcgccaccatctgtcccggaagactgtttgccatccatgaaatcaagcagttccttatcctgatgctgtcctacttcgaactggagttaattgagggtcaggccaagtgtcctcccctcgatcagtcccgagctgggttgggcatcctcccccccttaaacgatatagagtttaagtacaagttcaaacacctc

SEQ ID NO: 249901 - DNA, 1512 bp, synthetic construct
  misc_feature 1..1512: note = Description of Artificial Sequence: Synthetic coding sequence
  source 1..1512: mol_type = other DNA
atgatgacaaccagcctgatctgggggatcgcgatagccgcatgttgctgcttgtggctgattctgggtattcggcgccgacagactggtgagccaccactggaaaatgggctcatcccgtatttaggctgtgccctgcagttcggcgctaaccctctggagttcttaagagcaaatcagagaaaacacggccatgtgtttacttgcaagctgatgggtaagtatgtccattttatcaccaacccgttatcttaccacaaggttctctgccatggtaagtatttcgattggaagaagtttcatttcgctacatctgccaaagcgttcggccatcggagcattgatccaatggacggtaatactacagagaacataaatgatactttcatcaaaacactccaagggcacgcccttaactctttaacggaaagcatgatggaaaacttgcagcgaatcatgcgtcctcctgtcagcagtaattctaaaaccgcggcttgggtgacagagggaatgtactctttctgctatcgggtgatgttcgaggccggttatcttaccattttcggtcgtgacctgacaaggagagacacccagaaggcccatatcctcaataatctggataactttaagcagtttgataaagtatttcctgcactggtggccggcttgcctatccacatgtttagaaccgctcacaacgcacgcgagaaacttgccgaatcactcaggcacgagaacttacagaagcgcgaatcgatcagtgagctcatctccttgaggatgtttctgaacgacaccctgagcacattcgacgatctggagaaagccaagactcatctggtggtactgtgggcttcgcaggctaatacaattcccgccacgttttggtccctgtttcagatgattcgaaaccctgaagctatgaaagccgcgacagaggaagtgaagaggacactagaaaacgctggtcagaaggtgtcgctcgaggggaacccaatctgcctctcacaggcagagttaaatgacctcccagttctggatagtatcatcaaggagagtttgagactgtcttctgcttctctaaatatccggacggctaaagaggacttcacgcttcacttagaggatggttcgtacaatattcgtaaagatgatatcatcgcactttatccccaacttatgcacctggacccagagatctatcctgatcctcttacattcaagtatgaccgctaccttgacgagaatgggaagaccaaaacgactttttactgtaacggtctgaaactgaaatactattacatgccctttggctcaggtgcgacaatatgccccggcaggttgttcgccatccatgagatcaaacaattccttattctgatgctgtcctatttcgagctggagttgattgaaggtcaggctaaatgcccgcctctggaccagagcagagcaggattaggtatactccctccattgaacgacatagaattcaagtataaatttaaacatctg

SEQ ID NO: 249902 - DNA, 1512 bp, synthetic construct
  misc_feature 1..1512: note = Description of Artificial Sequence: Synthetic coding sequence
  source 1..1512: mol_type = other DNA
atgatgaccacttctctcatctgggggatcgcaatcgccgcttgttgctgcttgtggctcattctgggaatccgccgacgccagaccggcgagccgccgcttgagaatggtctgatcccatacctgggctgcgctcttcagttcggagcaaacccgctggagttcctgcgcgcgaaccaaagaaagcatggtcacgtgttcacttgcaaactcatgggaaagtacgtgcacttcatcactaacccgctctcgtaccacaaggtgctctgtcatggaaagtacttcgattggaagaagttccacttcgctacgtctgccaaagcgttcggacatcgcagcatcgacccgatggacggaaatactaccgagaacattaacgacactttcatcaagaccctgcaaggacatgctctgaactcgctgaccgaatctatgatggaaaacttgcagcggatcatgcggccgcccgtttcgtcgaattcaaaaaccgccgcgtgggtgaccgagggaatgtattcgttctgctaccgggtcatgttcgaagctggatacctgactatcttcggacgtgacctgacccgcagagatacccagaaggcccacatcctgaacaatcttgacaacttcaagcagttcgataaggtgttcccagccctcgtggctggcctgccaattcacatgtttcggaccgcacataatgctcgcgagaagctggccgagagcctgagacatgaaaaccttcagaagagggaaagcatctccgaactgatcagcctgcggatgttcctgaacgacacgctgagtacctttgatgacctggaaaaggcaaaaacccatttggtcgtgctgtgggcatcccaggccaacaccatcccggctaccttctggtccctcttccaaatgattaggaatccagaagcgatgaaggcagccactgaagaggtgaaaagaaccctggaaaacgcaggacaaaaggtgagcttggaagggaatcccatctgcttgagccaggcagaactgaatgatctccctgtgctcgactccatcattaaagagtccctgagacttagctcagcgagcctgaatatcaggacggctaaggaggatttcacgttgcaccttgaagacggcagctacaacatccgaaaggacgacatcattgcactgtacccacagctcatgcacctggatcctgaaatctacccagacccactgaccttcaaatacgaccgctacctggacgagaacggcaaaaccaagaccaccttctactgcaatggactcaagctcaagtattactacatgccattcggatccggtgcgaccatctgccccggtagacttttcgctattcatgagatcaagcagttcctgatcctcatgctgtcgtacttcgaactcgagctcatcgagggacaggccaaatgcccacctctcgaccagtcacgggccggcctgggtatcctgcccccgctcaatgatatcgagtttaagtacaagtttaagcatctg

SEQ ID NO: 249903 - DNA, 1512 bp, synthetic construct
  misc_feature 1..1512: note = Description of Artificial Sequence: Synthetic coding sequence
  source 1..1512: mol_type = other DNA
atgatgacaacatcactgatctggggcatcgcaatcgctgcctgctgttgcctctggttgatacttggtatccgccggcgccaaactggggagccacccctagagaatggattgatcccttacctgggctgcgctttgcaatttggggctaaccccttggagttcttgagagcaaaccagagaaagcacgggcacgtgttcacatgcaagctgatgggcaaatatgttcatttcataaccaatcctctttcctaccacaaggtgctgtgtcatgggaagtattttgattggaagaagttccatttcgccactagtgccaaggcctttggccataggtccatcgatcccatggacgggaataccacagagaacattaatgacacctttatcaaaacactgcaagggcacgccctgaatagcctgaccgaaagcatgatggagaacctccagagaattatgcggccccccgtgtcttccaattctaaaacagctgcatgggtgaccgaaggaatgtactctttctgttacagggtaatgtttgaggccggctacctaactatcttcggacgggacctgacccgcagagacacccagaaagcccacatccttaataacctggataactttaaacagttcgacaaggtgttccctgcactcgtggcgggcctgcctattcacatgtttcgcaccgctcataacgcccgcgagaaattggccgagtctctcagacatgaaaacctgcaaaagcgcgagtcaatatctgaacttatcagcctgcggatgttcctgaacgataccctgagcacctttgatgacttagagaaggccaagacacacctggttgtgttgtgggctagccaggctaacacgattccggccaccttttggtcactgttccaaatgatccgcaatcctgaggctatgaaggcggccacagaggaggtgaagcgaacgctggagaatgctggccagaaagtttcgctggaagggaatcctatttgcctgtcccaggctgagctgaatgacctcccagtcctggactcaattatcaaggagtccctacgactgtcatccgcatcactaaatatccggaccgctaaagaggatttcactctgcacctggaagatggctcctacaacattcggaaagacgatataattgccttatatcctcagctgatgcatttggaccctgaaatctatccagatccactgacctttaagtacgaccgttaccttgacgaaaatggaaagactaagaccacattttactgtaacgggttgaagctgaagtactactacatgcctttcgggagcggcgcgacaatctgtcctggacgtctgttcgccatacacgaaataaagcaattcctgattctgatgttgagctacttcgagttggagctgatcgaaggccaggccaagtgtcctcccctggatcagtccagagcagggctcggcattcttccacctttgaatgacattgaattcaaatataaattcaagcatctg

SEQ ID NO: 249904 - DNA, 1512 bp, synthetic construct
  misc_feature 1..1512: note = Description of Artificial Sequence: Synthetic coding sequence
  source 1..1512: mol_type = other DNA
atgatgaccacttcgcttatttggggaattgcgattgccgcatgttgctgcctgtggctgatcttaggaattaggcgccggcagacgggtgagccccccctggaaaatggcctcatcccatacctgggatgcgcacttcagtttggtgcgaatccgcttgagttcctccgggcaaatcagcgtaaacatgggcatgtgttcacctgcaagctgatgggtaaatacgtgcactttattactaaccccctctcataccacaaggtgctctgccacggcaagtatttcgattggaaaaaattccacttcgctacctcagcaaaagcctttgggcatcgctccatcgaccctatggatggcaatactactgagaacatcaatgacaccttcataaagaccctccagggccacgccctgaactccttgaccgaatcgatgatggagaacctgcagcgcatcatgcgtccccctgtctccagcaattctaagactgccgcctgggtgaccgaaggaatgtacagtttttgctatcgagtgatgtttgaggcaggctacttgaccattttcggccgcgacctgacccggagggacacacaaaaggcccacatcctgaacaaccttgacaatttcaagcagttcgacaaagtgttcccagctcttgtggccggtctcccaatccacatgtttcgaacagcccacaacgcgagggaaaaactcgccgaatccttacggcatgagaatcttcagaaaagagagagcatttcagaactaatttcattgaggatgttcctgaacgatacgctctccacctttgacgacttggaaaaagcaaaaacccatctcgtggtgctttgggcatcacaagccaataccattcctgccaccttctggtctctgttccagatgatcagaaatcccgaggctatgaaggctgccacggaggaggtaaagcgcactttggaaaacgccggacagaaagtgtcactcgaagggaaccccatttgtctgagccaagcggagcttaacgacttgcctgttctggattccattatcaaagaaagtttgcggctttccagcgcgagcttaaacatcagaaccgcgaaggaggatttcactctgcatctggaagatggcagttacaacatccggaaagacgacataattgcattgtacccccagttgatgcacctggatcccgagatctaccctgatcccctcacattcaagtacgaccgctacctcgacgaaaatggcaaaaccaaaaccaccttttattgcaatggcctgaagctgaagtactactacatgccgttcgggagcggcgcaacgatatgcccaggcagactttttgccattcacgaaatcaagcaattccttattctgatgctgagctacttcgaattggaactcatcgagggccaagcgaaatgcccgccgctagaccagagccgcgctgggctcggaatcctccctccgttgaacgacattgaatttaagtataagttcaagcacctt

SEQ ID NO: 249905 - DNA, 1512 bp, synthetic construct
  misc_feature 1..1512: note = Description of Artificial Sequence: Synthetic coding sequence
  source 1..1512: mol_type = other DNA
atgatgaccacgtcactcatttggggaatcgctatcgcggcatgctgttgtctgtggctcatcctgggaattcgcaggcggcaaaccggcgagccgcccctcgagaatgggctgatcccttacctcggatgcgccctccaattcggagcaaaccctctcgagttcctcagagctaaccagagaaagcacggccatgtgttcacctgcaaacttatgggaaaatacgttcatttcatcacgaatccactctcataccacaaggtcctgtgccacggaaaatactttgactggaagaagttccatttcgctacctcggctaaggcattcggacacagatccatcgacccgatggacgggaatactaccgaaaacatcaatgacaccttcatcaagaccctgcagggacacgccctgaacagcctgacggagtcaatgatggaaaacctccagcggatcatgcgcccgccggtgtcgtccaattcaaagaccgccgcctgggtgaccgaggggatgtactccttctgttaccgggtgatgttcgaagccggttatctgactatcttcggaagggacctgactaggagagacactcaaaaagctcatatccttaacaacctcgataactttaagcagttcgataaggttttcccggcactcgtggcgggactgccgatccatatgttccggaccgcccacaacgcaagggaaaagctggcggaatccttgagacacgagaatctccagaagcgggagtcaatctcggagctgatctccctgcgcatgttcctgaatgacacgctgagcaccttcgatgacctggagaaagccaagacccacctcgtggtgctgtgggcgtcgcaagctaataccattccggctaccttctggagcctgttccagatgatcaggaacccggaagcgatgaaggccgccactgaagaagtcaaacgcactctggagaatgctggacaaaaggtgtcactcgaaggcaacccgatctgcctctcccaggcagaacttaatgatctcccggtgcttgactcgattatcaaagaaagcctgagactttcgtcagccagtttgaacatcagaaccgccaaggaggactttactcttcatttggaggacggatcttacaacattcgaaaggacgacattatcgccctgtaccctcagcttatgcatctcgacccggaaatctacccggacccgttgaccttcaaatatgatcggtacttggatgaaaatggtaagactaagacgacgttctactgcaatgggctgaagctgaagtactactacatgcctttcggctccggcgccactatctgcccaggccggctgtttgccattcatgaaatcaaacagttcctgatcttgatgctgtcgtacttcgagctcgagctgattgaggggcaggctaaatgtccgccgctcgaccagtcaagagctggactggggatcctcccaccactcaatgatatcgagttcaagtataagtttaaacatctc

SEQ ID NO: 249906 - DNA, 1512 bp, synthetic construct
  misc_feature 1..1512: note = Description of Artificial Sequence: Synthetic coding sequence
  source 1..1512: mol_type = other DNA
atgatgaccacctctcttatttggggcatcgcaattgcagcctgttgttgcctctggctgatcctgggtataaggcgaagacagaccggagaaccacctctcgaaaatggccttatcccctacctgggctgcgccctgcagtttggcgctaatcctcttgaatttctgcgagctaaccaaaggaagcacggacacgtgtttacttgcaagctgatgggcaagtatgtgcacttcatcaccaacccactaagctaccacaaagtcctgtgccacggaaagtactttgactggaaaaagtttcacttcgccacgtcagcgaaggctttcggtcaccggagcatcgacccaatggacggcaataccacagaaaacatcaatgataccttcatcaagacccttcagggccatgccttaaactcgttgacggagtccatgatggagaacctgcagcggatcatgaggcccccagtcagctctaactcgaaaacagcagcctgggtcaccgagggcatgtatagcttttgttatcgagtcatgtttgaagctggatatttaacgatcttcgggagagatctgacacgcagggatactcagaaagcccacatcctcaacaacctggataacttcaagcagttcgacaaggtgtttccagccctcgtcgccgggctacccatccatatgtttagaacagcccataacgctcgagagaagctcgcggaaagcctgagacacgagaatctgcagaagcgcgagagcatatccgaactcattagcctaagaatgttccttaacgatactctgagtacctttgatgatctcgagaaagctaagactcacctcgtggtgctgtgggcctctcaggcaaataccatccccgctacattttggtcactcttccagatgataaggaacccagaggcaatgaaggctgcgaccgaagaggtgaagagaacactggagaatgccggccagaaagtgtccctggaggggaacccaatttgtctgtcacaggcagaactgaatgacttacccgtgcttgactctatcatcaaagaatccctgcggctgtcctcggcctcactcaatatcaggacagcaaaagaggatttcacactccacttggaggacggcagctataacatccgaaaagatgatatcatcgcactgtacccacagctgatgcatcttgatcccgaaatctacccggatccactcacctttaaatatgaccgatacctggatgaaaatggaaaaacgaagactaccttctattgcaatgggttgaaactgaagtattactatatgccctttggcagtggagcaaccatttgcccagggcgcctctttgctatacacgagattaagcagtttcttatcttaatgctgagctatttcgaactcgagctgatcgaaggccaggccaaatgcccacccttagaccagtcccgcgctggattggggatcctgccccccctgaatgacattgagtttaagtacaagtttaaacatctg

SEQ ID NO: 249907 - DNA, 1512 bp, synthetic construct
  misc_feature 1..1512: note = Description of Artificial Sequence: Synthetic coding sequence
  source 1..1512: mol_type = other DNA
atgatgactacgtctttaatttggggtatcgccatcgctgcctgctgttgcttgtggcttattctgggaataaggcgtcggcagactggggagcctccattggaaaatggattgattccatacttaggatgcgcgctgcaatttggtgccaaccctctggaatttctgcgcgccaatcagagaaagcatggacacgtttttacgtgtaagctgatggggaaatatgtgcactttatcacgaatccactatcttaccacaaggtgctatgtcatggcaagtattttgactggaaaaagtttcacttcgcaacctctgccaaggcttttggccaccgaagcatcgaccccatggacggcaatacaacagagaatatcaacgacacttttattaagaccctccaaggacacgctctgaactccttgacggagtccatgatggaaaacttgcaacgcatcatgcggcctccagtttcttctaactccaagaccgcagcctgggtcaccgagggcatgtactccttttgttatcgagttatgtttgaggccggatacctgacaattttcggcagggatttaacacggagggacacacagaaagcacacatcctgaacaatctggataacttcaagcagttcgacaaggtgtttccagcgctggtggccggactgcccatccatatgtttcgcaccgcgcataatgcacgggagaaactagccgaaagcctgaggcacgagaacctgcagaaaagggaatcaatctcggaacttatctccctgaggatgttcctgaatgacacccttagcacgttcgacgatctggagaaggccaagacccacctggtggtactgtgggcaagccaggccaatacaatccctgctacattttggagcctgtttcaaatgatcagaaaccctgaagcgatgaaagctgctaccgaggaggtgaaacggaccctcgaaaacgcgggccagaaagtgtctctggaaggtaacccaatctgcctctcgcaagccgagttaaacgacctcccagtactggactcgataattaaggaatcgcttcgcttaagttccgcgtctctgaacatcaggacagcaaaagaggatttcacgcttcacttggaagacgggtcgtataatatacggaaggacgatatcatcgcgctgtacccacagttaatgcatttagaccccgagatatacccagatcctctaaccttcaagtacgaccgctatttggacgagaacggtaaaactaagacgactttttactgtaacggcctgaagctgaagtactattacatgccattcggatctggtgcaacaatctgtcccgggagattatttgcaatccacgagataaagcaatttcttattctgatgctcagttactttgaactggaactgatcgagggccaggctaagtgtcccccactagatcaatcaagggccggacttggtattttgcctccattgaacgacattgaattcaagtataaatttaagcacctg

SEQ ID NO: 249908 - DNA, 1512 bp, synthetic construct
  misc_feature 1..1512: note = Description of Artificial Sequence: Synthetic coding sequence
  source 1..1512: mol_type = other DNA
atgatgactacctcgcttatctgggggatcgctatcgccgcctgctgctgcttgtggctgatccttggaatccggcgccggcagaccggggagcctccgcttgagaacggactcatcccgtacttgggatgcgcgctccagttcggagcgaacccgcttgagtttctgcgggccaaccagcgaaagcatggacacgtattcacctgtaagctgatgggtaagtacgtgcacttcatcactaacccgctgtcctaccacaaggtgctctgtcacggaaagtacttcgactggaaaaagtttcattttgctacttcggctaaggcgtttggtcaccgttccatcgacccaatggacggaaacactactgagaatatcaatgataccttcatcaaaaccctccagggacatgccctgaactctctgaccgagtccatgatggaaaacttgcaaagaatcatgcgcccgcccgtgtcgtcgaattccaagaccgcagcgtgggttaccgagggaatgtactcgttctgctaccgggtgatgtttgaagcgggctaccttacgatcttcggcagagatctgaccaggcgggacactcaaaaggcccacatcctcaacaatttggacaacttcaagcagttcgacaaggtgttcccagcactggtggccggcctgccaatccacatgttcagaacggcacacaacgcgcgggagaaactcgcggaatcgttgcgccacgaaaatctccagaagcgggaatcgatctccgagctgatcagcctgcgaatgttcctgaatgacaccttgagcacctttgatgacctcgaaaaggccaaaactcatctggtcgtgctttgggcatcgcaggccaacaccattccagccaccttttggagcttgtttcagatgatcagaaatccggaggctatgaaggccgctactgaagaggtgaaacgcactttggagaatgcaggacaaaaagtgtccctggaaggcaacccaatttgcctctcgcaggccgaactgaacgatctgccagtgctcgatagcatcatcaaagaatcacttaggctgagctcggcgtcgctcaacatccgcaccgcaaaggaagattttaccttgcacctggaggacgggtcatacaatattcgcaaggacgacatcatcgccctgtatccacagctcatgcatctggaccctgagatttacccagatccattgaccttcaagtacgaccggtacctggatgaaaacggaaagaccaagacgaccttctactgcaatggcctcaagctgaagtactactacatgccgttcggatcaggcgcgactatctgtccaggaaggctcttcgccatccatgagatcaagcagttcctcatcctcatgctttcgtacttcgaactcgaactgatcgagggccaggccaagtgcccgccgctggaccaatcaagagcaggcctcgggatcctgcctccgctgaatgatatcgagttcaagtacaagttcaaacatctg

SEQ ID NO: 249909 - DNA, 1512 bp, synthetic construct
  misc_feature 1..1512: note = Description of Artificial Sequence: Synthetic coding sequence
  source 1..1512: mol_type = other DNA
atgatgacaaccagtctcatttggggtatcgccattgcagcgtgttgttgtctatggctgatactgggaatacggagacgtcagaccggcgagccgccgctggagaacggcctgataccctatttaggatgcgccctgcaatttggtgctaatccgctagaatttctgcgcgccaaccagcgcaagcatggacacgtgtttacctgcaagctaatgggaaagtatgttcacttcatcaccaatccactgagctaccacaaagttctgtgccatggcaagtacttcgattggaagaaattccatttcgctacttccgctaaggccttcgggcatcgcagcatagatccgatggatggcaataccaccgagaacatcaacgatacgttcatcaagaccctgcagggtcatgcccttaacagtctgactgagtcgatgatggaaaacttgcagcgcataatgagaccgcccgtgtccagtaacagtaagaccgccgcttgggttacggaaggcatgtacagtttctgttaccgcgtcatgttcgaggcgggatatctgacgatattcggaagggatcttaccaggcgagatacgcagaaggctcacatactaaacaatctggacaatttcaagcaattcgataaggtgtttccggccctcgttgctggcctgccaatccacatgttccgcaccgcccataatgccagagagaagctggcagagtcccttcgacatgagaatttgcaaaagcgagaatccatttcggagctgatttcgctacgaatgttcttgaacgatacgttgagtactttcgacgatttggaaaaagccaagacgcacttggtcgtcctgtgggctagccaggcgaacacaatccccgcaactttctggagtctcttccagatgatcaggaacccggaagccatgaaggccgccaccgaggaggtgaaacgaactttggagaatgccggtcagaaggtctcccttgagggaaatccaatatgtctgtcgcaagccgagctcaacgacttgcccgttctggattctattatcaaagagtctttacgtttgagcagcgcgtccctgaacattcggacggccaaagaggactttaccttacacttggaggatggctcctataacattcgaaaagacgatataattgcgctgtacccacagctgatgcatctcgacccggaaatatatcccgatccacttactttcaaatacgacagatatctggatgaaaatggaaagaccaaaacgacattctattgtaacggcctcaagctgaagtactactatatgccgttcggcagcggcgctaccatctgccccggtcgattgtttgcaattcatgagataaaacaattcctcatcctgatgctgtcgtactttgagttagagctgatagaggggcaagccaagtgcccccccctcgatcagtcaagagctggcctcggaattctaccgccgctgaacgatattgagttcaaatacaagttcaagcatctg

SEQ ID NO: 249910 - DNA, 1512 bp, synthetic construct
  misc_feature 1..1512: note = Description of Artificial Sequence: Synthetic coding sequence
  source 1..1512: mol_type = other DNA
atgatgacgacatcactgatatggggcattgccattgccgcttgctgttgcctttggttgatactgggcatcaggaggagacagaccggcgaacctcctctagagaacggtctcatcccctatctcggctgcgctctccagtttggcgctaatcctctggagttcctccgcgccaaccaacggaagcacggccatgtttttacctgcaagctgatggggaagtacgtacatttcattaccaatccccttagctaccacaaggtgctttgtcatgggaagtacttcgattggaagaagttccacttcgcaacctccgcgaaggcatttgggcacagatccattgacccaatggatgggaacaccaccgagaatatcaatgacacatttattaaaactctgcagggccatgctctgaacagcctgaccgagagcatgatggagaacctccagagaatcatgcgcccccccgtgtcttctaattctaagacagccgcctgggttaccgaaggcatgtactcgttttgctaccgggtgatgtttgaagcaggatatctgactatctttgggcgagacttgaccagaagggatacacagaaggcacacattctgaataatttagacaatttcaagcagtttgataaggtatttcctgccctcgtggctggtctgccaatccatatgtttcgcaccgctcataacgccagagaaaagttggctgagtctctccgccacgagaatctgcagaagcgtgagtcaatatcagaactgatatctttgcggatgttcctgaacgatacattgtctactttcgacgatttggagaaagcgaaaacgcacctggttgtactgtgggcttcccaggccaatacaatcccagcaacattttggtctcttttccagatgatccggaaccctgaggccatgaaggctgctaccgaagaggtgaagaggaccctggagaatgcgggtcagaaagtgtccctggaagggaaccccatttgtttaagccaggcagagttgaacgacctgcccgttctggattctatcataaaagaatctctgcgtctgagctcagcgagcctgaatatccgcacagccaaagaagattttaccctgcatctcgaggatgggagctacaatataagaaaggatgatatcattgcgctgtatcctcaacttatgcatctggatcctgagatataccctgacccactaacttttaaatatgatcggtatctcgacgagaacggcaaaacaaagactactttctattgtaacggcctaaaattaaagtactactatatgcctttcggatcgggcgccactatctgtcctggaagactgttcgccatccatgaaatcaagcagtttctgatactaatgttatcctacttcgagttagagctgattgagggccaggccaagtgccccccgctggatcagtcgagagccggtctgggaatattgccccctctgaacgacatagaattcaaatacaaattcaagcacctc

SEQ ID NO: 249911 - DNA, 1512 bp, synthetic construct
  misc_feature 1..1512: note = Description of Artificial Sequence: Synthetic coding sequence
  source 1..1512: mol_type = other DNA
atgatgactacctcgctgatctggggtatcgcaatagctgcatgttgttgcctatggctcattctcggcataaggagaaggcagaccggcgaaccaccactcgaaaatggtttaattccttatctgggttgtgctctccagtttggcgccaatcctttggagtttctgagggcgaatcagaggaagcatggccacgtgttcacttgcaagcttatggggaagtacgtgcacttcatcaccaacccgctctcctatcataaagtgctgtgccacggcaaatatttcgattggaaaaagtttcattttgcaactagcgcaaaggcctttggccaccgtagcatcgatccgatggacggtaacacaacagagaatattaacgatactttcatcaaaacgctgcaaggccacgcacttaacagtcttaccgaatcaatgatggaaaacctccagaggattatgcggccacctgtgagctcgaatagcaaaactgcagcatgggtcactgaggggatgtattctttttgctaccgagtcatgtttgaggcaggctacctcacaatctttgggcgcgacctcaccaggcgagacacacagaaagctcacatccttaataatctggacaatttcaagcagttcgacaaggtgtttccagccttagttgcagggctgcctattcatatgttccgtactgctcacaacgcccgcgagaagctcgctgaaagcttacgacacgaaaatctgcagaagagggagagtatctcagagcttatttctcttagaatgttcctgaacgacaccctgagcactttcgacgaccttgaaaaggccaagacgcatctggtagttctttgggcttcccaggccaatacgatccccgccacgttttggagcctttttcagatgatacgaaaccctgaggcaatgaaggcagctaccgaagaggttaagaggaccttggagaatgctggccagaaggtgtccctggaaggcaatcccatatgcctctcgcaggccgaactcaacgatctgcccgttctagacagtattattaaggaatctcttaggttgtcttcagcgtcactgaacatccgaacagcaaaggaggacttcacactgcaccttgaggacggatcctataacattcgaaaggatgatattatagcattgtatccacagctcatgcatctcgatcctgaaatctaccctgaccctttaacctttaaatacgataggtaccttgatgagaacggaaaaacgaaaaccaccttctactgcaatggactgaagctgaaatactactatatgccgtttggatctggcgctaccatttgccctgggagattatttgcaatccatgagatcaagcagttcctgatcctcatgctatcttacttcgaactggaacttattgaaggccaagctaaatgcccaccactggaccagtcacgagcagggctgggaatactaccaccactgaatgatattgagtttaaatataagtttaagcacctt

SEQ ID NO: 249912 - DNA, 1512 bp, synthetic construct
  misc_feature 1..1512: note = Description of Artificial Sequence: Synthetic coding sequence
  source 1..1512: mol_type = other DNA
atgatgaccacttcccttatctggggtattgctatcgccgcatgttgttgcctgtggctcattctggggataaggcgtcgccaaacaggagaaccaccgctggagaacggtctgatcccttatcttggttgcgcacttcagtttggggctaatcctcttgagtttctgagagcaaaccaacggaagcacggccatgtcttcacctgtaaactcatggggaaatatgtccacttcatcactaacccacttagctaccataaggtactgtgtcacggaaagtactttgactggaagaagtttcattttgcaacctccgcgaaggccttcgggcataggtccatcgatccgatggacggaaacaccacagagaacattaacgatacctttatcaagactctccagggacacgccctgaattctctgaccgaatctatgatggagaatctacagcgcataatgcgcccgcctgtgtcctctaatagcaagactgcagcatgggtgactgagggaatgtactccttttgctacagagtaatgtttgaggcaggatatctgaccatttttggccgcgacctgacccgccgggatacacagaaggctcacatcctcaataacttggacaactttaaacagttcgacaaagtctttcccgccctggtggccggcctccccattcatatgttcaggacagcccataacgccagagaaaagctggccgagagcctgcggcacgagaatctacagaagagggaaagcatttctgaactgatcagcctaaggatgtttctgaatgataccttgtccacgttcgacgacctcgagaaggctaaaacacatctggttgtcctctgggcgagccaggccaacaccattcccgctaccttctggagcttgttccagatgatacgcaatcctgaggccatgaaggccgccactgaggaggtgaaacgcactctcgaaaacgccggacagaaagtgagcctggaaggtaaccccatttgtctttcgcaggcagagttgaatgatttgcctgtcctggatagtatcattaaagagtcactgcggctgtcttccgcctccttaaatatcaggacagccaaagaggactttactctccatctggaggacggcagctacaacatccggaaagacgacattattgctctgtacccccaattgatgcatctggaccctgagatctacccagaccctctaactttcaagtacgaccggtacttagatgaaaacggaaaaacaaagactactttctactgtaacggccttaagctgaagtactactacatgccatttgggtcaggagctacaatctgtccgggacgcctgttcgcgattcatgagataaaacagtttctgattctaatgctgagctactttgaactggagctaattgagggtcaggcaaaatgtccccccttagatcagtcgagggcgggcttgggaatcctccctcctctgaatgatatcgagttcaagtataagtttaagcacctt

SEQ ID NO: 249913 - DNA, 1512 bp, synthetic construct
  misc_feature 1..1512: note = Description of Artificial Sequence: Synthetic coding sequence
  source 1..1512: mol_type = other DNA
atgatgaccactagcctgatatggggcattgccatcgcagcctgttgctgcctgtggctcattcttggaattagaaggaggcagaccggagaacctcctctggaaaacggcctcattccatatctcggttgtgcactgcaattcggcgcaaacccacttgaattccttcgcgcaaatcagcggaagcatggacacgtctttacctgcaagttgatgggaaagtacgtgcacttcataaccaatccactgtcgtaccataaggtgttgtgccatggcaaatactttgactggaagaagtttcacttcgccacctccgcaaaggcatttggccatcgttccatcgatcctatggatggtaatacgactgagaacattaatgataccttcataaagaccctgcagggccacgctctgaattcgcttactgaatctatgatggaaaacctgcagaggattatgcgcccaccggtgagctcgaactctaagacggcggcatgggtgaccgaaggcatgtactctttttgttacagagtgatgttcgaagccggttaccttactattttcggaagagatctgaccagaagggatacgcagaaggcccatatcctcaataacctggataacttcaagcagtttgataaggttttccccgctctggtggcagggctgcccatccatatgtttcgaactgcccacaatgcacgtgagaagttggcggaatcacttcggcacgagaatctccaaaagcgagagtcgatctcagagctgatttcgttgaggatgttcctgaacgataccctctcaactttcgatgaccttgaaaaggcgaaaacccatcttgtggtgctgtgggcatcgcaagcgaatactattcccgctaccttttggagcctgtttcaaatgattcgaaacccggaggcaatgaaggccgcaactgaagaagtgaaaagaactcttgaaaacgctggacagaaagtttccctggaaggtaatccaatttgtctttcccaagcagagctgaacgatctgcctgtgttggactcgatcataaaggaatcgttgcgcttgtccagcgcaagccttaacattagaaccgcaaaagaagattttaccctccacctggaggacggatcatacaacataagaaaggatgacattatcgcactgtacccacaactcatgcaccttgatccagagatttatcccgatcctctcacctttaagtacgatcgctacctggacgagaatggcaagactaagaccaccttttactgcaacggcttgaaattgaagtactactatatgccatttggatccggagcgactatctgccctggccggctgtttgcaattcatgagataaagcaattcctgatccttatgctctcgtacttcgaactcgaactcatcgagggtcaagcaaagtgtcctcccctcgaccagtccagggcaggattgggaatactgcctcccctgaacgatatagaattcaagtacaagtttaaacatctg

SEQ ID NO: 249914 - DNA, 1512 bp, synthetic construct
  misc_feature 1..1512: note = Description of Artificial Sequence: Synthetic coding sequence
  source 1..1512: mol_type = other DNA
atgatgactacaagcctgatttggggcatcgccatagctgcatgctgttgcctatggctgatcttgggtatccgccgtcggcagaccggggagccccctctagaaaatggcctaataccctatctgggctgcgccctccagttcggcgccaaccctttggaattcctgagagccaatcagaggaaacacgggcatgtgttcacttgcaagctgatggggaaatacgtgcactttattactaaccctttgtcttaccacaaagtcctttgccatgggaagtactttgattggaaaaagtttcacttcgcaacctcggcaaaagcttttgggcatcgcagtatcgatcctatggatggaaataccaccgagaatataaatgatacctttatcaagaccctgcagggtcacgcacttaattctttaacagaaagcatgatggagaatctgcagcggataatgaggcctcccgtgtcgtcaaattcaaagactgccgcctgggtgacggaaggaatgtattcattctgttaccgagtgatgttcgaagccggctacttgaccatttttggtcgcgacctgactcggcgggacacacagaaagctcacattctgaataatctcgataacttcaagcaatttgacaaggttttccctgccctggtagccggattgcctattcacatgttcaggaccgcgcacaatgcaagagaaaagttggcagaatcattacggcacgagaatctccaaaaaagggagagtattagcgaactgatctccctgaggatgttcctcaacgatactctctcgacttttgatgatctggagaaggcaaagacacatttggtggtgttatgggcctcccaagccaatactatcccagccacattctggtcgctattccagatgatcaggaaccctgaggccatgaaggcagctacagaggaagttaagagaaccttagaaaatgcaggacagaaggtgagcctggaggggaatcccatatgcttgtctcaagccgagttgaatgacttgccagtattggactctatcatcaaggaatctcttaggctttcttctgcttccctgaacatccgtactgctaaggaagacttcaccctacatctcgaagatggctcctataacatacgtaaagacgacataattgcactgtacccccaacttatgcacctcgacccagagatatatcccgatcccctgacttttaagtacgatcgatacctggacgaaaacggcaagactaagacaaccttttattgtaatggattaaagcttaagtattattacatgccttttgggtccggagccaccatttgcccaggccggctcttcgctatacacgaaattaaacagttccttattttgatgctgtcctactttgagctggagctgatcgagggacaggcaaagtgcccccctctcgaccagagccgcgccgggttgggaatactgccccccttgaatgatatcgagttcaaatataagttcaaacatctc

SEQ ID NO: 249915 - DNA, 1512 bp, synthetic construct
  misc_feature 1..1512: note = Description of Artificial Sequence: Synthetic coding sequence
  source 1..1512: mol_type = other DNA
atgatgactaccagtctgatttggggtatagcgattgccgcttgttgctgtctctggctcatccttggaatacgacgcaggcagaccggagagccgcctcttgaaaacggcctgatcccgtacctgggatgcgccctgcagttcggtgccaaccctctggagtttctcagagccaatcagcggaaacatggacatgttttcacctgcaaactgatggggaagtatgtccactttatcaccaatccactgtcctaccacaaggtgctgtgccatggaaagtacttcgattggaaaaagtttcactttgcaacttcagccaaggctttcggacaccgctcgatcgacccaatggacgggaacactaccgagaacattaatgacactttcatcaagaccctccagggtcatgccctgaatagcctgacggagtcaatgatggagaacctccagcgaatcatgaggccaccggtttcttctaacagcaaaactgcggcgtgggtgaccgaaggaatgtactcattctgctatcgcgtcatgttcgaagcgggttacctcactatctttgggcgcgatctcacccggagagacacccaaaaggcgcatatcctgaataatctggataactttaaacagttcgataaagtgtttccagcgctggtcgctggacttccgatccatatgttccgcaccgcgcacaacgcacgcgaaaagttggccgaatcgctgcgccacgaaaatctgcagaagcgcgagtcgatctcagaacttatcagcctgcggatgttcttgaacgatactctgtccacttttgatgatcttgaaaaggccaagactcacctcgtggtgctctgggcctctcaggccaacaccatccctgcgaccttctggtcacttttccaaatgatccgtaaccccgaagccatgaaagcggctactgaggaagtcaaaaggaccttggaaaacgccggacagaaggtcagcctggaggggaaccctatctgcttgagccaagccgaactcaatgacctgccggtgctggatagcatcatcaaggagtcgttgcgactctcctcggcttccctgaatatccgcaccgctaaggaggacttcacgctgcatctcgaggacgggtcctacaacatccgaaaggacgacatcatcgccctctacccccaacttatgcacttggatccggagatctacccagacccgctgaccttcaaatacgatagatacctcgatgaaaatgggaaaaccaagaccactttctactgcaacggcctgaagttgaaatactactacatgcctttcggctcgggagcgactatttgcccgggtagactgtttgccatccacgagatcaagcaattcctcatcctcatgctctcctacttcgaactggagctgattgagggccaagccaagtgccccccgctggatcagtctagggcgggcctgggaatcctgcctccactgaacgacatcgaattcaagtacaagttcaagcacctg

SEQ ID NO: 249916 - DNA, 1512 bp, synthetic construct
  misc_feature 1..1512: note = Description of Artificial Sequence: Synthetic coding sequence
  source 1..1512: mol_type = other DNA
atgatgaccacctctctgatttgggggatagctattgctgcctgttgctgtctctggttgatattgggaattaggcgccgacaaacaggggaacctcccctggagaatggattgatcccttatctaggttgcgcactccaatttggggccaatcctctggagtttttacgagcgaaccagcgtaagcatggccatgtcttcacttgtaagcttatgggcaaatacgtgcacttcataacaaacccactaagctatcacaaggtgctttgccatggtaagtacttcgactggaaaaagttccatttcgccacctccgctaaagccttcggacatagatcaatcgatccgatggacggaaatactactgagaacatcaatgacacattcattaaaacgctccagggtcatgctttaaattcgcttaccgaatcgatgatggaaaacctgcagagaatcatgagaccccccgtttccagtaattctaagactgcagcctgggtcacagagggcatgtatagtttttgctacagggtgatgttcgaggcagggtacttgactatcttcggcagggatctgaccagacgtgacacccaaaaagcccacatcttgaacaaccttgacaacttcaaacaatttgataaggtgtttcccgcgctggtggctggactgcccattcacatgtttcgcaccgctcacaacgcacgcgagaaactagcggaaagtctccggcacgaaaacctgcagaaacgcgagtccatatccgaactgatttcgctccgcatgttcttgaacgatacgttaagcaccttcgacgacctggaaaaggcaaagacccatctggtcgtgttatgggcctcccaggccaataccattccggcaactttttggtccctgttccagatgatcagaaacccagaggctatgaaggcagccactgaggaagtcaagcgcactctggagaacgcgggtcaaaaggtcagcttggaaggcaaccctatctgtctgtcccaagctgagctgaatgacctgcctgtattggattctatcataaaggagagtctgagactctcgagcgcctccctcaatataaggaccgctaaagaggattttactctccatttggaggatggaagttacaacatacgcaaagacgatatcattgcgctgtatccgcagctcatgcatctggaccccgagatctatcctgatcctctcacctttaaatatgatcggtacctcgatgaaaacggaaagactaagaccacattttattgtaacggactgaagctgaagtattactatatgccattcggcagtggcgcgactatatgcccaggcaggctgtttgccatccacgaaatcaagcagttcctgatcctgatgctttcgtacttcgaactcgagttgattgagggccaggcaaagtgccctccactggaccaatcaagagccgggctgggtattttgccgcccctgaacgacattgagtttaaatacaaatttaagcacctg

SEQ ID NO: 249917 - DNA, 1512 bp, synthetic construct
  misc_feature 1..1512: note = Description of Artificial Sequence: Synthetic coding sequence
  source 1..1512: mol_type = other DNA
atgatgaccacctcgctcatctgggggattgccattgcggcctgttgttgtctttggctgattctgggcatccgcagacgacagactggagagcccccattggagaatggattgattccatacctggggtgtgcgttgcaattcggggcaaacccactcgaattcttgagagcaaaccaaagaaagcatggccacgtgtttacctgcaagctcatgggaaagtacgtccactttatcaccaatcccctctcctaccacaaggtgttgtgtcacggcaagtactttgattggaagaaatttcattttgcaaccagcgccaaggcttttggtcatagatctattgacccgatggatggcaacacgaccgaaaacataaacgacacctttatcaagaccctgcagggacatgccttgaactctcttactgaaagcatgatggagaacctgcaacgcattatgcggccacccgtgtcgagcaatagtaagacggcagcctgggtgacggaaggaatgtactcattttgttaccgggtcatgttcgaggcaggttaccttactattttcgggagagatctgactcgtagggatactcagaaggctcatattctgaataatctggataactttaagcaatttgataaagtgtttcctgcactggtggccggactcccaattcatatgtttagaacggcccataacgcccgagaaaagttggcagaaagccttagacatgagaatctgcaaaagagagaatcaatttccgaactgatatccctgcggatgttcctcaatgacactctcagcactttcgatgacctggaaaaagcgaaaacccacctggtggtgctctgggcatcacaagcaaacactatacccgcaactttttggtcactttttcaaatgatcagaaaccctgaggcaatgaaggcggctactgaggaggtgaagaggaccctggaaaatgcaggacaaaaagtatccctggaaggaaatcccatatgtttgtcccaggcagaactcaacgatctgcccgtcctggattcgataatcaaggaatcactcagactgagctcggcctcgctgaacataagaactgctaaagaagattttaccctgcaccttgaagatggatcgtataacatccgcaaagacgacattatcgctctctatccacaactgatgcatctggaccccgaaatctacccagatcctcttaccttcaagtacgatcggtaccttgatgagaatggcaagactaaaactactttctactgcaacggccttaagctgaagtactactacatgccattcggtagcggggccaccatctgccctggacgcctgttcgcgattcacgagattaaacagtttctgatactcatgctgtcctactttgaacttgaactgattgaaggccaggctaaatgccctcctttggaccaatccagagcaggcctcgggatcctgcctcccctgaacgatatcgagttcaagtacaagtttaagcatctt

SEQ ID NO: 249918 - DNA, 1512 bp, synthetic construct
  misc_feature 1..1512: note = Description of Artificial Sequence: Synthetic coding sequence
  source 1..1512: mol_type = other DNA
atgatgacaacgagtctcatctggggcattgccattgccgcatgctgctgcctctggctcatcctgggcatccggagacgccaaactggtgagccaccgctggaaaatggcctaatcccctacctgggctgcgcgctccagtttggcgcgaatcctctggagttcctgagggctaatcagaggaaacatggccatgtcttcacgtgcaagctgatgggcaagtacgtgcatttcatcacaaaccctctcagctaccacaaagttctttgtcacggaaaatacttcgattggaaaaagttccatttcgcaacctctgcaaaagcgtttggccaccgatcgattgaccccatggatggaaacacgaccgagaacatcaacgacacattcatcaagaccctccagggccatgcgttaaatagcctgactgagtctatgatggaaaacctgcagcgtatcatgcgacctcccgtgtccagcaattccaagaccgccgcatgggtcactgagggaatgtacagcttctgctacagagtgatgttcgaagctgggtacttaacaattttcggtagggatctgactagaagggacacccaaaaggcacacatactcaataatctcgataactttaaacagtttgacaaggtgtttcctgcactcgtggccggactgccaatccatatgttcaggaccgcacataatgcgagggaaaagctcgcagaaagtctccggcatgagaacctccagaaaagggagtccattagtgaactgatttccctgcgcatgttcctgaacgacactctctctacattcgacgacctggagaaagctaagacgcacctggtggtgctatgggcctcacaggccaataccatacctgctacgttttggagcctattccagatgatccgaaacccagaggctatgaaagccgcaaccgaggaggtgaaacgcacactcgaaaacgccggacagaaggttagcctggaaggaaaccctatctgcctatctcaagccgaactgaacgaccttcctgtgctggactctattatcaaagaatccctccggctcagtagcgcctctctgaacatcagaacagctaaagaggattttacgcttcatctcgaagacgggtcctacaacataagaaaagatgatattattgccctctacccgcagttgatgcacttggaccccgagatatacccagaccctctgactttcaagtatgaccgctacctggatgagaacggtaaaactaaaacaacgttctattgtaatggtctgaagctcaaatactactacatgccctttgggtcaggcgccaccatatgccctgggaggctttttgcgatacatgagattaagcagttcctgattctgatgctttcatacttcgagctcgagctgatagagggtcaagccaagtgcccaccgcttgaccaaagccgggccgggctaggaattttgccccccttaaatgacatcgagttcaagtacaagttcaaacacctc

SEQ ID NO: 249919 - DNA, 1512 bp, synthetic construct
  misc_feature 1..1512: note = Description of Artificial Sequence: Synthetic coding sequence
  source 1..1512: mol_type = other DNA
atgatgacgacttccttaatctggggtattgctatcgcggcctgttgctgcctgtggctgatcctgggaatccggcgtaggcagactggtgaaccgccactggagaacggcctgattccgtacttgggatgcgccttgcagtttggtgctaatccactggaattcttgcgagccaaccaacgcaaacacggccacgtctttacatgcaaactgatggggaagtatgttcacttcattactaacccccttagttatcataaggtgttatgtcacggaaaatacttcgattggaagaagtttcattttgcaacctcggccaaggcgttcgggcatcggtccattgatcccatggatggcaacaccactgagaatattaatgacacattcataaagaccctgcagggacatgcgctaaattctttgaccgagtccatgatggagaatctccagcggattatgagacccccggtctcaagtaacagcaagaccgctgcctgggtgactgagggcatgtactccttctgttatagggtgatgtttgaggcaggttatctgacgatattcggtcgcgacctgacacggagggacacacaaaaggcacacatactcaataatctagataatttcaagcagtttgataaagtttttccagcgctggtagcagggttgccaatccacatgttcagaaccgcccacaatgccagagagaaactggcggaatccttgcgccatgagaatttgcagaagagggagagtatctccgaactgataagtctgcgaatgtttctcaatgatacgctctccacatttgatgacctggaaaaggccaagacccacctggttgtgttgtgggcaagccaggccaataccattcctgccaccttttggtctctgttccaaatgattagaaaccccgaagcgatgaaagctgctactgaggaggtcaaacggaccctcgagaatgccggtcaaaaagtgtctttagagggcaaccccatctgcctctcacaggccgagctgaatgatctccctgtgctcgattctatcattaaggagagcctcaggctatcctccgcgtccctgaatattcgcaccgctaaagaagatttcactctccacctggaggatggttcttacaatattagaaaagacgatataatcgcactgtacccccagctaatgcacctggaccctgagatatatcctgatcccctgaccttcaaatacgatcggtacctggacgaaaatggaaagaccaagactaccttctactgcaacggtctaaagctgaaatactattatatgccctttgggagcggcgctaccatctgtccaggcagacttttcgccatccacgagatcaagcagtttctcatcctgatgttgtcctacttcgaacttgagctcatagagggccaggcgaagtgtccaccattggaccaatcccgggcagggctgggcatcctgcccccccttaatgatattgagtttaagtataaatttaaacacctg

SEQ ID NO: 249920 - DNA, 1512 bp, synthetic construct
  misc_feature 1..1512: note = Description of Artificial Sequence: Synthetic coding sequence
  source 1..1512: mol_type = other DNA
atgatgaccacttctctcatatggggcatagccattgcagcttgttgttgcctgtggcttatccttgggatccggagaaggcagaccggggaaccccctttggagaacggtcttattccttacctcggatgtgcgctccagtttggtgcaaaccctttggaattcctcagagcaaaccagcggaagcacggtcatgtcttcacatgcaagctgatgggcaagtatgttcattttataacaaacccgctctcatatcacaaagtgttatgtcatgggaaatatttcgattggaagaaattccatttcgccacctctgctaaggcctttggccacagaagcattgatcccatggacggtaacaccacggagaacattaacgatacctttattaagacattgcaaggccatgcccttaatagcttgacggaatctatgatggagaatctgcagaggataatgagacctcctgtcagctctaattccaagacagcagcatgggtgaccgagggtatgtactcattttgttaccgggtgatgtttgaggcagggtacttgacaatatttgggcgggatctgacccgccgcgatactcagaaagcccatatattgaacaatcttgacaactttaagcagtttgacaaggtcttcccagccctggtggccggtctgcctatacatatgttccggacagcacataacgcgcgtgaaaagctggcggaatcactcaggcatgagaatctgcagaagcgggagtctatttccgaactgatcagcctgagaatgttcctcaatgacaccctttccacatttgatgacctggagaaagccaaaactcacctggttgtactgtgggcaagtcaggcgaatactattcctgcaacattttggtcgctattccagatgatacgcaaccctgaagcaatgaaagctgccacagaggaggtcaaaaggacattggagaacgcaggtcagaaggtttctttagagggcaaccctatttgccttagccaggcagagttgaatgacctgcccgtcctggattccattatcaaggagtccctgagattgagcagcgcaagcttgaacattcgcacagctaaagaggactttacgcttcatctggaagacgggtcctacaatattagaaaagatgacattatagcgttgtaccctcaattaatgcacctggatccagaaatatatccagatccactcacttttaaatatgatcggtacctggacgaaaatggcaaaaccaagaccacgttttactgtaacggactgaaactcaagtattactacatgccgtttggtagtggggcaacaatttgtcccggcagacttttcgccattcatgaaatcaagcagttcctgatcttaatgctgagctactttgaactagaacttatcgaggggcaggctaagtgcccaccccttgaccaatcacgcgcaggactcggcatactccctcctctgaatgacatagagttcaagtataagtttaagcacctg

SEQ ID NO: 249921 - DNA, 1512 bp, synthetic construct
  misc_feature 1..1512: note = Description of Artificial Sequence: Synthetic coding sequence
  source 1..1512: mol_type = other DNA
atgatgaccacttccctaatatggggcattgcgatagcagcctgctgttgcctctggctgatccttggcatccggcgacgacaaactggggagccaccactggagaacggcctaatcccgtacttaggttgcgctctccaattcggtgctaatcccctcgagttcttgagagcaaaccagcgcaagcacgggcatgtatttacttgtaagttaatgggcaagtacgtgcattttatcacaaaccctttgagctatcataaggtgctgtgtcatggcaagtactttgattggaaaaagttccatttcgcaacatctgccaaggccttcggtcatcggagcatcgacccgatggacggcaataccacagaaaacattaacgatactttcatcaaaacgctgcagggacatgcccttaattctctgaccgagagcatgatggaaaatcttcagcggatcatgcggccccctgtcagttccaattctaaaacagctgcctgggtgactgagggtatgtattcattctgttaccgtgtgatgtttgaagccggctacctcacgattttcggcagagacttgacgcgtcgggatactcagaaagcccacattttgaacaacttggacaacttcaagcagttcgataaggtgttcccggcccttgtggccggcctaccaatacatatgttccggacagcacacaacgctcgggagaagttagccgaatccttacggcacgagaatttgcagaagcgcgagtcaatttctgagctgatctctctgaggatgttccttaatgatacattgtctacgtttgacgacctggagaaggccaagacacacctggtggtgctttgggcgagtcaggcaaatacaattccagccaccttttggtctctgtttcagatgattcggaacccagaagctatgaaggccgcaacagaggaagtgaagcgcacgctggaaaatgccggccaaaaggtcagcctggagggtaaccctatctgcttgagccaggcagagctcaatgacctgcccgtcctggattctattatcaaggagtcactaaggctgtcctccgcatccctgaatatacggacggctaaggaggacttcacattacatctggaggatggatcatacaacatccgtaaggatgacataatcgccttatacccccagctaatgcatctggatcccgaaatttacccggatcccctcacgtttaaatatgaccggtatctggacgagaatggtaagacaaagacgaccttctactgtaatggcctgaagctgaaatactactacatgccctttggctcaggcgcgaccatctgtcccgggcgccttttcgctatacacgagataaaacaattcttgattcttatgctttcctactttgagctcgagcttattgagggccaggccaaatgcccccctcttgatcagtcacgcgccggtctgggaattctaccgccgctaaacgacatagagttcaaatataagtttaaacatttg

SEQ ID NO: 249922 - DNA, 1512 bp, synthetic construct
  misc_feature 1..1512: note = Description of Artificial Sequence: Synthetic coding sequence
  source 1..1512: mol_type = other DNA
atgatgactacttctcttatctgggggatcgccatcgccgcttgttgctgtctctggcttatccttggaatccggaggcgacagacaggggaacctcctttggaaaacggattaataccatatcttggatgtgcgttacagttcggggctaaccccctagagttcttaagggccaatcagcgaaaacacgggcacgtattcacttgtaagttaatggggaaatatgtccatttcatcactaaccctctatcttatcataaagtgctgtgccatgggaaatattttgactggaaaaagttccattttgccacatccgcaaaggcatttggacatcgatcaatcgatcctatggacgggaacacaacagaaaatatcaacgatacatttataaaaactctccagggacacgccctgaactccttaacagaatcaatgatggagaatttgcagaggataatgcgtccacctgtgtcctcaaatagtaaaacagccgcctgggttactgaaggaatgtattctttctgctacagggtgatgtttgaggctggatatctcacaattttcgggagagatctaactcggagagatactcagaaagcccacatcctcaacaatctcgataacttcaaacagtttgacaaagtttttcctgccctcgttgccgggcttcccatccacatgtttcggacagctcataatgcaagggaaaaattagccgaatccctcagacacgaaaatctccagaaacgagaatctatctctgaactaatctctttacgcatgttcttaaacgatactctctctacatttgacgatctagagaaagcaaaaacacacctggtggtgctctgggcgtcgcaggctaacacaatcccagctacattctggtctctgtttcagatgatcagaaaccccgaagccatgaaagcagcaactgaagaggtcaagaggactctcgagaacgccgggcagaaagtttccctcgaaggaaaccccatctgcctatctcaggcagagttaaatgatctgcctgtgctcgattccataattaaagagtcactgaggttgagttctgctagtctcaatatcagaacggccaaggaggattttactctgcatttagaagatgggtcctataatataagaaaagatgatatcatagcgctgtatccccagctcatgcatctggatccagaaatatatcccgacccactaactttcaaatatgataggtatttagatgaaaatgggaaaacaaaaactacattttactgtaatgggctgaagcttaagtattactacatgccattcggatccggagccactatatgtcctggaaggctttttgcgatacacgaaatcaaacagttcctcattcttatgctgtcatatttcgagctcgaactgatagagggacaagccaagtgtcccccattagatcagagtcgggctggactcgggatcctgcctcccctcaatgatatagaatttaaatacaaattcaaacatctg

SEQ ID NO: 249923 - DNA, 1512 bp, synthetic construct
  misc_feature 1..1512: note = Description of Artificial Sequence: Synthetic coding sequence
  source 1..1512: mol_type = other DNA
atgatgaccacctccctgatatggggtatagctattgctgcctgctgctgtttgtggctaatactcgggattcggagaagacagaccggggagcctcccctcgagaacggcctaattccctaccttggatgcgccctgcagtttggtgccaaccccttagagtttcttcgagccaaccagaggaagcacggccatgtgttcacttgtaaactcatgggcaaatatgtgcacttcatcacaaaccccctgtcctaccacaaagttctgtgccacgggaaatattttgactggaagaaattccacttcgcaacttcagccaaggcattcggacatcgaagtattgatcctatggatggaaacacgacagagaacatcaacgataccttcataaagacactccaagggcacgctttgaacagcctgaccgagagcatgatggaaaatttgcagagaatcatgagaccaccggtctccagtaattctaagacagccgcatgggtgaccgaagggatgtactctttttgttacagagttatgttcgaggccgggtatctcaccatcttcggcagagatttgacaaggcgcgacacgcaaaaggcccacatccttaataacctagataatttcaaacagtttgacaaagtctttccagcactggttgctggtctgccaatacacatgttccggacggcacacaatgcccgggaaaagcttgctgaaagtttgagacatgagaacttacagaagagagagagcatttccgagctcatatctcttaggatgtttctcaatgacacactgagcacctttgatgacttggaaaaggcaaagacccatttggtcgtcctctgggctagccaagccaacactattcctgctacgttctggtcacttttccagatgatacgcaatccggaggccatgaaggccgcaactgaagaggtcaagcgcacactggaaaacgccggacagaaagtctcgctcgagggcaaccctatctgcctgtcgcaagccgagctgaatgatttgcccgtgctggattctataattaaggagagtctgcgcctcagttccgcttcacttaacattcggaccgcgaaggaagactttactcttcaccttgaggatgggtcatataacattaggaaggatgacatcattgccctgtacccgcaactgatgcatttggatcctgaaatctaccctgatcccctgacctttaaatacgataggtacttagacgaaaatggtaaaactaaaacgaccttctattgtaatggactaaaattaaaatattattatatgcccttcgggtcaggagccaccatctgccctggccgtcttttcgcaatccatgaaatcaaacagttcttgattctaatgctgtcctacttcgagctggagctgatcgaaggccaggctaagtgtccccccctagatcagtcaagggccgggctcggaatcctgccccccctgaacgatatcgaatttaaatacaaatttaaacacctg

SEQ ID NO: 249924 - DNA, 1512 bp, synthetic construct
  misc_feature 1..1512: note = Description of Artificial Sequence: Synthetic coding sequence
  source 1..1512: mol_type = other DNA
atgatgaccactagtttaatctggggaatagctattgccgcatgttgttgtctttggctcattctaggtattagacggagacagacaggtgagccacctcttgagaacggcctcataccttatttgggttgcgctcttcagtttggtgctaacccattggaattcctccgggccaaccaaagaaagcacgggcatgtttttacatgtaagcttatggggaagtacgttcatttcatcacgaatcctctgtcctatcataaggttctctgtcacggcaagtacttcgactggaaaaaattccacttcgctacctctgctaaggcgttcggtcatagaagtatagatccaatggatggtaacactacagagaacattaatgatacattcattaagactttgcagggccatgctttgaattcgttaactgagtcaatgatggaaaacttgcaaaggattatgaggccacctgttagtagtaattcgaagacagccgcttgggttactgagggcatgtatagcttctgttatagagtcatgttcgaggctgggtacttaaccattttcggccgcgacttgaccaggagggacacacagaaggcacatattcttaataatttggataatttcaagcaattcgataaggtgtttcctgccctcgttgctggacttccaatccatatgtttaggaccgcccataatgcgcgtgagaaactagctgaatcgcttagacatgagaaccttcaaaagagagaatccataagtgagttaatatcacttaggatgttccttaatgatacgcttagtacgtttgatgacttagaaaaagcaaaaacgcacttggttgtcctctgggcttctcaagctaacaccatacctgctacattctggtctctttttcaaatgatcaggaaccccgaggctatgaaggcagccaccgaagaggtaaagaggacacttgagaatgcgggccagaaagtttctctcgaagggaaccctatttgcctcagtcaggcagaactgaatgacttgcccgttttggatagtatcatcaaagaatcgttgagattaagttcggcttcacttaacattagaactgccaaggaggattttacattgcacttggaggatggaagttacaatattaggaaggatgatattattgctttgtacccacagttgatgcatttggaccctgaaatttatcctgatccgctaactttcaagtatgataggtatcttgatgagaacgggaagactaaaacgacattttactgcaatggcttaaaattaaagtactattatatgccatttggctcaggtgctaccatatgccccggaaggctttttgccattcatgagattaaacagtttctgatccttatgctgagttactttgaacttgaacttattgaaggtcaagctaagtgccctccattagaccagtcgagggccgggctcggtattctcccaccattgaacgacattgagttcaagtataagtttaaacatctc

SEQ ID NO: 249925 - DNA, 1512 bp, synthetic construct
  misc_feature 1..1512: note = Description of Artificial Sequence: Synthetic coding sequence
  source 1..1512: mol_type = other DNA
atgatgaccacctcgctcatttggggaatcgccattgcggcttgttgttgcctctggctcatattggggattagacgccgacaaactggcgaaccaccacttgagaacggtctgatcccataccttggatgtgccctgcaattcggcgcaaatccactggagtttcttcgggctaaccaacgcaagcatggtcatgtgtttacttgcaagctgatggggaaatatgtccactttatcacgaatcccctttcataccacaaggtcctctgtcatggtaaatacttcgactggaaaaagtttcactttgcaacgtcagcgaaggcctttggccatagatcgattgatccaatggacggtaacacgaccgagaacattaacgataccttcatcaagaccttgcaaggacacgcgctgaactcacttactgagagcatgatggaaaatctccagaggattatgcgtcctccagtcagctcgaatagcaagaccgcagcctgggtgactgaaggaatgtactcgttctgctacagagtgatgtttgaagcaggatacttgaccattttcggacgcgatcttacccggagagatactcaaaaggcgcatatcctcaacaaccttgacaactttaaacagtttgataaggtctttcctgcgctggtcgctggtttgccgatccacatgtttcgtactgcacacaacgctcgcgaaaaactcgcggaatcgctcagacatgagaatctgcaaaagcgggagagcatttcggagctgatctctctgagaatgtttctcaacgacacgctgagcacttttgatgatctggaaaaggccaagactcatctcgtggtgctctgggcatcacaggcaaatactattcccgcaacgttttggtccctttttcagatgatacggaacccagaagcgatgaaagccgccaccgaagaggtcaaaagaactcttgaaaacgccggacagaaagtgtcccttgaagggaaccccatatgtctttcacaagcagagcttaacgaccttccggtgctcgattccatcatcaaagaatcgcttcgactttcgtcagcatctctgaatatcagaaccgcaaaggaggacttcactttgcacttggaggacggaagctacaacatccgtaaagatgatatcattgcactttaccctcaactcatgcatctggacccggagatttacccagacccactgacctttaagtacgatagatatctggacgagaatggtaaaaccaaaactactttttactgtaatgggttgaagctgaagtactactacatgcctttcggctcaggagccactatttgtccaggacggctgtttgccattcacgaaatcaagcagtttcttatccttatgcttagctattttgaactggaactcatcgaaggtcaggcaaagtgccctccgcttgatcaatcccgcgccggactgggtattctgcctccactcaatgacattgaattcaaatacaagttcaagcatctg

SEQ ID NO: 249926 - DNA, 1512 bp, synthetic construct
  misc_feature 1..1512: note = Description of Artificial Sequence: Synthetic coding sequence
  source 1..1512: mol_type = other DNA
atgatgactacttcactgatctggggcatcgctattgccgcctgttgttgcctgtggctgattctgggcatcaggcgccgccaaaccggggagccgccactggaaaacggtctgattccatacctcggatgtgccctgcagttcggcgcgaacccgctcgaattcttgcgcgctaatcagcggaagcacggacatgtctttacttgcaagctgatgggaaagtacgtgcatttcatcactaacccactctcgtaccacaaagtcctgtgccacggcaagtactttgactggaagaagttccacttcgctacttccgccaaggcctttggccatcggtcgatcgatcccatggacggcaataccactgaaaacatcaacgacaccttcatcaaaaccctgcaagggcacgcactgaactcgcttactgagtccatgatggaaaacctgcaacgcatcatgcgtcccccggtcagctccaattcaaagactgctgcttgggtgaccgagggaatgtactccttttgctaccgcgtcatgttcgaagctggatacctgaccatcttcggacgggatctgactaggcgggacactcagaaagcgcacatcctgaacaatctggacaatttcaaacagtttgataaggtgttcccagcgctcgtggccggcctgcctatccacatgttccgcactgcccacaacgcccgggagaagctggccgaatccctgaggcatgaaaacctgcagaagcgggaatcaatctcagaactgatctccctccgcatgttcctgaacgataccctgtccacgttcgatgatctggagaaagcaaagactcatctggtcgtgctctgggcgtcccaagcgaacaccatccctgcgaccttctggtccctgttccagatgatccggaatcccgaagcgatgaaggccgcaaccgaggaagtgaagaggactctcgaaaacgccggccagaaagtgtccctggaaggaaatcctatctgtctgtctcaggcagagctgaatgacctgcccgtgcttgactcaatcatcaaggagtcgctgcggctctcctcagctagcctcaacatccgcactgcgaaggaggacttcaccctgcacctggaagatggtagctacaacatcagaaaggacgacatcatcgcgctctacccacagctcatgcatcttgacccagaaatctacccggatccacttacgtttaagtacgaccggtacctcgacgaaaacggcaagactaagaccaccttctactgcaatggattgaaactcaagtactactacatgccattcggctcgggagccacgatctgtcctggacggctgttcgcgattcacgagatcaaacagtttctgattctgatgctgtcatacttcgaacttgaactcatcgagggacaggccaagtgcccgcctcttgatcagtctcgggcgggactcggaatcctgccgccgctcaatgacatcgagtttaagtacaagtttaagcacctg

SEQ ID NO: 249927 - DNA, 1512 bp, synthetic construct
  misc_feature 1..1512: note = Description of Artificial Sequence: Synthetic coding sequence
  source 1..1512: mol_type = other DNA
atgatgactacttcactgatctggggtattgcaatcgccgcctgctgctgtctctggctgattcttggcatcagacggaggcagaccggcgaaccgcccttggagaacggactgatcccttacctcggctgtgcactgcagttcggcgcgaatccgctggaattcctgcgcgcgaatcagcggaagcacggccacgttttcacgtgcaaactcatgggaaaatacgtccacttcatcacgaaccctctttcgtaccacaaggtcctgtgccacgggaagtacttcgactggaaaaagttccattttgcgactagcgcgaaggcgttcgggcacagatcaattgacccgatggatggtaataccactgaaaacattaacgacacctttatcaaaacgctccagggacacgcccttaactcgctgaccgaatccatgatggagaacttgcagcgcataatgaggccacccgtgtcgtcaaattcgaaaaccgccgcttgggtcaccgaaggaatgtacagcttttgctaccgggtgatgttcgaggctggatatttgactattttcggccgcgacctcactcgccgggacacccagaaggcgcatatcctcaacaatctggacaacttcaagcaattcgataaagtctttcctgccctggtggccggactgccaatccatatgttccgcaccgcacacaacgccagggagaagttggccgagtcccttcggcacgagaacttgcaaaaacgcgaaagcatctccgagttgatctccctccggatgtttctgaacgacaccctgtcaacttttgatgatctggaaaaggcaaaaactcatttggtggtcctctgggcgtcccaggcaaacaccattccggctactttctggtcgctgttccaaatgatcagaaatccagaagctatgaaggctgcaaccgaagaggtgaagagaacgctggaaaacgccggacagaaggtgtctctggaaggaaatccgatctgtttgtcccaagcagagctgaatgacctgcccgtgctcgattcgataatcaaggagtccctgcgcctgagcagcgcctcgttgaatatcagaacggccaaggaggatttcaccctccatctggaagatgggtcctataacatccgcaaagacgatatcattgctctttacccacaactcatgcatctggacccagaaatctaccccgatccgctcaccttcaagtacgaccgctacttggacgagaacggaaagacgaaaactactttctactgcaatggtctgaaactcaaatactactacatgccattcggaagcggtgccaccatctgcccgggccgactcttcgctattcatgaaatcaagcagttcctcatcctcatgctgtcatacttcgaactggagttgatagaaggacaagctaaatgccctccgttggaccagtcacgggcgggtctgggaatcctgccaccactcaacgatatcgagtttaagtataagttcaagcacctg

SEQ ID NO: 249928 - DNA, 1512 bp, synthetic construct
  misc_feature 1..1512: note = Description of Artificial Sequence: Synthetic coding sequence
  source 1..1512: mol_type = other DNA
atgatgacgacgagcctcatttgggggattgcaattgccgcatgttgctgtttgtggttgattctgggaatccggaggagacagactggcgaaccgccattggaaaatgggctcattccttacctgggatgtgcactccaatttggcgctaatcctctggagttcctgagagcaaatcaaagaaagcacgggcatgtgtttacctgcaagctgatggggaaatacgtgcacttcattacgaatcccctctcctatcacaaggtgctttgtcatgggaagtacttcgattggaaaaagtttcattttgccacctcggctaaggcttttggacatcgatcgattgatcctatggatggtaacaccaccgaaaacataaacgacaccttcataaagacccttcaagggcacgctcttaactccctgaccgagtcaatgatggaaaacctgcaacgaattatgcggcctcctgtatcgtcgaactctaagaccgcagcatgggtgactgaaggcatgtactcgttctgctatagagtgatgttcgaagcgggttatctgaccattttcggacgagatcttacccggagagatactcagaaggcccatattctcaataacctggacaatttcaagcagtttgataaggtgtttcccgccctggtggcaggactgccaatccatatgttcagaaccgcccataatgcaagagaaaaactggcggagagcctgagacatgaaaacctgcagaaacgtgagagcattagcgagcttatctcattgaggatgtttctcaatgacaccctctcgaccttcgatgacctggagaaggcaaaaactcatttggttgtgctttgggcgtcacaggcaaacacgatcccggcaactttctggtcgcttttccaaatgattcgcaaccctgaggcaatgaaagcagcaaccgaggaggtgaagaggacgctggaaaatgcaggacaaaaagtctcacttgaaggaaatccaatctgtctctcccaggcagaacttaacgatctgccagtgctggattcgataatcaaggaatctcttagactttcttcagccagcctgaacattaggactgccaaagaagattttaccctccacctggaggatggatcctacaacataagaaaggacgatatcattgcgctctaccctcagcttatgcatctggaccccgaaatctaccctgaccctctcacctttaagtacgataggtacctggacgagaacggcaagactaaaactactttttactgcaacgggctgaagctcaaatactactacatgccatttggatccggcgccacgatctgtcctggacggctgtttgccattcacgagattaagcagttcctgatacttatgctgagctacttcgaactggaacttatagagggccaagccaagtgtcctcctcttgaccagtcgcgcgcaggcctgggtattttgcctccactgaacgatatagaattcaaatacaagtttaaacatctt

SEQ ID NO: 249929 - DNA, 1512 bp, synthetic construct
  misc_feature 1..1512: note = Description of Artificial Sequence: Synthetic coding sequence
  source 1..1512: mol_type = other DNA
atgatgaccacgtcattaatatggggaatcgccatagctgcttgctgctgcctgtggctgatccttggtattcgacgccggcagacaggggaaccacctttggaaaacggcctgatcccttaccttgggtgcgcactgcagtttggcgcgaaccccttggagttcctgagggccaaccagaggaaacacggtcacgttttcacatgcaaactgatgggaaagtacgtccacttcatcaccaacccactatcctaccacaaggtgctgtgtcacggtaaatacttcgactggaagaagtttcacttcgcgacgagcgccaaggctttcggacatcgttcaattgaccccatggatggcaacacaactgagaacatcaatgacacattcatcaagacactccagggacacgccctgaattccctaaccgagagcatgatggagaacctgcagcgtattatgcgcccacctgtaagttctaactcaaagactgcggcctgggtcactgaggggatgtatagtttttgttaccgcgtaatgttcgaggcgggctatctcacaattttcggccgggacttgacgcggagggatacccaaaaggcacatattctcaataacctcgataatttcaagcagttcgataaggtgtttcccgccctcgtggctggactgcccatccacatgttcagaacagcacataatgctcgtgagaagctggcggagagcctcagacacgaaaatctgcaaaagcgagagagcatatctgagctcatctccctaagaatgttcctcaacgacactctttctacgtttgatgatctggagaaagccaagacacaccttgttgtactctgggcttcacaagccaacaccattccagccacattttggtccctgtttcagatgattcgaaatcctgaagctatgaaagctgccaccgaggaagttaaacgcaccctcgagaacgcaggccagaaggtttcgctggaaggcaacccaatttgcttaagccaggcagagctcaacgatctgcctgtcctcgatagcattatcaaagaatctctcagactgagctccgcatcactcaacatcaggactgccaaggaggactttactctgcacttagaggacggaagctataacatcagaaaggacgatattatagcactctaccctcagctgatgcacctggaccccgagatttaccctgacccattgaccttcaagtatgataggtacctagatgagaatgggaagaccaagactactttttattgtaatggcctaaagctgaagtactactacatgcctttcggatcaggggccactatctgtcctggcaggctgtttgcaatccatgagattaagcaattcctgattctgatgctgtcttattttgagcttgagctgatcgaggggcaagcaaagtgccctccactggatcagagcagggcgggcttgggaattctgccgcctctgaacgacattgaattcaaatacaagtttaaacacctc

SEQ ID NO: 249930 - DNA, 1512 bp, synthetic construct
  misc_feature 1..1512: note = Description of Artificial Sequence: Synthetic coding sequence
  source 1..1512: mol_type = other DNA
atgatgactacctctcttatctgggggattgcaatcgcggcatgttgctgtctttggctcattctgggtattcgccgtcggcaaactggagaacccccgcttgaaaatgggctgataccctacctggggtgcgcgttgcagttcggtgccaaccccctggagttccttagagcaaaccaacgtaagcacggacatgtctttacctgcaaactgatgggtaagtacgtccacttcattaccaatccgctgtcgtaccataaggtgctgtgtcacggaaagtactttgactggaagaagtttcattttgcaacctcagctaaggcatttggacacagaagcattgaccctatggacggaaacaccaccgaaaacattaacgatactttcataaagactttgcaagggcacgcgcttaactctctgaccgaatcgatgatggaaaatctccaacgcatcatgcggccacccgtgtcgtccaactcgaaaactgctgcctgggtaaccgagggaatgtacagcttttgttaccgggttatgtttgaagcaggctacctgaccatctttggccgggatttgacgcgccgcgatactcagaaggcacatattcttaacaacctggataactttaaacaatttgacaaagtgttccctgcacttgtggcgggactccccattcatatgttccggaccgcacataacgccagggagaagctggctgaatcacttcgccatgagaacttgcaaaaacgagaatcgatatcggaacttatctctcttcggatgtttttgaatgatactctgagcacctttgacgaccttgaaaaagccaagactcatctggtcgtgctttgggcaagccaggcaaatactattcccgccaccttttggtccctgtttcagatgatcagaaaccccgaagcaatgaaggcggcaaccgaagaggtgaagagaaccctggagaacgcaggacagaaggtgtcactggaaggcaacccaatatgtttgtcgcaagcggaactgaatgaccttcccgtgctcgattccatcatcaaagaatcgctgcgcctgtcctcagcatcacttaacatcaggactgcaaaagaagatttcactctccatctggaggatggctcctacaacattagaaaagatgacatcattgcactctaccctcagctgatgcatcttgatccagagatttaccctgacccactgacctttaagtacgacagatacctggatgaaaatggaaagacgaaaactactttttactgtaacggtcttaaacttaagtactactacatgccatttggcagcggagcgaccatctgtcctggacggctctttgcaattcacgagatcaaacaatttctgatattgatgcttagctacttcgagcttgagcttatcgaaggccaggctaagtgcccgcccctggatcaatcacgtgcagggcttggtattctgccacctctgaacgacatagaattcaaatacaaattcaagcacctg

SEQ ID NO: 249931 - DNA, 1512 bp, synthetic construct
  misc_feature 1..1512: note = Description of Artificial Sequence: Synthetic coding sequence
  source 1..1512: mol_type = other DNA
atgatgactacctcacttatatggggcatagctatcgccgcctgttgctgtctgtggttgatactggggattcggagacggcagactggagagccacctctggagaatggcctcatcccctatctaggctgtgccttgcagtttggcgccaaccctcttgaattcctgcgggccaaccagcgtaagcacggacatgtctttacttgtaagctcatggggaagtacgtgcacttcatcactaatcctctctcgtatcataaggtgctgtgccacgggaagtattttgactggaaaaagttccattttgccacttctgccaaagccttcggtcaccgttcaattgaccctatggacggcaataccaccgagaatatcaacgatacattcataaaaaccctgcagggccacgccttgaactcactgaccgagtccatgatggagaatctacagcggatcatgcgccctcccgttagctctaatagcaagactgctgcgtgggtgacagagggcatgtactcattttgctatagagtgatgttcgaagccggctacctcaccatatttggccgggacctgactagacgcgatacccagaaagcccacatcttgaacaatctggacaattttaaacaattcgacaaagtcttccctgcgctggtagctgggctgccaatccatatgttcagaacggcccacaacgctcgcgaaaagctcgcggagagccttcgacacgaaaacctccagaaaagggagagtatttccgagctgataagtctgagaatgttcctgaacgatacactctctactttcgacgacctggaaaaggcaaagacacacctggtggtgctgtgggcgtctcaggccaatacaatccccgccaccttttggagcctgtttcagatgatccgcaacccagaggccatgaaagcagcaaccgaggaggtcaaacgcaccctcgagaacgcagggcagaaagtatctctggaaggaaacccaatttgtctgtcgcaggccgaacttaacgatctcccagtgctggactctatcatcaaagagtctctccgcctctctagtgcatcattgaacatcagaactgctaaagaggatttcacgttgcacttggaagatgggagctacaatattagaaaggacgacattatagcgctgtatcctcaattgatgcacctggaccctgagatctaccccgatcccttgacgtttaagtacgataggtatctcgatgaaaacggcaagaccaagacaactttttattgtaacgggctaaaactcaagtactactatatgcccttcggatcgggcgcaacgatctgccctggcaggctcttcgctatccatgagattaagcagtttttgatcctcatgctttcctattttgagttagagctaatcgagggccaggccaaatgcccccccctagatcagtcccgagcaggactgggcattctgcctccacttaatgatatcgaattcaagtacaagttcaagcatttg

SEQ ID NO: 249932 - DNA, 1512 bp, synthetic construct
  misc_feature 1..1512: note = Description of Artificial Sequence: Synthetic coding sequence
  source 1..1512: mol_type = other DNA
atgatgactacttccctgatttggggcattgccattgccgcatgctgttgtctttggctgatccttggaatccggagacgtcaaacgggggaaccgccattggaaaacggtcttattccttacctgggctgtgcattgcagtttggggccaaccctcttgagttccttcgtgcgaatcaaagaaagcatgggcacgtgtttacttgtaagttgatgggtaaatacgtccacttcataacgaacccacttagctaccataaggtgctttgtcatgggaagtactttgattggaagaagtttcattttgccactagcgcgaaggcattcggtcatcgttccatcgaccccatggatggaaacactactgaaaacattaacgacaccttcataaagactcttcaaggacatgccctcaactcgcttaccgagtcaatgatggagaaccttcaaagaattatgcggccccccgtgagctccaattccaaaactgcagcatgggtgaccgaaggaatgtactcgttttgttacagagtcatgtttgaagcaggttacctcaccatttttggacgggatctgacccgtcgcgatacccaaaaggctcatatactcaataaccttgacaatttcaaacaattcgacaaagtgttcccagcacttgtggcaggactgcctattcatatgtttcgtactgcacataatgcacgggagaaacttgcggaatcgcttaggcatgaaaacctgcagaagcgggaaagcatctcagagctgatttcccttcggatgttccttaacgatactctttcaacctttgatgatctggagaaggcaaagacccatctggtcgtgctttgggcgtcgcaagcaaacaccattccagcaactttttggtcactgtttcaaatgattcggaaccctgaggcaatgaaagcagctaccgaagaggtgaagagaaccctcgaaaacgccggtcagaaggtgtcactcgaaggtaaccctatttgcctgtcccaagcggaacttaacgatctccctgtccttgattccatcattaaagaatcgctgagactgtcgtcggccagcctgaacattagaaccgcaaaagaagattttacccttcatctcgaagatggatcgtacaacatccgcaaagacgatatcattgcgctctacccacagcttatgcatctggaccctgagatttaccccgaccccctgacctttaagtacgaccggtacctggatgagaatggcaaaactaagacgaccttttactgtaacggcctcaagctgaaatactactacatgccttttggttccggggctactatatgccctggaagattgtttgcaatccacgaaatcaagcagttcctcattcttatgctttcctactttgagttggagcttattgaaggacaggcgaaatgccctccacttgaccaatctagggcgggcctggggatcctccctccattgaacgatattgaattcaaatacaagttcaagcacctt

SEQ ID NO: 249933 - DNA, 1512 bp, synthetic construct; identical to SEQ ID NO: 249910
  misc_feature 1..1512: note = Description of Artificial Sequence: Synthetic coding sequence
  source 1..1512: mol_type = other DNA

SEQ ID NO: 249934 - DNA, 1512 bp, synthetic construct
  misc_feature 1..1512: note = Description of Artificial Sequence: Synthetic coding sequence
  source 1..1512: mol_type = other DNA
atgatgactacctcgctcatttggggaatcgcaatcgccgcctgctgctgcctttggttgattctgggcattcggcgcaggcagaccggagaaccgccattggagaatgggctcatcccatacctgggatgtgctctccagttcggagcgaatccgctggagtttctgagagctaaccaacgcaaacacggccatgtgttcacctgcaagttgatgggtaaatacgttcatttcatcaccaacccgctgtcataccacaaagtgctgtgtcacggaaagtacttcgactggaaaaagttccacttcgctacttccgcgaaggcgttcggacacagatcgatagaccccatggatggcaatactactgagaacatcaacgacacctttatcaagactttgcagggacatgcgctgaactcactgaccgaatcaatgatggaaaacctccagcgcattatgaggcctcccgtctcatctaacagtaagaccgccgcctgggtgaccgaaggaatgtactcgttctgctaccgcgtgatgtttgaggcgggatacctcaccattttcggacgcgacctcaccaggcgcgacacccagaaagcccacatcctgaacaacctcgataactttaagcagttcgacaaggtgtttccggcgctggtggcaggcctcccgatccatatgttcaggacggcgcacaacgcgcgtgagaagctggctgaatccctcaggcatgaaaacttgcaaaagagagagagcatctccgaactcatcagcctgcgcatgttcctgaacgacaccctctcaaccttcgatgatctcgaaaaggccaagacccacctggtggtgctgtgggcatcgcaggctaatactatccctgcaaccttctggtcgctgtttcaaatgatcaggaacccagaggccatgaaggctgccactgaagaagtgaaacgaacgctggaaaatgccggacaaaaagtttcgctggaaggcaacccaatctgcctttctcaggccgaactgaacgacctgcctgtgctcgattcgatcattaaggagtcactgcggctgtcctcagcatccctgaacatccgcactgccaaggaagatttcactctgcatctcgaggacggttcatacaacatccgcaaggacgacatcatcgccctgtacccccagctgatgcatttggaccctgaaatctacccagaccctctgacctttaagtacgatcggtacctggatgagaacggaaagactaaaaccaccttctactgtaacggactgaaattgaagtactactacatgccattcggatcaggcgcaaccatctgcccaggacgactttttgcgatccatgaaatcaaacaattcctgatcctgatgttgagctactttgagctggaactgatcgagggacaagcaaaatgcccgcctctggatcaaagcagagccggcctggggatcctccccccgctcaacgacatcgagttcaagtataagttcaagcatctg

SEQ ID NO: 249935 - DNA, 1512 bp, synthetic construct
  misc_feature 1..1512: note = Description of Artificial Sequence: Synthetic coding sequence
  source 1..1512: mol_type = other DNA
atgatgaccacgtccttgatctggggcatcgcgatcgccgcttgttgctgcctgtggctcatcctgggaatcagacgccgccagactggagaaccgcccctcgaaaacggactgattccgtacttgggttgcgccctccagttcggcgctaatccgctggagttcttgcgagcaaaccagcgcaagcacggacatgtgttcacttgcaagctgatgggaaaatacgtgcacttcatcaccaacccgctttcataccacaaggtgctgtgccacggcaagtatttcgactggaaaaaatttcatttcgccacgtccgccaaggcgttcggtcatcgtagcatcgacccgatggatgggaataccaccgagaatatcaacgatactttcatcaagaccctgcaaggacacgccctgaactcgctcaccgaatcgatgatggagaatctgcagaggatcatgcggcccccggtgtcctcgaactcgaaaactgccgcatgggtcaccgagggcatgtacagcttctgctaccgcgttatgttcgaggcagggtacctcactatctttggacgcgatctcaccagacgggatacgcagaaggcgcacatcctgaacaacctggataattttaaacaattcgacaaggtgtttcctgcactggtggcaggccttccgatccatatgtttcggactgcgcacaatgcccgcgaaaagctggccgaatcactgcggcacgaaaacctccaaaaaagagaatccatcagcgagctcatctcgctccgcatgtttttgaacgatactctctcgaccttcgacgacctggaaaaggcaaagactcatctggtcgtcctgtgggcttcccaggccaataccattccagctacgttctggtcacttttccagatgatcaggaaccctgaagccatgaaggcggccaccgaagaagtgaagcggaccctggaaaatgcgggacagaaggtcagcctggaaggaaacccaatctgtctgtcacaagccgaactcaacgaccttccggtgcttgacagtatcatcaaggagtccctgaggctttcgagcgcgtccctgaatattcgcactgctaaggaggatttcactctgcatctggaggatgggagctacaacatccggaaggatgacataatcgccctgtatccgcagttgatgcatctcgaccctgaaatttaccctgacccgctgacctttaaatacgaccggtacctggacgagaacggaaagaccaaaactactttctactgcaatggactcaagttgaagtactactacatgccattcggctctggagcaaccatctgtcccggtagactgttcgctatccacgagatcaaacagttcctgattctgatgttgtcgtactttgaactcgagctgattgaggggcaagcgaaatgcccaccactcgaccaatcaagagccggtctgggaatcctcccacctcttaacgacattgagttcaagtacaagttcaagcacctc

SEQ ID NO: 249936 - DNA, 1512 bp, synthetic construct
  misc_feature 1..1512: note = Description of Artificial Sequence: Synthetic coding sequence
  source 1..1512: mol_type = other DNA
atgatgaccactagccttatttgggggatcgcaatcgcagcatgttgctgcctttggctcatccttggaataagacgacggcagacgggggagccacctctcgaaaacggactcatcccctacctgggatgtgccctgcagtttggagccaacccccttgaatttctgcgtgcaaaccaacggaaacacggacatgtgtttacttgtaaactgatgggaaagtacgtgcactttatcacgaatcccctttcgtaccataaggtcctgtgtcatggcaaatactttgattggaagaaattccattttgccacgtcggcaaaggcttttggccatagatccatcgaccctatggacggcaataccacggaaaacattaacgacactttcattaagactcttcagggacacgcgcttaactcactgactgaatccatgatggaaaacctccaacggataatgcgtcctccagtgagcagcaacagtaagacggctgcctgggtgactgaaggaatgtactcgttctgttacagagtgatgtttgaagcgggctacctgaccattttcggaagggacctgactcgccgcgacacccagaaggcacatatccttaacaacctcgataacttcaaacaatttgataaggtgtttcctgccctggttgcgggacttccaattcatatgtttcgtactgcacataatgcacgcgaaaagctcgcagaaagcctgcgccatgaaaaccttcaaaagagagaatcaatttcggaactgatttcgttgcggatgttcctgaatgatactctttcgactttcgatgatctggaaaaggcgaaaacccatcttgtggtgctgtgggcgtctcaagcaaataccatccctgcaaccttttggtcactgttccaaatgatcagaaatccagaggcgatgaaggcagcgacggaggaagtgaagcgcaccctggagaatgcaggccaaaaggtgtcgctggaaggaaaccctatatgcctgtcccaagcagaactcaacgacctgcccgtccttgattcaatcatcaaagaatccctgagactgtcgtcggcatcccttaacattagaacggcaaaggaggattttactctccacctggaagatggatcgtacaacatcagaaaggatgacataattgcactctacccacaactcatgcacctggaccctgaaatctacccagatcctcttaccttcaaatacgacagatatcttgatgagaatggtaagactaagactaccttctactgtaatgggctcaaactgaagtactactacatgccctttgggtcaggagccactatctgtccaggcagacttttcgcaatacacgagatcaagcaatttctgatactgatgctgtcctattttgagctggaactcattgagggacaggcaaagtgtccaccccttgatcagtctcgcgcaggtctgggaattctccccccacttaacgatatagaattcaagtacaagtttaagcatctt

SEQ ID NO: 249937 - DNA, 1512 bp, synthetic construct
  misc_feature 1..1512: note = Description of Artificial Sequence: Synthetic coding sequence
  source 1..1512: mol_type = other DNA
atgatgactacaagtttaatctggggcatcgccattgccgcttgctgttgtctatggctaatactcggcatccgccgcaggcaaactggcgaacctcccctggaaaatgggcttattccgtacttgggatgcgccttgcaatttggtgccaaccctctggagttcctcagagccaatcagaggaagcacgggcatgtgttcacctgtaaattgatgggcaagtacgtgcactttatcaccaatcccctatcctaccataaggtgctctgccatggtaaatatttcgactggaagaaattccattttgctacctccgctaaggctttcggccataggtctatcgatcccatggacggtaataccacagagaatataaacgatacctttatcaaaactctgcagggacatgcgcttaacagtcttacagaatcaatgatggaaaatcttcaaagaattatgcgcccacccgtgtcttccaattctaagactgccgcgtgggtgaccgagggtatgtactccttctgctatagggttatgttcgaggctggatatctcaccatctttggtcgggatctaactcgtcgtgacacccagaaggcacacatactcaataaccttgacaacttcaagcagttcgacaaagtcttccccgccctcgtggcaggactccccattcacatgttcagaacggctcataatgcacgggaaaagctggccgagtcccttcgtcacgagaacctgcagaaaagagaatctatttctgagttgatatcgctccgcatgttcctgaatgataccttatcgaccttcgacgacctcgagaaagctaagacccatttggtcgtgctttgggcctcacaggccaacactatccccgcgacattttggagcttgttccagatgatccggaatccggaggcgatgaaagccgctacggaggaggtcaagcgaacactggaaaatgctggtcagaaggtgtccctcgaagggaaccccatttgtctgtctcaggctgagctcaacgatctccctgttctcgactccattatcaaggagtccctaagattgtcctcggctagcttaaacatccgaacagccaaggaagacttcacacttcatctggaggacggatcgtacaacattcgcaaggatgatattatcgcgttgtacccacaacttatgcatctcgaccccgagatttatcccgacccccttacctttaaatatgatcgttatctcgacgagaatggtaagaccaagacgacattctactgtaatggcctcaagcttaaatactactacatgcccttcggttctggcgctaccatttgtcctggtaggctcttcgctatccacgaaataaagcagtttctcatcctcatgctctcatacttcgaactggaattgatcgaggggcaggcgaaatgccccccccttgaccaaagccgtgcaggcttggggatcctccctccacttaacgacattgagttcaaatataaatttaagcatttg

SEQ ID NO: 249938 - DNA, 1512 bp, synthetic construct
  misc_feature 1..1512: note = Description of Artificial Sequence: Synthetic coding sequence
  source 1..1512: mol_type = other DNA
atgatgaccacgtccctcatttgggggatcgcaatcgccgcgtgctgctgcttgtggctcatacttggaattaggagacgacaaaccggagaaccacctctggaaaatggactgattccttacttgggttgtgcacttcaattcggagcgaatccgcttgaattcctgcgagcaaaccaaagaaaacatggtcatgtgtttacgtgtaagctgatggggaagtacgtgcactttatcaccaacccattgtcctaccacaaagtgctctgccacggaaaatacttcgattggaaaaagtttcattttgcgacttccgcaaaggcattcggacatagatccattgacccaatggatggcaataccactgaaaacattaatgatacctttatcaaaacgctccaaggtcatgcgctcaattcgttgaccgagtcaatgatggagaaccttcagcggatcatgcgcccacctgtgtcatcaaactcgaaaactgcagcttgggtcaccgaaggtatgtactccttctgctaccgggttatgttcgaagcagggtaccttactatattcggcagggaccttaccaggagagatacccaaaaggcccacatactgaacaaccttgacaactttaagcagttcgataaagtgtttccagcgctcgtcgcgggactcccaattcacatgtttagaactgcgcataatgcccgggagaagttggcagagtccctgagacatgagaatctgcagaagcgcgaaagcattagcgagcttatctcgcttcgaatgtttctgaacgatactctgagcaccttcgatgacctggagaaggcaaagacgcatctcgtggttctgtgggctagccaagcaaacaccattccagcgacgttctggtccctcttccagatgatccgtaaccctgaggcgatgaaggcagcaaccgaggaagtgaagagaacccttgaaaacgctgggcagaaggtcagcctcgagggtaaccccatttgtctctcgcaagccgagctgaatgatcttccagtgcttgattccatcataaaggaatccctgcggctctccagcgcgtccttgaacatccgtactgcaaaggaagattttactctgcatcttgaagatggatcatacaacataagaaaagacgacatcatcgctctgtatcctcagcttatgcatttggatcctgagatttacccagatcccctgactttcaagtacgatcgctaccttgatgagaacggtaagactaagactaccttttactgtaatgggttgaaacttaagtactactacatgcctttcgggtcgggcgcaactatttgtcctggccgtttgttcgccattcatgagatcaagcaatttctgatccttatgctcagctactttgaattggaacttatagaaggccaggcaaagtgtcctcctctcgatcagtcgagagcaggccttggcattcttccccctcttaacgacatcgagttcaagtacaaattcaaacacctt

SEQ ID NO: 249939 - DNA, 1512 bp, synthetic construct
  misc_feature 1..1512: note = Description of Artificial Sequence: Synthetic coding sequence
  source 1..1512: mol_type = other DNA
atgatgacaacgtccttaatttggggtatagcaattgccgcttgttgttgtctctggttaatcctcggaatcaggcgcagacagacaggggagcctccactggaaaatggactcataccctatctgggttgtgccctgcaatttggggccaatccgctggaattcttacgtgctaatcagcggaaacacggtcacgtctttacatgtaagctcatgggcaaatatgtccattttatcactaatccactgtcctaccacaaggtactgtgtcacgggaaatattttgattggaagaagttccactttgccacgtccgcaaaagcattcgggcatcggagcatcgatccgatggatggcaacaccacagaaaacattaatgataccttcataaagacactccaaggtcacgcactgaactccctgactgagtcaatgatggagaacctccaaagaatcatgcgccccccggtatcctcgaactccaaaaccgccgcatgggtgactgaaggaatgtactctttttgctatcgggtcatgtttgaagccggctatttgacaatttttgggagagatctgacacggcgtgacacacagaaagcccacatcctaaataatttagacaatttcaagcagttcgataaagtgtttccagctttggtggctgggctgccaatccacatgtttcgcaccgctcacaacgcgcgggagaagctcgcggagtctctccgacacgagaacctgcagaagagagaatcaatatccgagctgatttctctgcgcatgtttctgaacgatacactgagtacctttgacgatctcgagaaggcgaaaacccaccttgtagtactgtgggccagccaagcaaatacgataccagccaccttttggtcactcttccagatgataaggaaccctgaagctatgaaggctgcaacagaggaagtcaagagaacacttgagaacgctgggcagaaagtctccttggagggcaacccgatatgtctgagccaggcagagttgaatgatctgcctgtgttggactccatcatcaaagagtctctccgcttatcttctgccagtctgaacattaggacagctaaagaagacttcacactccacctagaggacggctcatacaacatcaggaaagacgatatcattgctctgtatccccaactcatgcatctggacccggagatttatccggatcctttgacgtttaaatacgatcggtatctggacgaaaatggaaagaccaaaacaaccttctactgtaatggactgaaactgaaatactactacatgccattcggatccggtgccaccatttgccctgggcgccttttcgccattcacgaaatcaagcagttccttatcctgatgttatcttatttcgagttggagctcatcgagggtcaagcaaagtgccctcccctggaccagagccgggctggactgggaattcttcctcccctcaatgatattgagttcaaatacaaatttaagcacctg

SEQ ID NO: 249940 - DNA, 1512 bp, synthetic construct
  misc_feature 1..1512: note = Description of Artificial Sequence: Synthetic coding sequence
  source 1..1512: mol_type = other DNA
atgatgaccacatcactgatctggggaattgctattgcagcgtgctgctgcctgtggctgattttaggcatccgcagaagacagactggcgaacctcccttggagaacggtctcattccatacctcggctgcgctctgcagttcggggccaacccacttgagttccttagggcgaaccaaaggaagcatgggcacgtgtttacatgtaagctgatgggcaaatacgtccatttcatcacgaatccacttagctaccataaggtgctgtgtcacggcaaatattttgattggaagaaatttcactttgcgacatcagccaaagcttttggccacaggagcatcgaccctatggacgggaacaccaccgaaaacatcaacgacacatttattaagaccctgcagggccatgcactcaactcattgaccgaatccatgatggaaaatcttcagcgcataatgagaccacctgtgtcctctaacagcaagaccgcagcctgggtcaccgagggaatgtatagcttctgctacagggttatgttcgaggctggatatctgacaatcttcggcagagatctgactcggagggacacacaaaaggcacacattttgaacaacctggataatttcaaacaattcgataaggtttttccggccctcgtggcggggcttcctattcacatgttcagaactgcccataacgcaagagaaaaactggctgaaagcctgagacatgagaatctgcagaaaagggagtcaatcagcgaactgatctcgctgcggatgtttctgaacgacactctgtcgacattcgatgacttggaaaaagctaaaacccatctggtggtcctctgggccagtcaggcaaacaccatcccggcaaccttctggtccctttttcagatgattcggaacccagaggctatgaaggcggccacagaggaagtcaaacgaacattggaaaatgctggacaaaaagtgtcactggaaggaaatcctatctgcctctcgcaggcagagctcaacgatctgcctgtgctcgattctattatcaaggaaagcctgcgcttgagctcagcaagcctgaatatcagaacagccaaggaagactttacactgcaccttgaagacggaagttataacattaggaaggacgatatcattgcgctttatccgcaactgatgcatctggaccccgagatctacccagatcctcttacatttaagtacgacaggtacctggacgaaaacgggaaaactaagaccactttctactgcaacgggctcaaactcaagtattactacatgcctttcggaagcggagccaccatctgtcctggacgtctgttcgcaattcacgagatcaaacagttcctaatcctgatgctttcatactttgagctagaactgattgagggtcaagccaagtgccctccactcgatcaaagcagggcagggctgggtatccttccgcctttgaatgatatcgaattcaaatataaatttaaacaccta

SEQ ID NO: 249941 - DNA, 1512 bp, synthetic construct
  misc_feature 1..1512: note = Description of Artificial Sequence: Synthetic coding sequence
  source 1..1512: mol_type = other DNA
atgatgactacgtccctgatttggggtatagctatcgctgcttgttgctgtctttggcttattctgggtattagacgtcgacaaaccggagaacctccactggagaatgggcttatcccctacctgggttgcgcgcttcaattcggagcaaacccactcgagttcttgagagcaaaccaacgcaagcacgggcatgtgttcacctgtaagctcatgggaaagtacgtgcatttcataacgaaccctctttcgtatcacaaggttctttgtcacgggaagtacttcgactggaagaagttccactttgctactagcgccaaagcatttggccatagatcaatcgacccgatggatggtaatacgaccgaaaacatcaatgacacgttcattaagactctccagggacatgcattgaactccctgaccgaatcaatgatggaaaacctccagagaataatgcggcctccagtctcttccaacagcaaaactgcagcatgggtgactgaaggtatgtacagcttttgttaccgggtcatgtttgaagcaggttacctgaccatctttggcagggatctgactcgccgcgatacccaaaaagcccatatactgaacaacctggacaactttaaacaattcgataaagtctttccagcactcgtggcagggcttcccatccacatgtttaggaccgcacataatgcaagggaaaagctcgcggaatcgcttagacacgaaaatcttcaaaagagagaatccatttcagaacttatttcgctccgcatgtttcttaatgatactttgtcgacctttgacgatctggaaaaagccaagactcatcttgtggtgctttgggcatcgcaagcaaataccatcccagcaaccttttggtcgctttttcagatgatccgcaatcctgaagcgatgaaggcagccaccgaagaagtgaaacggactttggagaatgccgggcaaaaagtgtcccttgaaggcaacccaatctgcctttcgcaggcagagctgaatgacctcccagtcctggactcgataatcaaggaatcactgcgcctcagctccgcctccctcaacattaggaccgcaaaggaggacttcaccctgcaccttgaagatggttcctacaacatacgcaaggatgacataattgccctctacccccagcttatgcacctcgatccagagatatatcctgaccccctcacttttaagtacgaccgatacctggatgagaatggtaaaactaagactacgttttactgcaatggccttaagctcaaatactattacatgccattcggatcgggtgccaccatttgtccggggcgcctttttgcgatccatgaaatcaaacagtttcttattcttatgctttcctactttgagcttgaacttatcgaaggccaagctaagtgtccccctttggaccaatcgcgcgccggacttggaatccttccgccactgaacgacatcgaattcaagtacaagtttaagcatctc

SEQ ID NO: 249942 - DNA, 1512 bp, synthetic construct
  misc_feature 1..1512: note = Description of Artificial Sequence: Synthetic coding sequence
  source 1..1512: mol_type = other DNA
atgatgactacgtctcttatctggggaatcgcgattgccgcctgctgctgtctctggctgatccttgggatcagacggaggcaaaccggtgaacctccgttggaaaacggtctgataccatatctcggctgcgccctgcagttcggagcaaatcccctggagttcctgagggcaaaccagcgaaagcacggccatgtgtttacgtgtaagctgatgggaaaatacgtgcactttatcactaatccactctcctaccacaaggtgctttgccacggcaagtatttcgattggaagaagtttcactttgctacctcggctaaggcgttcggccaccgtagcattgatcctatggatggaaataccactgagaacatcaacgacaccttcattaagacgctgcaggggcatgccttgaactcattgactgaatcgatgatggaaaacctgcagagaatcatgcgccccccggtcagctcgaactctaaaaccgccgcctgggtgacggaaggaatgtacagtttctgctaccgggtcatgttcgaagcgggatacctcaccatctttggccgcgacctcacccggcgcgatactcagaaggcccacatcctcaacaacttggacaactttaagcaatttgataaagtgttcccggcactcgtggcaggactcccaatccacatgtttcgcactgcccacaatgcacgcgagaaactggcagaatcgcttagacatgagaatcttcaaaagagagaatcaatcagcgaactgattagtctccgcatgttcctgaatgacactctctccacttttgacgatttggaaaaagcaaagacccatctcgtggtcctgtgggcgtcgcaggcaaacactatcccggctaccttctggtcactgttccaaatgatacgaaatccagaggcaatgaaagccgctaccgaagaagtcaagagaaccctggagaacgcggggcagaaagtgtcactcgagggcaatccgatctgcctgtcgcaggctgagctgaacgacctgccggtcctggactccatcattaaggagagcctgcgcctgtcgagcgcctctctgaacatcagaacggcaaaagaggacttcactctgcacctggaagatggttcctacaatatcagaaaggatgacattatcgcgctgtaccctcagctgatgcacctcgacccggaaatctacccagacccactcactttcaagtacgatcggtacctggatgagaacggcaagaccaagaccaccttctactgtaacggattgaagttgaagtactattacatgcccttcggctcaggagccactatttgcccgggacggctctttgccattcatgagatcaagcagttcctcatcctgatgctcagctacttcgagttggaactcatcgaagggcaggccaagtgcccgccgttggatcaatcccgcgcaggtctgggaatacttcctccgctcaacgacatcgagtttaagtacaaattcaaacatctg

SEQ ID NO: 249943 - DNA, 1512 bp, synthetic construct
  misc_feature 1..1512: note = Description of Artificial Sequence: Synthetic coding sequence
  source 1..1512: mol_type = other DNA
atgatgaccacctcgctgatttgggggatcgcgatcgcagcctgctgctgcctgtggctcatcctcggaatccgcagaaggcagactggagaaccaccgcttgagaatggactgatcccgtacctgggctgcgcccttcagttcggagcgaaccctctcgagtttctgcgcgccaaccagcgcaaacatggacacgttttcacctgcaagctgatgggcaagtacgtgcacttcattactaacccgctgtcataccacaaagtgctgtgccacgggaaatactttgactggaagaagttccacttcgcgacctcggcgaaggcatttggacacaggtcgatagatccaatggacggaaacaccactgaaaacattaatgacacctttatcaagactctccagggacacgctctcaattccctgactgaatccatgatggaaaacctccagagaatcatgaggccccccgtctcgtcgaactcaaaaaccgccgcgtgggtcaccgagggcatgtactcgttttgttaccgtgtgatgtttgaagccggatatctgaccatcttcggacgggatttgactcgcagggatactcaaaaggctcacatcctcaacaacctcgataactttaagcagttcgataaggttttcccagctctggtggctggactgccaatccacatgtttaggactgcccacaatgcccgggagaagctcgcggagtcgctccggcatgaaaacttgcagaaacgcgagtccatcagcgagctgatctcactgcggatgttcttgaacgataccctgtcgacgttcgacgatctggagaaggcaaagactcatctggtggtgctgtgggcgtcacaagccaacaccatccctgcaactttctggtccttgttccagatgatcagaaatccggaagcgatgaaggccgccactgaagaggtcaagagaacgcttgaaaacgccggccagaaggtgagcctcgaaggcaatcctatctgcctcagccaagccgaactgaatgacctgccagtgttggactccatcattaaggagagcctcaggctttcgtcagcctcccttaacatccgcactgcaaaagaagatttcaccctgcatttggaagatggatcctacaacattaggaaggacgacatcatcgctctctacccgcaactcatgcacctggacccggaaatctaccctgacccactgactttcaagtacgaccgctacttggacgaaaatggcaaaaccaagaccaccttctactgcaatggacttaaactgaaatactactacatgccattcggctcaggcgctacgatctgtccaggccggctcttcgctatccatgagatcaagcagttcctgatcctgatgttgtcgtatttcgagcttgaactgattgaaggccaggctaagtgccccccactggaccagtcacgggcgggattgggaatcctgccgccgctgaacgatatcgaattcaagtacaagtttaagcatctc

SEQ ID NO: 249944 - DNA, 1512 bp, synthetic construct
  misc_feature 1..1512: note = Description of Artificial Sequence: Synthetic coding sequence
  source 1..1512: mol_type = other DNA
atgatgaccacaagcctgatatgggggattgctatagccgcctgttgctgcctgtggctaatcctcggcatcaggcggaggcaaacaggcgagcctccactggaaaatgggttgatcccctacctaggatgcgctctccagtttggggctaatccgctcgagttcctgagggcaaaccagcgaaaacacggccacgtttttacctgcaaactcatgggcaagtatgttcactttataacaaatcctctttcttatcataaagtgctgtgtcatgggaagtatttcgactggaaaaaatttcacttcgctacatccgccaaagctttcggtcataggtccattgatccaatggacggtaatacaacagaaaatatcaacgatacctttattaaaactttacagggccatgccctcaacagcctcaccgagtctatgatggagaatcttcaaagaattatgagaccacctgtgagcagtaactcaaaaacagctgcctgggtgaccgagggcatgtatagcttttgttacagggtcatgttcgaggccggctacctgacaattttcgggcgggatctgactagaagggatacacagaaggcccacattttaaataatctcgacaactttaaacagtttgacaaggttttccctgccctggttgctggactgcccatacacatgtttagaaccgctcacaacgctagagagaagttggctgagagccttcggcatgagaatttacagaagcgggaaagcataagtgaactcataagcttgaggatgtttctaaacgatacactgagcaccttcgatgatctggaaaaagcaaagacccacctggttgttctatgggcatcacaggcaaacaccatccccgccaccttttggagtctgttccagatgattagaaatccagaagctatgaaggctgctactgaggaagtaaagcgaacactggagaacgctggccagaaggtgtccctggagggaaatcctatctgcctctcccaggctgagctgaacgatctacctgtcctcgacagcataattaaggaatccttaagactgtcaagtgcatctctgaatataaggaccgctaaggaagatttcactctgcacctggaggacggatcctacaacattaggaaggatgatattattgctctgtaccctcaactgatgcacctggatccagaaatctatcccgatcctctaacttttaagtatgacaggtatctggatgagaacggaaagaccaagacaaccttttattgtaacggcttgaagctaaagtattattatatgcccttcggaagcggggccaccatatgccccggaagattattcgccattcacgaaattaagcagttcttaatcctgatgctaagctattttgagctggaactgatagaaggtcaggctaagtgccctcctctagatcagagcagggctgggctcggcatactgcctcccctgaacgatatcgagtttaagtacaaattcaagcattta

SEQ ID NO: 249945 - DNA, 1512 bp, synthetic construct
  misc_feature 1..1512: note = Description of Artificial Sequence: Synthetic coding sequence
  source 1..1512: mol_type = other DNA
atgatgacaacttctttaatatggggaatcgccatagcagcgtgctgttgcttgtggctcattctcgggattcgccgcagacagaccggggagccccccctcgagaatgggctgattccctatctggggtgtgcgctacaattcggtgccaatcccctcgaatttctgagggccaatcagcggaagcatggtcatgtgtttacttgcaaactgatgggcaagtacgtgcactttataacaaaccccctttcatatcacaaggtactctgtcacgggaagtacttcgattggaaaaaattccatttcgcaacatctgcgaaagcatttgggcaccggtctatagatccaatggatggaaacacaactgaaaatattaacgacacctttattaagacactgcagggtcatgccctcaacagcctcaccgagtcaatgatggaaaacttacagcgtattatgaggccacctgtaagcagcaactctaagaccgcggcatgggtcactgaaggcatgtactccttttgttaccgggtgatgttcgaggccggttaccttaccatttttggacgggacttaaccaggagggatacccaaaaggcccacattctgaataatcttgacaactttaagcagttcgacaaagtattccccgcactggtggcgggccttccaattcatatgttcagaaccgcccacaacgcaagagaaaaactggccgagtcactacgtcacgaaaacctgcaaaaacgggaatcaatttccgagctgatttctctgagaatgttcctgaatgataccttgagtacctttgatgatcttgagaaggctaaaactcatcttgttgttctgtgggccagtcaggccaacacgatccccgcaacgttttggagcttatttcaaatgatcaggaatccagaggccatgaaggcagccactgaagaggtcaagcggaccttggagaacgcaggtcaaaaagtgagtttggaggggaatccaatttgtctatcgcaagccgagctgaatgatctgccagttttggattccataattaaagaatcattgcgtctgagtagtgcatcgttaaacataaggactgcaaaggaggatttcaccctccacctggaggatgggagctacaacatccgaaaagatgatatcatcgccctataccctcaactgatgcacctggaccctgaaatttaccccgatcccctgacgttcaagtacgacaggtacctggacgagaacggtaagactaagactacattctactgtaacggcttgaaacttaagtattactatatgcctttcggcagcggggctaccatttgccctgggcggctgtttgctatacatgaaattaaacagtttctcattctcatgctgagctactttgagctggaattaattgaaggacaagcaaaatgtcctcccttagaccagtctcgagcaggtcttggcatcctccctccattaaacgacatcgaattcaaatataagttcaaacatctt

SEQ ID NO: 249946 - DNA, 1512 bp, synthetic construct
  misc_feature 1..1512: note = Description of Artificial Sequence: Synthetic coding sequence
  source 1..1512: mol_type = other DNA
atgatgactacttcactgatctggggtatagcgatcgccgcttgctgttgtctgtggctgatcttgggaatcaggcggagacagaccggagagcctccactggagaatggcctgatcccatacttggggtgcgcccttcagttcggggcgaatcctctagaatttctgcgggcgaatcagcgcaagcatggccacgtgttcacgtgcaaactgatgggaaagtacgttcacttcattactaacccccttagctaccacaaggttctgtgccacggcaagtacttcgattggaagaaattccacttcgccacctctgcgaaggcattcgggcatcggtctatagatcccatggacggtaatacgacggagaacatcaacgatacctttatcaaaacattgcaggggcacgctttaaacagtctaactgaatccatgatggagaacctgcagcgcataatgagacctcccgtttccagtaacagcaagacagccgcctgggtgaccgagggaatgtattcattttgctatagggttatgtttgaggctggttatctgacaatcttcgggagggacctgacgagaagagatactcaaaaggcacacatcctgaacaacctcgacaacttcaaacagtttgacaaggtgtttcccgccctcgtggccggtctgccgatccatatgttcaggactgcccataacgccagagaaaagctggcagagtccctgcgccacgaaaatctgcaaaagagggagtctatcagcgagttgatttcactgagaatgtttctgaatgatacactctcaaccttcgatgacctggagaaagccaaaacccatctagttgttctgtgggccagccaggctaatacaatcccagcaaccttctggagcctgttccagatgattagaaatcctgaagctatgaaggcggccacagaagaggtcaagcggactttagagaacgccggccagaaagtgtccttggagggcaatcccatatgcctgtctcaggccgagcttaacgacctgcccgtgcttgacagcatcatcaaagaaagcctgcgattgtctagcgcctccctcaacatccgcaccgctaaagaggacttcacgctacatctcgaggacgggtcttataatattcggaaagacgacatcattgccctgtatcctcagcttatgcatctggaccctgagatctatcccgatcctctaacatttaagtacgaccgatatctggacgaaaacggaaagactaaaactactttttactgcaatggattaaagctgaagtactattacatgcctttcggcagtggggcaactatttgcccaggccgactgtttgctatacacgaaattaagcagttcctgatcctgatgcttagctactttgagctcgagctcatagaaggccaggccaagtgtccccctctggatcagtccagggccggccttggtatcttgccaccactgaacgatatagagttcaagtataagtttaagcacctg

SEQ ID NO: 249947 - DNA, 1512 bp, synthetic construct
  misc_feature 1..1512: note = Description of Artificial Sequence: Synthetic coding sequence
  source 1..1512: mol_type = other DNA
atgatgactacctctctgatatggggtatcgccatcgctgcctgttgctgcctgtggctaatcctcggaataagaaggcgtcaaaccggggagccaccactggagaatggcctcataccgtacctggggtgcgccctgcagttcggcgctaatcctctggaatttctccgagctaatcagcgcaagcacggccacgtgttcacctgcaagctgatgggcaagtatgtgcacttcattaccaaccctctgagttaccacaaagtactctgccacggcaaatactttgactggaagaagtttcatttcgcgacgtctgctaaggcattcggacaccggtctattgatcctatggacgggaacacaaccgagaacatcaatgacactttcattaaaactttgcaaggccatgctcttaactcactgaccgaatcaatgatggagaacttgcagagaatcatgcggcctcccgtttcaagcaacagtaagacggcagcctgggtgaccgaaggcatgtactcattttgctatagggtgatgtttgaagcgggctatctgacaatttttggcagggatttaacccggagagatactcaaaaagctcatattctgaataacctggacaattttaaacagtttgacaaagtgttccccgcacttgtggccggattgcccatccatatgttccgaacagcacacaatgctagggagaagctcgccgaatctctccgccatgagaacctacagaagcgcgagtccatctccgagcttatctccttgcgcatgttcctcaatgacacgctctcaactttcgacgatctggagaaggccaaaacacatctggtcgtcctctgggcaagccaagccaatactatccctgccaccttttggagcctgttccagatgatccgcaaccctgaggccatgaaggctgccaccgaagaggtgaagcgtacgctggagaatgcgggacagaaggtgagcttggagggcaatcctatctgcctgtcccaggccgagctgaacgatctgccagtgttggatagcataattaaagagtcccttaggctgagcagcgccagtttgaatataagaaccgcgaaggaagacttcaccctccacctcgaggacggctcatacaacataagaaaggatgacattatagccttgtacccacagttgatgcacctggaccccgaaatttatcctgaccccctgactttcaagtatgatcgctatttggatgaaaatggcaagaccaaaacaacgttctattgtaatggactcaaacttaagtactattacatgcctttcgggtccggggcaaccatttgccccggccgactctttgccatccatgagatcaaacaattccttatactgatgctgtcctactttgagctggaattgatcgaaggtcaggcaaaatgtccgcctctggaccaaagccgcgcaggactgggaatccttcctcccttaaacgatatcgagttcaaatacaagtttaagcatctg

SEQ ID NO: 249948 - DNA, 1512 bp, synthetic construct
  misc_feature 1..1512: note = Description of Artificial Sequence: Synthetic coding sequence
  source 1..1512: mol_type = other DNA
atgatgactacctcgttgatctggggtattgcgattgcagcctgttgttgcctgtggcttatcctcgggattagaagaaggcagactggagagccgcccctggaaaacggcctcattccgtatcttggttgtgcgcttcaatttggtgctaatcctctcgaattcttgagagcgaaccaacggaagcacggacatgtttttacttgcaagctcatgggcaaatacgtccacttcataaccaaccctctctcctaccacaaagtgctgtgtcatggtaagtacttcgattggaaaaagtttcattttgctacgagcgcaaaggcttttggacaccgttcgatagatcccatggatggcaacactactgaaaacataaacgatacttttatcaagactcttcaggggcatgcactgaattcgctgaccgaatcaatgatggaaaaccttcaacggattatgcgaccgcccgtcagcagcaacagcaagactgccgcatgggtgaccgaagggatgtactcgttctgctaccgcgtgatgtttgaagcaggatacctgaccatatttggaagggacctgacccgcagggacactcagaaggcacatattctcaataatctggataacttcaagcaattcgataaggtgtttccagccctggtggccggacttccaattcatatgtttcgaactgcacacaatgcacgtgagaagctggcagagagcctcagacatgaaaacctgcaaaaaagggaatcgatttccgagttgatctcgcttaggatgtttctcaacgataccctcagcacgtttgatgatcttgaaaaagcaaagacccatctcgtagtgctgtgggcctcgcaagcgaataccattcccgcgactttttggtccctgtttcagatgataaggaatccagaagccatgaaagccgccactgaagaggtgaagcgcacccttgaaaacgcaggtcaaaaggtttctcttgaaggtaaccccatttgtctttcgcaggcagagttgaacgatcttccagtgctcgattcgataatcaaagagtctctgcggctgtcatccgcaagcctgaatatcaggactgcgaaggaggatttcaccttgcatttggaggacgggtcatacaacatcagaaaagacgacatcattgcgttgtacccccagcttatgcatctcgatcctgaaatctaccctgacccactgaccttcaaatacgaccggtacctggacgaaaacggtaaaaccaagaccaccttttactgtaatggtttgaagctcaagtattactatatgccgtttggctcgggtgcaaccatttgtcctgggagattgttcgcaatccatgagattaaacaatttctgatcctgatgctgtcatacttcgagcttgagttgattgaaggacaggcgaagtgcccaccgctcgatcaatcacgagctggactcggaattcttccgcctttgaacgacattgagttcaaatacaagtttaagcacctt

SEQ ID NO: 249949 - DNA, 1512 bp, synthetic construct
  misc_feature 1..1512: note = Description of Artificial Sequence: Synthetic coding sequence
  source 1..1512: mol_type = other DNA
atgatgactacctcactcatttgggggatcgcaatcgcggcatgctgttgcttgtggctcatccttggtattaggaggcgtcaaaccggtgaacctcctctggaaaacggtcttatcccttacctgggttgcgcactgcagtttggtgctaaccccctggaattccttcgcgcaaatcagcgaaaacatggacatgtgtttacgtgcaagctgatgggcaagtacgtgcactttatcaccaatcctctgtcataccacaaggtgctgtgccacggtaaatactttgactggaagaagttccattttgccacctccgccaaagcatttgggcatcggagcattgacccgatggatggaaacactaccgaaaacatcaatgacacctttatcaagactttgcaaggacatgcactcaattccttgaccgaatcaatgatggagaacctccaaaggatcatgcgccctccagtctcttccaattcgaaaactgctgcatgggtgaccgagggaatgtactcgttttgttaccgtgtgatgttcgaagcgggatacctgactattttcggtagggaccttactcgtagagacacccagaaggcacacatccttaacaacctggacaactttaagcaatttgataaggtattccctgcactcgtcgccggactcccaatccacatgtttagaactgcacataatgcacgcgagaaattggccgagagccttagacatgagaatctgcaaaagcgggaatccatatccgaactgatctcgctgagaatgtttcttaacgatactctttcgacttttgatgatttggaaaaggcaaaaactcatctcgtggtgctttgggcttcccaagccaacactattcctgcaacgttttggagcctctttcaaatgatccggaacccagaagcaatgaaagcagcgaccgaagaagtgaagcgtactctggagaacgctggtcaaaaagtctcccttgaaggcaacccaatttgtctgtcgcaggccgagctgaacgatctccccgtgctggactcgattatcaaggaatcccttcgcctgtcgagcgccagcctcaatattcgcaccgcaaaagaagatttcactctccatctggaagatggttcatataacataagaaaagacgacattatcgcactctaccctcagcttatgcatctggatcccgaaatctacccggacccacttacgttcaaatacgacagatatcttgatgaaaatggaaaaaccaagactactttttactgcaacggccttaaactgaagtactattacatgccctttggatccggagccaccatttgtcctggacgcctgttcgcaatccacgaaatcaagcagttccttattctgatgcttagctattttgaattggaactgatcgaaggccaggcaaaatgtcccccacttgatcaatcacgcgcaggtcttggaattctgcctccacttaacgatattgaattcaaatacaagttcaaacatctt

SEQ ID NO: 249950 - DNA, 1512 bp, synthetic construct
  misc_feature 1..1512: note = Description of Artificial Sequence: Synthetic coding sequence
  source 1..1512: mol_type = other DNA
atgatgaccacctctcttatctggggtatcgctatagctgcttgttgttgcctttggctgatcctgggcataagacgcaggcaaaccggagaacctccactcgaaaacggcttgatcccctacctgggctgcgccctgcagtttggagcaaacccacttgagtttctgagagccaaccagaggaagcacggacatgtttttacatgcaaactcatgggaaagtatgtgcacttcatcactaacccactttcataccataaggtcctttgtcacggaaaatactttgattggaagaagtttcacttcgcaacaagcgcaaaagcttttggtcataggtctattgaccctatggacggtaataccactgagaacatcaacgataccttcattaagactctccagggccatgctcttaactcattgaccgaatctatgatggaaaatcttcagaggatcatgcgccctcctgtgtcatccaactccaaaacagctgcctgggtaactgagggaatgtattctttctgctatcgcgtaatgttcgaggctggttacttgactatcttcggtagggatctgacaaggagagacacccagaaagcacatattctcaacaatctggataactttaagcagtttgacaaagtgttcccagcacttgtcgctggcttgccaattcatatgtttcgcactgcccacaacgcccgcgaaaagcttgccgaatcactgaggcacgagaatttgcaaaagagggagtccatctcagaacttatatctctgcgcatgtttttgaatgatacactgtctacttttgatgacctcgaaaaggccaagactcatctggtggtcctttgggcttcccaagcaaacactatccccgctactttttggagtttgttccaaatgatcaggaacccagaggctatgaaagcagctaccgaggaggtgaaacgcacactggagaacgccggacagaaggtgtcactcgaaggaaacccaatctgcctctcacaagctgaactgaacgacctccccgtgttggactccatcatcaaggagagcttgcgtctgagttcagctagtttgaacataaggaccgctaaggaggacttcaccttgcacctggaggatggcagttacaatatccgtaaggatgatataatcgccctgtacccacagctgatgcacttggaccccgagatctaccctgaccccctgactttcaagtatgaccgttatctggatgagaacggcaaaacaaagaccaccttctactgcaacggactcaagttgaaatattattacatgcctttcggtagcggtgccactatatgtccaggaagactcttcgccatccacgaaattaaacagttccttatactgatgttgagctatttcgagcttgaacttatcgaaggccaggctaagtgcccacctctggatcaaagccgtgcaggactcggcatcttgccacccctgaacgacatcgagttcaagtacaagttcaagcacttg

SEQ ID NO: 249951 - DNA, 1512 bp, synthetic construct
  misc_feature 1..1512: note = Description of Artificial Sequence: Synthetic coding sequence
  source 1..1512: mol_type = other DNA
atgatgactacttcactcatctggggaattgccatagcagcctgctgctgcctatggctaatactcggaatccggagacggcagacaggggaacccccacttgagaatggactcataccatatctggggtgcgcactgcagttcggggctaatcctctggaattcttacgcgccaatcagaggaaacatgggcacgtgtttacatgtaaactaatgggaaagtatgtgcatttcattacaaaccctctctcctatcacaaagtgctctgccatgggaaatatttcgattggaaaaaattccatttcgccacttctgccaaagctttcggacacaggagtattgatccaatggatggaaatactacagaaaacatcaacgatacttttataaagacactccaggggcatgccctgaattccctgacggaatctatgatggaaaatctgcagcgcataatgcggccacccgtatcttccaattcaaagacagctgcttgggtgactgaagggatgtattctttttgttacagggtgatgtttgaggctggatatttaacaatattcggacgagacctcactagaagagatacacagaaagcgcacatcttaaataatctcgataattttaaacagtttgataaagtgttccccgccctggtggcgggactccctatccatatgttcaggactgcacacaacgcccgcgaaaaactggctgaatcacttcgccatgaaaatctccagaagagggaatccatttctgaactgatatcccttagaatgttcttgaatgatactctctctactttcgatgatctggaaaaagctaaaactcaccttgtcgtattatgggcatcccaggcaaatacaataccagctacattttggtccttgttccagatgataagaaatcccgaggctatgaaagccgctacagaggaggtaaaaagaacacttgaaaacgctggacaaaaagtgagtttagaaggaaaccctatctgtctgtctcaggcagagctcaatgatctacccgttctagattctatcatcaaagaatcactcagactgtcatctgcatccttgaacatcaggacagccaaagaggattttactcttcatcttgaagatggatcttataacatccggaaggatgatatcattgcgctatacccacagctgatgcatttggatcctgaaatctatcctgatccccttacattcaaatatgaccggtatctcgatgaaaatgggaaaacaaaaacaacattttattgtaacggactcaagcttaagtattattatatgccttttggatcgggggcgacaatatgccctgggaggctttttgccatccatgaaataaaacagttccttatcttgatgctctcttactttgaactcgagcttatcgaaggacaggcgaaatgtcctcctcttgaccagagtagggccggactggggattcttccccctttgaacgacattgagtttaaatataaattcaaacatctg

SEQ ID NO: 249952 - DNA, 1512 bp, synthetic construct
  misc_feature 1..1512: note = Description of Artificial Sequence: Synthetic coding sequence
  source 1..1512: mol_type = other DNA
atgatgaccacgtcgctcatctggggaatcgctatcgctgcctgctgctgtctctggctgattctgggaatccggaggagacaaactggcgaaccgcctctggagaacggcctcatcccataccttggctgcgccctccagttcggcgcaaatcccctcgaattcctccgcgccaatcagcgaaagcacggtcacgtgttcacttgcaagctgatgggcaagtacgtccatttcattaccaatccactgagctaccacaaggttttgtgtcacggaaagtacttcgactggaagaaattccattttgctacctcggccaaggctttcggacaccgcagcattgatccaatggatggcaataccactgagaacatcaatgacactttcatcaagaccctgcaaggtcatgcgctgaactcgctgaccgagtcgatgatggagaatctgcagagaatcatgaggccaccggtgtcatctaactcaaagactgccgcatgggtcactgagggaatgtactccttttgttaccgcgtgatgttcgaggcggggtaccttacgattttcggccgcgacctgacccgccgcgatactcaaaaggcccatatcctgaacaatctggacaactttaagcagttcgacaaggtgttcccggccctcgtcgcgggtctgccgatccatatgttccggactgcccataatgccagagagaagctggccgagtccctcagacacgaaaacttgcagaagcgcgagtcgatttcggaactgatctccctgcgaatgttcctgaatgacacgctcagcactttcgatgatctggagaaagccaaaacccacctcgtcgtgttgtgggcgtcccaggcgaacaccattccggcgaccttctggtcgctttttcaaatgatccggaacccggaagcaatgaaagccgctactgaggaggtgaaacgcactctcgaaaatgctggccagaaggtttcgctcgagggaaaccccatctgcctgagccaagccgaactgaacgacctgccggtgctggattcgatcatcaaggagagcctccgcttgtcatcggcttccttgaatattcggactgcaaaggaggatttcactctgcatttggaggacggaagctacaacatccgcaaagacgacattattgcactgtaccctcaactgatgcacctggacccggagatctatccggacccgctgactttcaaatacgacagatacctggacgagaatggaaagactaagaccaccttctactgtaacggactcaagctcaaatactactacatgccgttcggtagcggagctaccatctgcccggggagactgttcgctattcatgaaatcaagcagttccttatcctcatgctctcctacttcgaactcgagctgatcgagggccaggccaagtgcccgccgttggatcaatcccgggctggactgggaatcctgccacccctgaatgacatcgaattcaaatacaagtttaagcatctc

SEQ ID NO: 249953 - DNA, 1512 bp, synthetic construct
  misc_feature 1..1512: note = Description of Artificial Sequence: Synthetic coding sequence
  source 1..1512: mol_type = other DNA
atgatgaccacctcgctcatctggggcatcgcaatagctgcttgctgttgtctgtggctcattcttggcatccgtcgccggcaaacgggcgaaccaccccttgagaatgggctgattccatatctcggctgcgccctgcagtttggagccaaccccctcgagttcctccgtgccaaccagcgcaagcacggtcatgtttttacctgcaaactgatgggtaagtacgttcacttcatcacgaacccactctcttaccacaaggtgctctgccacggtaaatactttgattggaagaagttccattttgctacttccgcaaaggccttcggccaccgctctattgatccgatggatggtaacaccacggaaaatatcaatgacaccttcatcaagaccttgcaaggccatgccctgaactccctgactgagtccatgatggagaacctacagcgaatcatgcgcccgcccgtgtcttcaaacagcaagactgcggcctgggtgaccgagggaatgtactccttctgttatcgcgtgatgtttgaagctggctatctgaccatcttcggtcgtgatctgacccgtcgtgatacccagaaggctcacattctgaacaatctggataacttcaagcagttcgacaaggtcttccccgctctcgtagcaggcctgccaatccacatgttccgcactgcccataacgcccgcgagaagcttgctgagtcgctccgccatgagaatttgcagaagagagaaagcatcagcgaactcatcagccttaggatgttccttaacgacaccctctcaaccttcgacgacctggagaaggccaagacccatctggtcgttctctgggcctctcaggccaacacgatccccgcaaccttctggtcgctgttccagatgatccgaaacccagaggcgatgaaggccgccacggaggaagtcaagcgcaccctcgaaaacgccggacaaaaggtctctctagaaggaaaccctatctgcttgtctcaagccgaactcaacgatctgcccgtgctcgacagtataattaaggagtctttgagactttcgagcgccagcctaaacattcgtaccgccaaggaggatttcaccctgcacctcgaggatggtagttacaacatccgtaaggatgacatcatcgctctgtacccccagctgatgcacctggaccccgagatttatccggatcctttgactttcaagtatgaccgttacctcgacgagaacggcaagacaaagacgacgttttattgcaatggacttaagcttaagtattactatatgccattcggttcgggcgctaccatttgccctggacgcctcttcgccatccatgaaatcaagcagttcttgatcctgatgttgtcctattttgagcttgagctcatcgaaggacaggctaaatgtcctcccctcgaccagagtcgtgccggcctcggcattctcccccccctgaacgacatcgagttcaaatacaagttcaagcacctc

SEQ ID NO: 249954 - DNA, 1512 bp, synthetic construct
  misc_feature 1..1512: note = Description of Artificial Sequence: Synthetic coding sequence
  source 1..1512: mol_type = other DNA
atgatgacgacctcgctgatctggggaatcgcgatcgcggcctgctgctgtctctggctgatcctcggtatccgccggaggcagaccggggagccgccgcttgagaatggacttatcccgtatctcggatgtgccctgcagttcggagctaacccgctcgaattcctgcgcgccaaccaaaggaaacatggccacgtgttcacttgcaagctgatggggaaatacgtgcacttcatcacgaacccactgtcataccacaaggtcctttgtcacggaaagtacttcgactggaagaagttccacttcgcaactagcgccaaggccttcggccacaggagtattgaccctatggacggaaacaccactgagaacattaacgataccttcatcaaaaccttgcaaggacacgctcttaatagcctcactgaatcaatgatggagaacctgcaacgcattatgcgtcctcctgtctcctcgaacagcaagactgcggcatgggtgactgaaggaatgtacagcttttgctaccgggtcatgtttgaggcaggctatcttactatcttcggaagggacctcaccagacgggatacccaaaaggcccatatcctcaataatctcgacaactttaaacagttcgataaggtctttccagcgctggtggcgggtttgccaatccacatgttcagaactgcacataacgcccgcgaaaagctggcagagtcgctgcggcatgaaaacctgcagaagagagaatccatctctgaactcatttcactgcggatgtttttgaacgacacccttagcaccttcgacgatctggagaaggccaagacccacctggtggtcctctgggcctcccaagccaacactatcccggcgacgttctggtcgctctttcagatgattcggaatccagaagcaatgaaagccgctaccgaagaagtgaaaagaaccctggaaaatgcgggacagaaagtctcgcttgaaggcaatccaatctgtctgtcgcaagccgagctcaatgatctgccggtccttgattctattatcaaggaatccctgagactgtcctccgcctcactcaacatccggaccgccaaagaagattttactctccacctggaagatggatcgtacaacatccggaaagacgacatcatcgccctctacccgcagctcatgcacctggacccggaaatctacccggacccactcacttttaagtacgacagataccttgacgagaacggcaagactaagactactttctactgtaatggactgaaactgaagtactactacatgccatttggtagcggagccacgatctgtccgggacgcctcttcgccatccacgaaatcaagcaattcctgatcctgatgttgagctattttgagctggagctcatcgaaggacaggctaaatgcccaccactggaccaatcacgggccggcctgggaatcctcccaccacttaacgacatcgaattcaagtacaagtttaagcacctg

SEQ ID NO: 249955 - DNA, 1512 bp, synthetic construct
  misc_feature 1..1512: note = Description of Artificial Sequence: Synthetic coding sequence
  source 1..1512: mol_type = other DNA
atgatgaccacttcactgatctggggaatcgccatcgccgcctgctgttgcctttggcttatccttggaatccgtcgtagacagaccggagaaccgcctctcgagaacggactcatcccgtacctcggatgcgccctccagttcggtgctaacccactggagtttcttcgcgcgaaccaacggaagcacggtcatgtgttcacttgcaagttgatgggcaaatacgtgcactttatcaccaatcctctgtcctaccacaaggtgctgtgtcacggtaagtactttgactggaaaaagttccatttcgctacctccgcgaaggcgttcggccaccggagcatcgacccgatggacggtaataccacggaaaacattaacgacactttcattaagacgctccaaggacatgctctgaattccctgaccgaatccatgatggagaacctccaacggattatgcgcccgcccgtgtcaagcaactccaagactgctgcttgggttactgaaggtatgtactccttttgttacagggtcatgttcgaggccggatatctgaccattttcggtcgggacctgacccgccgcgacactcagaaagcgcacatcctcaataacctcgataacttcaaacagtttgacaaggtgttcccggcactggtggcgggattgcctatccacatgttccggactgcgcataatgcccgggaaaagctcgcggagagccttaggcatgagaatctgcagaaacgggagagcatctcggagttgatcagcctcagaatgttcctcaacgacaccctgtcaacttttgatgatctggaaaaggccaagactcatttggtggtcttgtgggcctcgcaggcaaacactatcccggcaactttctggtcactcttccaaatgattagaaatccggaagctatgaaggccgcgacggaagaggtcaaaaggactctggagaatgccgggcaaaaagtgtccctcgaagggaacccaatttgcctgtcacaagccgaactcaacgacttgccagtattggactcgatcatcaaagaatctctccggctgtctagcgcctcgctgaacattcgaaccgcaaaagaagattttaccctgcacctcgaagatggctcatacaacattcggaaggacgatatcatcgcgctgtacccccagctcatgcacttggatccagaaatctaccctgacccgctcaccttcaagtacgatcgttaccttgatgaaaacggcaaaactaagactaccttctactgcaacggactcaagctcaagtactactatatgcctttcggctccggcgcgacgatctgcccggggagactgtttgcaattcacgaaatcaagcagttcctgatccttatgttgtcctatttcgagctggaactgatagaaggacaggctaagtgccctccgctcgatcaatcccgcgccggactgggaatcttgccaccattgaacgacattgagttcaaatacaagttcaagcacctg

SEQ ID NO: 249956 - DNA, 1446 bp, synthetic construct
  misc_feature 1..1446: note = Description of Artificial Sequence: Synthetic coding sequence
  source 1..1446: mol_type = other DNA
atggctgccgttcggatgttgaggacatggagtaggaacgcaggaaaattgatctgtgtaaggtacttccagacatgtggaaacgttcacgtccttaagccaaactacgtttgctttttcggctacccatcatttaagtattctcatccacatcactttctgaagacaaccgccgctcttaggggccaagtcgttcagtttaaacttagcgacattggcgaagggatccgggaggtgacagttaaagagtggtacgtgaaggagggcgatactgtttctcagtttgattcaatatgcgaggtacagtcggacaaggcctcagtcacgatcactagcagatacgacggggttatcaagaagctgtactataacttggatgatattgcctacgtcggcaaaccgttagtggatatcgaaacggaagcgctgaaagatagtgaggaagacgtggtggagactcctgccgtcagccatgacgagcacacccatcaggaaatcaagggacgcaaaaccctggcaacccccgccgttagaagactggcaatggagaacaacatcaagctgtctgaggtggtcggctccggtaaagatggaagaatcttgaaagaggacatcctcaattacctggaaaaacaaacaggagcaatcctccctccaagtcctaaagttgaaataatgcctccacccccaaaacctaaagatatgacagtgccgatcctggtcagtaaaccccctgtttttacaggcaaagacaaaactgagccaattaaaggttttcagaaggccatggtgaaaaccatgtcggctgctcttaaaatcccacacttcggatattgtgacgaaatcgacttgacagaattggtcaagcttagagaagaactgaaacctatagctttcgctcgcgggataaaactgtcttttatgcccttttttttgaaggctgcatcccttgggttgctgcagtttccaatattgaacgcttctgttgatgagaattgccagaacatcacctataaggctagccataacatcgggatcgcaatggataccgagcaaggcttaatcgttccaaacgtgaaaaacgtgcagatttgtagcattttcgatatagccaccgagttgaacaggcttcagaaattggggagcgtgagccagctgtctactactgaccttacaggaggtacattcaccctctctaatatcggaagtatcggcggaaccttcgctaaacctgtgatcatgcctcctgaggtggcaatcggagctctgggcagcatcaaagctatcccacgcttcaaccagaaaggcgaagtgtacaaggcacagattatgaatgtctcgtggtcagctgaccatagagtgatcgatggagcaacaatgagtaggttctctaacttgtggaaaagttatctggaaaaccccgctttcatgcttttggaccttaaa

SEQ ID NO: 249957 - DNA, 1446 bp, synthetic construct
  misc_feature 1..1446: note = Description of Artificial Sequence: Synthetic coding sequence
  source 1..1446: mol_type = other DNA
atggccgctgttcggatgctccgcacctggagcagaaacgcaggcaaactgatctgcgtgaggtactttcagacctgcggcaatgttcacgtgttaaaaccaaattacgtgtgtttctttggatacccaagcttcaagtactctcatccacatcacttcctcaagaccacggccgccctgagagggcaagtcgtccagttcaagttgtcagacatcggggagggtatcagggaagtaaccgtgaaagagtggtacgtgaaagagggggataccgtgtcccagtttgacagtatctgtgaggttcaatccgacaaagcttctgtgacaatcacctccaggtacgatggagtaatcaaaaagttatattacaatcttgatgatatcgcctacgtaggtaaacccctcgtcgacattgaaaccgaggcactgaaggattcagaggaggacgtggttgagacacccgccgtgagtcatgacgaacatacacatcaagagataaagggccgcaaaacccttgcaacccctgccgttaggagactggccatggaaaacaatatcaagctatccgaggtggtagggagcggaaaggatggaaggatcctgaaggaagacattttgaactatctggagaaacagacaggagccatattgccaccaagtcctaaagtggaaattatgccaccacctccgaagcccaaagacatgaccgtgccaattctcgtgagcaaaccgcctgtgtttactggaaaagataagacagaacctatcaaaggcttccagaaggcaatggtcaaaacaatgtcagctgccctcaagatcccgcatttcggctactgcgacgagatcgacctgaccgaacttgttaagctccgcgaggagctcaagccaatcgcctttgcccgcgggataaaactaagctttatgccattttttctgaaggccgctagtctaggcctcctccagttccctattctgaacgccagtgttgacgagaattgtcaaaacataacatataaagcctcacacaacatcggcatcgccatggataccgaacagggactgatagtgcccaacgtgaaaaacgtccaaatatgcagtatcttcgacatagctactgaactcaatcgactgcagaaattgggctcagtctctcagttgtctacaaccgacctcaccggcggaacctttactctgagtaatatcggctccatcggcgggacattcgctaagcctgtcattatgccacctgaagtggccattggcgccctgggcagcataaaggctatccccaggtttaaccaaaagggagaagtctacaaggcacagataatgaacgtgtcatggagcgctgatcacagggtgattgatggggcaactatgtcacgattctcaaacctgtggaagagctaccttgagaaccctgcattcatgctcttggaccttaaa

SEQ ID NO: 249958 - DNA, 1446 bp, synthetic construct
  misc_feature 1..1446: note = Description of Artificial Sequence: Synthetic coding sequence
  source 1..1446: mol_type = other DNA
atggccgcggtgaggatgctcaggacctggagtcggaacgcgggcaagcttatttgtgtacgatattttcagacgtgcggaaatgtgcatgtgctcaaacctaactatgtgtgtttctttggttacccctcctttaagtattcccaccctcatcacttcctgaaaaccactgcggccttgagggggcaggtggttcaatttaagttgtctgatatcggagagggtatccgggaagtgaccgtgaaggaatggtacgtgaaggaaggggacaccgtgagccagttcgactccatttgtgaggtgcagtcagataaagcttcagtcaccatcaccagccggtatgacggagtgatcaagaaactttactacaaccttgatgacattgcttatgtggggaagcctttggtcgacatcgaaacggaggcgctcaaggactccgaagaagatgtggttgaaacgcccgccgtctcccacgatgaacatactcaccaggagatcaagggccggaagactctggcaacaccagctgtacgaagattggcaatggagaacaacatcaagttgtctgaggtggtggggagtggcaaggatgggcgtatcctgaaggaggacatcctcaactaccttgaaaagcagacgggagctatcctccccccgagcccgaaagtggaaatcatgcctcctcccccaaaacccaaagacatgacagtacccatcctggtgagcaagccaccggtgttcacgggcaaagacaaaaccgaacctatcaaaggattccagaaggcaatggtcaagaccatgtcggctgctttgaagattcctcacttcggttactgtgacgagatagacttgaccgagctcgtgaaactgcgggaggagctcaaacctattgcgttcgccaggggcattaagctgtccttcatgccgttcttcctgaaggctgcgtcccttggattgcttcagtttccgattctgaacgcctcggtcgacgagaattgtcagaacataacctataaggcctcgcacaacataggcatcgctatggatacagagcagggcctgatcgtgccaaacgtcaaaaatgtgcagatttgtagtatcttcgacattgcgacagagctcaaccgcctacagaagctgggcagcgtgagccagctatcaacaacagacctgacgggcggcacgttcaccctgagtaatattggcagtataggtggaacatttgccaagcctgtgatcatgccgcccgaggtggccatcggcgctttgggctctatcaaggccatacctcgcttcaaccagaagggtgaggtctataaggcgcagatcatgaacgtcagctggagcgccgaccaccgcgtgatcgatggcgcaaccatgtctcggttctccaatctttggaaaagctacctggagaaccccgccttcatgctgctcgacctcaag

SEQ ID NO: 249959 - DNA, 1446 bp, synthetic construct
  misc_feature 1..1446: note = Description of Artificial Sequence: Synthetic coding sequence
  source 1..1446: mol_type = other DNA
atggcagccgtgcgtatgctcaggacctggtccagaaatgcaggaaagctcatctgtgtgaggtatttccagacatgcggcaatgttcacgttctgaaacccaattatgtttgctttttcgggtatcctagctttaaatactcccatcctcatcatttcctgaaaaccaccgccgccctgcggggtcaggtggttcagttcaaacttagcgacatcggtgagggaattagagaagtgaccgtgaaagaatggtacgtgaaggaaggagacacagtgtcacagtttgactctatttgcgaggttcagagcgacaaagccagcgtgaccatcacatccagatacgacggcgtcattaaaaaattgtactataacttggacgacattgcctacgtgggcaagcctcttgtggatattgagacagaggccctaaaggactcagaagaggatgtcgtggagactcccgcagtctcacatgacgaacatacccatcaggagatcaaggggcgcaagactttagccacccctgccgtgcgacggctggctatggaaaacaatattaaactctctgaagtggtgggatcaggaaaagacggaaggattcttaaagaggatatcttgaactatctagaaaagcagacaggcgctattctcccaccctccccaaaggtcgagatcatgcccccgcccccaaaacctaaggacatgactgttcccatccttgtctctaagccaccggtgttcaccggcaaggacaaaaccgagcctatcaaaggatttcagaaagcgatggttaaaaccatgagcgcagctttaaaaatcccccattttggctactgcgacgaaattgacctgacagaactggtgaaattgcgcgaggaattgaaaccaatagcatttgccagaggcatcaagttatctttcatgcccttctttttaaaggccgcctctctcggcctgctacagttccccatccttaatgctagtgtggatgaaaactgccagaatataacttataaagcctcccacaacatcggcatcgcaatggacaccgagcagggtttgatagtcccgaacgtaaaaaatgtccagatctgctccatcttcgacattgcaaccgaactgaacagactgcagaagctggggtcagtctctcagctatctacgactgatctgaccggggggacctttacactgtctaatattggttcaattggcggaacttttgctaaacccgtcattatgccacctgaggttgccatcggcgctcttggaagcattaaagcaataccacgatttaaccagaagggggaggtgtataaagcccaaatcatgaacgtatcgtggtcagctgatcacagggtgatcgacggcgccacaatgagccgattttcgaatctgtggaaaagctaccttgagaaccctgcctttatgctgctggatctaaaa

SEQ ID NO: 249960 - DNA, 1446 bp, synthetic construct
  misc_feature 1..1446: note = Description of Artificial Sequence: Synthetic coding sequence
  source 1..1446: mol_type = other DNA
atggccgcagtgaggatgctcagaacatggtcaaggaatgccggaaagctcatatgcgttcgatactttcagacatgcgggaacgtccacgtgctcaaacctaattacgtatgcttctttgggtatccctctttcaaatactcccaccctcaccattttcttaaaacaacagccgcactccgggggcaagttgtgcagtttaaactttcagatatcggggaagggatcagggaagttacagttaaagaatggtatgtcaaggaaggggatacagtgagtcagttcgattccatatgcgaagtgcagagtgacaaagcatccgtaacaataacatctaggtatgatggggttatcaaaaaactttattataatctggatgacatcgcctatgttgggaaaccccttgtggatatcgaaactgaagcattaaaagattccgaagaggatgtggttgagacacccgccgtaagtcatgatgagcatacacaccaggagattaaaggaagaaaaactctcgctacacccgccgtccggagacttgccatggaaaacaatataaaactcagtgaagtcgtcgggtcaggaaaagacgggcgtattctcaaagaagatatcctcaattatctagaaaaacagacaggagcaattctacctcctagtccaaaagtagaaatcatgcctcccccacccaaaccaaaagatatgactgtgcctatactagttagtaaacctcccgtatttactgggaaggataagactgaacctatcaaagggttccagaaggcgatggtaaaaacaatgagtgccgctctcaaaatacctcactttggatattgtgatgaaatcgatttaacagaacttgtcaagttgcgggaagagctcaaaccaatcgccttcgcgcgcggaatcaaactatcctttatgcctttctttcttaaagccgcctctctcgggcttctacagttccctattctcaatgctagtgttgatgaaaactgtcagaacatcacatataaagccagtcacaatatcggaatagccatggatactgaacaggggctgatagtacctaacgtcaagaacgttcagatatgtagtatcttcgacatcgcaactgaactaaacagactgcagaaactagggtccgtctctcagctcagtactactgatttaacaggagggactttcacactgtcaaatataggatctatagggggaacttttgctaaaccagtcatcatgccacccgaagtggctattggagctctaggatccatcaaggctatccctagatttaaccagaaaggagaagtttacaaagctcagatcatgaatgtctcttggagtgcggaccatagagtaatcgatggggcaactatgagtcgcttctccaacctctggaaatcatatcttgagaatccagcatttatgcttctcgatctgaag

SEQ ID NO: 249961 - DNA, 1446 bp, synthetic construct
  misc_feature 1..1446: note = Description of Artificial Sequence: Synthetic coding sequence
  source 1..1446: mol_type = other DNA
atggccgccgtgcgaatgctgagaacctggagccgaaatgctgggaagctgatctgcgtgagatactttcagacatgtggaaacgtgcacgttctcaagccaaactacgtgtgcttttttggctacccgagtttcaagtatagccatccacatcactttcttaaaactaccgccgctttgcgagggcaggtcgtgcagtttaagctcagtgatattggagagggtatacgcgaagttaccgtgaaggaatggtacgtgaaggagggcgacacagtgagtcagtttgactccatctgtgaagtccaaagtgataaagcctcagttacgatcacgagcaggtacgacggagtaatcaagaaactttactacaaccttgacgacattgcctatgtgggcaaacccctggtcgacatagagacggaggcgttgaaagattcagaggaagacgtcgtggagactccggccgtgagccatgatgagcacactcatcaggagatcaagggtaggaaaaccctcgcgacccctgccgtgagaagactggccatggagaacaatatcaagctgagtgaggtggttggaagcggtaaggacggtcggatcttgaaggaggacatcttgaattacctcgagaaacagacaggcgccatactcccaccttctcccaaagtcgaaatcatgccccctccacctaagcccaaggatatgacggtccctatactggtgagcaagccgcccgtcttcactgggaaagacaagaccgagccgatcaagggatttcagaaagctatggtaaagaccatgagcgcagcgttgaagatcccgcacttcggatactgtgacgaaattgatctgaccgagctggttaagctccgggaggagctgaagccaatagccttcgctaggggcatcaaattgtccttcatgccctttttccttaaagcggcctcactcggcctgttgcagttccctattttgaacgcctctgtcgacgagaactgtcagaacataacatacaaagcatcccacaatattggcatcgccatggatacagaacagggcttgatcgtgcctaatgtgaagaacgtacaaatttgtagcattttcgatattgcgaccgaacttaatagactgcagaagctcgggtccgtttctcagctgtccactactgatcttaccggcgggactttcacactctctaatatcgggtccataggcggcacgttcgctaaacctgtaataatgccccccgaggtggcaatcggagccctgggatccattaaggccatcccgcggtttaaccagaagggggaagtgtataaggcccagattatgaacgtgagctggagtgccgatcaccgcgtaatcgatggggccaccatgtcacggttcagcaacctctggaagtcttatttggagaatccagccttcatgcttctggacctgaag

SEQ ID NO: 249962 - DNA, 1446 bp, synthetic construct
  misc_feature 1..1446: note = Description of Artificial Sequence: Synthetic coding sequence
  source 1..1446: mol_type = other DNA
atggccgcggtgcgcatgctgcgcacctggtcccgtaatgcgggaaaacttatctgcgttagatattttcagacatgcggcaatgttcacgttcttaagcccaactatgtgtgtttctttggttacccctctttcaagtactcccacccccatcatttcctgaagacaaccgccgcacttcgcggccaggtggtgcagttcaagctcagtgacatcggtgaggggatcagggaggtgaccgtgaaagagtggtatgtgaaagagggagatactgttagccagttcgattcaatatgcgaggtacaaagtgacaaggccagtgtgactatcacatcaagatatgatggcgtgattaaaaagttgtactacaatctggacgacatagcttacgtaggaaagcctctggtcgacatcgaaaccgaggccctgaaagactccgaggaagacgtggtggagactcctgccgtttcccacgatgagcacacccaccaggagattaaaggtcggaaaacgctcgcgacacccgcggtccgcaggcttgccatggagaacaatatcaagctctccgaagttgtgggctctgggaaggacggccgaatcctgaaggaagatatcctgaattacctcgaaaaacagactggagcgatcctgccgccatcgccaaaggtggaaatcatgcctccgccccctaagcctaaagatatgaccgtccccattcttgtgtccaagcccccagtgttcacgggaaaagacaagacagagcctataaagggttttcagaaggccatggtcaagaccatgagtgctgctctgaagatccctcactttggctattgtgacgaaatagacctgacagagcttgtcaagttgagagaggaattgaagcccattgccttcgcgagaggaatcaagttgtccttcatgccttttttcctgaaagctgcatctcttgggctcctccagtttcctatcctgaatgcatctgtagatgagaactgccaaaacatcacatacaaagcctctcacaacattgggatcgcaatggacacggaacagggtttaatcgtgcccaacgtcaaaaatgtccagatctgttcaatttttgacattgccacggaactcaaccgcctccagaaactgggcagtgtgagtcaactgtccactacggacctcacagggggcactttcaccctctctaacattgggtcaattggcggtaccttcgccaagcccgtgattatgccacctgaggtggcaattggggcactcggttctattaaggctataccacgctttaaccagaagggcgaggtctataaagcccaaatcatgaacgtgagctggtcagccgaccacagggtgattgatggagcaacaatgtcccgtttttccaacctgtggaaatcctatctagagaaccctgcctttatgctgttggacctgaag

SEQ ID NO: 249963 - DNA, 1446 bp, synthetic construct
  misc_feature 1..1446: note = Description of Artificial Sequence: Synthetic coding sequence
  source 1..1446: mol_type = other DNA
atggctgccgtccgaatgctgcgtacctggtcaagaaatgccggcaaactcatctgtgtcagatattttcagacctgtggcaatgtgcatgtacttaagcccaattatgtgtgtttttttggttacccaagcttcaagtattcccacccccatcatttcctcaagactacagccgctttgagaggacaagtggttcaattcaagctctctgatataggcgagggcatacgcgaggttaccgtgaaagaatggtacgttaaagaaggggacaccgtgtcccaatttgattccatctgtgaggttcagtccgacaaagccagcgttacaatcacttctcggtacgacggcgtcatcaaaaaactgtactacaacctcgacgacatcgcatatgtgggcaaaccactggtcgacatagagacggaggctctgaaggattccgaagaggacgtcgtggagacccctgcagtgtcacatgacgagcacacacaccaggagattaaaggacgtaaaactcttgccacccccgccgtgcgccgactcgccatggagaataatattaagttgtcagaggtggtcggttccggaaaggacggccgaatcctgaaggaagacatcctgaactacctcgaaaagcaaacgggcgctattctaccgccctcccctaaggttgagataatgccaccacccccgaaaccaaaagatatgacagtgccgatcctcgtgagtaaaccccctgtgttcaccgggaaggacaagactgagccaataaaaggctttcagaaggctatggtgaagaccatgtcagccgctctgaaaattccgcattttggctactgtgacgagattgacctgaccgaactcgttaaactgcgggaagagttaaagcccatagcttttgcgcgaggaatcaagctgtccttcatgcccttcttcctgaaggccgcctctttggggcttctgcagttccccatcctcaatgcctcagtcgatgaaaactgccaaaacatcacatacaaggcatctcacaatataggcattgctatggacactgagcagggactcatcgtccctaatgtcaagaatgttcagatctgttccatttttgatatcgccacagagctcaaccgcctgcagaaactggggtcagtatcccagttgtccaccacggatttaaccgggggaacgtttaccctgtcaaatattggaagcatcgggggcacattcgccaagcctgtcatcatgcctcctgaagtggcgatcggggctcttggcagcatcaaggccatccctaggtttaaccaaaagggggaagtctacaaggcgcagatcatgaacgtgtcatggtcggcggatcacagagtaatcgacggagctaccatgagcaggttctcaaatctgtggaaaagctacttggagaacccagcattcatgctgctcgacctgaaa

SEQ ID NO: 249964 - DNA, 1446 bp, synthetic construct
  misc_feature 1..1446: note = Description of Artificial Sequence: Synthetic coding sequence
  source 1..1446: mol_type = other DNA
atggccgccgtgcgcatgcttcgaacttggagtcgcaacgctggtaagctcatctgtgttcgctactttcagacctgtggcaatgtgcacgtattgaagccaaactatgtgtgtttcttcggctaccccagcttcaagtatagccatcctcaccatttccttaagacgacggctgcacttcggggccaggtggtgcaattcaaactgtcagacattggagaaggcatcagagaagttacggtcaaagaatggtatgtgaaggagggagatactgtcagtcagttcgactctatctgcgaggtgcagtctgataaagcatcagtcacaattacctcaaggtatgatggagtgataaagaaactgtactacaacctggatgatattgcctatgtggggaagcccttggttgatatagagacagaggcattgaaagactccgaggaagacgtggtggaaacccctgccgtttcacatgatgaacacactcatcaggaaatcaaaggcagaaagaccctggccacgcctgctgtgaggcggctggctatggagaacaacatcaaactgagtgaggttgttggctctggcaaggatggacgcatcctgaaggaggacatactgaattatctggaaaagcagaccggagccatacttccccccagccctaaagtggagataatgccacctccgccaaaacctaaggacatgactgtgccaattctcgtgtccaagccccccgtgttcaccggcaaggataagaccgaacctatcaaagggtttcagaaggcaatggtgaaaacaatgagtgcagcactcaaaatcccacacttcgggtactgcgacgagattgacctcacagaactggtgaagctccgagaagagttgaagcctattgcctttgctaggggaatcaaactctcctttatgcccttctttctgaaggctgctagtctcgggcttctgcagttccccattttgaatgcctcagtagacgagaattgccagaacatcacatacaaggcctcccacaacatcgggattgcaatggataccgagcagggtctgatcgtacctaacgttaagaacgtccagatctgttccatctttgatatcgctaccgaactcaaccggctgcagaagcttgggtcagtgtcccagcttagcactaccgacctgacaggaggcacttttacattgtctaacatcggaagtataggaggcacatttgcaaagcctgtgataatgccccctgaagtcgcaataggggccctggggtcaatcaaggcaatccctcggttcaatcaaaagggggaggtgtacaaagctcagatcatgaacgtatcctggtccgctgaccaccgcgttatcgacggcgccacaatgagccgcttttctaatctctggaaatcttatctggaaaatcctgcgtttatgctcctggatctgaag

SEQ ID NO: 249965 - DNA, 1446 bp, synthetic construct
  misc_feature 1..1446: note = Description of Artificial Sequence: Synthetic coding sequence
  source 1..1446: mol_type = other DNA
atggccgcggtgcggatgctgcgaacatggtcccggaacgctggtaaactgatttgtgtcaggtacttccagacctgcgggaacgtgcacgtgctgaagccaaactacgtgtgctttttcggctatccatcctttaagtattcccacccccaccactttctgaagacaactgccgcccttcgcggccaggtggtgcagtttaaactttccgacatcggggaaggcatccgggaagtgaccgtaaaagagtggtatgtcaaagaaggagacaccgtcagtcagtttgacagcatatgtgaagtacaaagtgataaggccagcgtgactatcacgtcccgctatgacggcgtgatcaaaaaactgtattacaaccttgatgatatcgcctacgtgggcaaacccctggtggatatcgaaactgaagcgctgaaggatagtgaggaggacgtagtcgagacaccagctgtgagccacgatgagcacacgcaccaagagattaaaggcaggaaaacattggcaactccggccgtgaggagactggctatggaaaataacatcaagttgtctgaagtcgtcggttcagggaaagatggtcgcattctgaaagaagatatcctcaattacctggaaaaacaaacaggggcaatattgccacccagcccgaaggtcgaaatcatgcccccgccacccaagccaaaggatatgaccgtgcccatcctcgtgagtaaaccgcctgtatttactggaaaggataagacagaacctattaaaggattccaaaaggcaatggtcaaaacaatgagcgcagcccttaagattcctcatttcggatactgcgacgagatcgatctgactgagctcgtgaagttgagggaggaactgaaaccgatcgcattcgcccgagggatcaaactttcttttatgccgtttttcttgaaggccgcttctctgggtctcctgcaattcccaatacttaatgctagcgtggatgagaactgccagaacatcacttacaaggcctctcataacatcggcatagctatggatactgagcagggactcatcgtccccaacgtgaagaacgtccagatttgtagcattttcgacatcgccacagagttgaacaggctgcagaaactgggttctgtttcacagctgagcaccactgatttgactggcggtactttcacactttccaatatcgggagcattggcgggacattcgctaagccagttatcatgcctccggaggtggctatcggggcacttggaagtattaaggccatccctaggtttaatcagaagggagaagtgtataaagcgcagattatgaacgtgtcttggtccgctgatcacagggtaattgacggggcaactatgtcacggttctccaacctctggaagtcctatctggagaatccggctttcatgctgttggacctgaag

SEQ ID NO: 249966 - DNA, 1446 bp, synthetic construct
  misc_feature 1..1446: note = Description of Artificial Sequence: Synthetic coding sequence
  source 1..1446: mol_type = other DNA
atggccgcagttcgcatgctcagaacatggtcacgcaatgcagggaaactcatctgtgtaagatacttccagacatgtgggaacgttcacgttctgaaaccaaactacgtttgtttcttcgggtacccctcattcaaatattctcatccccaccacttcctcaagactacagctgccttacgcggacaggtggttcagtttaaactgtccgatataggagaagggattagagaagtcacagtgaaagaatggtatgtgaaagaaggagatacagtgtctcagttcgattctatctgtgaagtacaatcagataaagccagtgtaacaatcacttcccgctatgatggagtgataaaaaaactatattataatctggatgatatagcctatgtggggaaaccattggtggatatcgagacagaagcgctgaaagattctgaagaagatgtcgtggagacacccgctgtgagtcatgatgaacacactcaccaggaaataaaaggacggaaaacactcgccacacctgcggtgcgccggcttgctatggaaaataatatcaaactctctgaagtggtggggtcaggaaaggatggacggatcctgaaagaggatatccttaactatcttgaaaaacagacaggggccattctgccacccagtcctaaagtggaaattatgccaccaccaccaaaacccaaggatatgacagtccccatactcgtctctaaaccccccgtattcactgggaaagacaaaacagaacctataaaggggttccagaaggctatggtcaagacaatgtcagctgccctaaagatcccgcacttcggatattgtgacgaaatagacctaactgaactcgtgaaactacgggaggaactcaaaccaatcgccttcgcccggggaataaagctttctttcatgcctttttttctgaaggctgcgagtttagggcttcttcagttccctatactgaacgcctcggtggacgaaaattgccagaatatcacatataaagcttcccataacatcggaatcgcaatggatacagaacaggggctaattgttcctaatgtgaaaaatgtgcagatctgttccatcttcgatatcgcaacagaactaaacaggctccaaaaactcggatcagtctcacagctctctacaacagacctgacgggggggacattcacactatccaatataggatccatcggaggaactttcgctaaaccagttattatgccacccgaggtagccatcggagccctagggtccataaaagctatacccagattcaatcagaaaggagaagtttacaaagcccagataatgaacgtgagttggtctgcggatcacagggttatcgatggggccactatgtcacggttctctaacctgtggaagtcctacctcgaaaaccctgctttcatgctcctggatctgaaa

SEQ ID NO: 249967 - DNA, 1446 bp, synthetic construct
  misc_feature 1..1446: note = Description of Artificial Sequence: Synthetic coding sequence
  source 1..1446: mol_type = other DNA
atggccgccgtgcgcatgctgaggacctggtcacgaaatgctggaaaactcatttgcgtgagatatttccaaacctgtgggaatgttcacgtcctgaaacccaattacgtgtgtttttttggctacccctcatttaaatactctcacccgcaccattttcttaagacaaccgcagcgctgcgcggacaggtggtccagtttaaactgtccgacatcggagagggcatcagggaggtgacagtgaaagagtggtatgtgaaggagggtgacacggtgtctcagtttgattctatctgcgaggtacagtccgataaggcctccgtgacaattacttctcgctacgacggggtcattaagaagttgtattataacttggacgacatagcctacgtgggcaagcctcttgtcgacatagaaacagaagctctgaaagacagcgaggaggacgttgtggaaacacccgcagtgtcccatgatgagcacacacaccaagaaattaagggcaggaaaaccttggccactccggccgtgcgacgactggccatggagaataacatcaaactgtctgaggtcgttggttctggtaaggatgggcggatccttaaggaggacattcttaattatcttgaaaagcagactggggctatcctgcctccgagtccaaaagttgaaatcatgccccccccccctaaaccgaaggacatgacggtccccatactggttagtaagcctcccgtgttcaccggcaaggacaagacagagcccatcaaaggtttccaaaaggccatggtgaagaccatgagtgccgcactcaagattccccacttcggctactgcgacgagatcgacctgactgaactcgtgaaattgcgggaggaactcaaacccatcgccttcgctcggggtataaagctgtccttcatgccgtttttcctcaaagccgcctcactgggactgctgcagtttcccattcttaatgccagcgtggacgagaattgtcagaatattacttataaggcttctcacaacattggaatcgctatggataccgaacagggtctcattgtgcctaacgttaagaacgtgcagatttgtagtatctttgatattgccactgagcttaacaggctgcaaaaactcggttccgtctcccagctttccactactgatctgactgggggaactttcaccctgagtaatattgggtccatcggtgggacctttgcaaaaccagtcataatgcccccggaagtggctatcggagcgctgggcagcatcaaagcaatacctcggttcaaccagaagggggaagtgtacaaggcacaaatcatgaatgtgtcttggtccgccgaccacagggtgattgacggagccacgatgagccgattctccaatttgtggaagtcatatctcgagaatccagcgtttatgctcttggatttgaag

SEQ ID NO: 249968 - DNA, 1446 bp, synthetic construct
  misc_feature 1..1446: note = Description of Artificial Sequence: Synthetic coding sequence
  source 1..1446: mol_type = other DNA
atggcggccgtgcgcatgctcagaacctggagcaggaacgcaggaaagctgatctgcgtgcggtactttcagacgtgcggcaatgtgcatgtgctgaagccgaattacgtgtgcttctttggatatccaagcttcaagtatagccaccctcatcactttctcaagaccactgctgcgctgagggggcaggtggtgcagttcaaattgtctgacataggagagggtatacgagaggttactgtgaaggagtggtatgtcaaggaaggtgatacagttagtcagttcgacagcatctgcgaggtccagtcagacaaggcctccgtgactattacaagccgatatgatggggtaattaagaagctgtattacaacttggacgatattgcttatgttgggaagcctctggtagacattgagactgaagcgctcaaagacagcgaggaagatgtggtagaaacacccgctgtgtcccacgatgagcacactcaccaagagatcaagggccggaagacactcgctacgccggccgttcgccgcttggccatggaaaacaacatcaagctttccgaggtcgtgggatccggaaaggacgggagaatactcaaagaggatatcctcaattacctggaaaagcagacgggtgctattctcccaccatctcctaaggtggagattatgccccctccgcctaagcccaaggatatgacagtgcccatcctcgtatctaagccaccagtttttaccggcaaggataaaaccgaaccaattaaaggctttcaaaaagccatggtcaagacaatgagtgctgccctgaaaataccccatttcggttattgcgacgaaatagatttgaccgagctggtcaagctgagagaagagctcaagcctatcgcctttgcccgggggatcaaacttagttttatgccgttcttccttaaagctgcaagcctgggactgttgcagttccccatccttaatgcttctgtggatgagaattgtcaaaatatcacatacaaggcatcacataatatcggtattgcgatggacacggaacagggcctgatcgtgccaaacgtgaagaacgtacagatttgttcaattttcgacatcgccaccgagctcaaccggctgcaaaagctggggtccgtgagtcagctttcaaccactgacctcactggcggaacgttcaccctgtcaaacattggctctatcgggggaacgtttgccaagccggtgatcatgccgcccgaggtagcgatcggagccttgggctcaataaaggcaattccacgctttaatcagaagggagaagtttacaaggcccagattatgaacgtaagctggagtgccgaccaccgagttatagacggagctacgatgagtcggttcagtaatttgtggaaatcttatctcgaaaatcccgcgttcatgctgcttgacttgaaa

SEQ ID NO: 249969 - DNA, 1446 bp, synthetic construct
  misc_feature 1..1446: note = Description of Artificial Sequence: Synthetic coding sequence
  source 1..1446: mol_type = other DNA
atggccgcggtacgaatgcttaggacttggagtaggaacgctgggaaactgatatgcgtgagatattttcagacttgcggaaatgtacatgtgcttaaacctaactatgtatgtttctttgggtacccctctttcaaatattcccatccccatcacttccttaagactacagcggccctaagggggcaggtcgtccagttcaaactttctgatatcggggaagggatccgggaggttactgttaaagagtggtacgtcaaagaaggagacacagtgagtcagttcgatagtatctgcgaggtccagagtgacaaagcctcagtcactataacttctagatacgacggggttatcaagaaactctactataatctagacgacatcgcttatgttggaaaacccttggtggatatcgaaactgaggctttaaaagatagtgaagaagatgttgtggaaacacccgcagtgtctcatgatgaacatacacaccaagaaatcaaagggcgaaaaactcttgccactcccgcagtccggcgacttgcaatggaaaataatataaaactatccgaagtcgtggggtctggaaaggatggacgaatcttaaaagaagatattctgaactatcttgaaaaacagactggggccatcctgcccccctctcccaaagtggagatcatgcccccacctcctaaaccaaaagatatgactgtgcctatattagtgagtaaaccacctgtttttacaggaaaggataaaacagagccaattaaagggtttcagaaagcaatggtaaaaactatgtcagcagctctgaaaataccccactttgggtattgcgatgagatagatcttacagaactcgtgaaattgcgggaggaacttaagcccatagcttttgcccgcgggataaaactgagtttcatgccattcttcctgaaagcagcgtccctaggactcttacagttcccaatcctgaacgcttcagtggatgaaaactgtcagaacatcacttacaaagcctctcacaatatcgggatcgctatggatacagaacaaggacttatcgtccccaatgtgaaaaatgtccagatatgttcaatcttcgatattgccacagagctcaacagacttcagaagctgggaagtgttagtcaactttccactacagatcttacgggagggacatttactctttccaatatcggatccatcggaggaactttcgccaaacctgtcatcatgcctcctgaagtggcaataggggccctagggtctatcaaagccataccccggtttaatcagaaaggggaagtttataaagcccagataatgaacgtgtcctggagtgctgatcaccgcgtaatagatggggccactatgagtaggttttcaaatctctggaaatcctacctcgaaaatccagccttcatgctcctggatctgaaa

SEQ ID NO: 249970 - DNA, 1446 bp, synthetic construct
  misc_feature 1..1446: note = Description of Artificial Sequence: Synthetic coding sequence
  source 1..1446: mol_type = other DNA
atggccgccgtccgcatgctgaggacctggtccaggaatgcgggtaaactgatctgtgtgcggtattttcagacatgtggcaatgtgcacgtcctcaagcccaactatgtctgcttctttgggtatcccagctttaagtatagccacccccaccatttcctcaagaccaccgcagcgctccgcggtcaggtggtacaattcaagttgtctgacatcggagaagggattagagaggtaacggtgaaagagtggtatgtgaaggaaggtgacacggtgtctcagtttgatagcatatgcgaggtgcagagcgataaggctagcgtcaccatcacgtcaaggtatgacggagtaattaaaaagctttattataacttggatgacattgcctacgtagggaaacccctggtggatatcgagaccgaggccttgaaagactccgaggaagacgtggtagaaacaccagctgtgtctcacgatgaacacacacatcaagagattaaggggcgtaagaccctggccactccagccgttaggaggcttgccatggagaacaacataaagctgtcggaggtggtgggcagcggcaaagacggaagaatcctgaaagaagacattttgaattacctcgaaaagcagactggggccattctccctccttctccgaaggtggagattatgcccccaccccccaaaccaaaagacatgaccgtccctatcctagtctctaagccgcccgtttttacagggaaggacaagaccgaacctataaaggggttccagaaggcaatggtgaagactatgtcggccgcacttaagataccccattttgggtactgtgatgaaatcgatctcacagagctcgtcaagcttagggaagagctaaagcctattgcctttgccaggggcatcaaactgtcattcatgcccttctttctgaaagccgcctcactcggcctgttgcagttccccatcctaaacgcgagcgtggacgaaaactgtcaaaatatcacatacaaggcttcgcacaatataggcatcgccatggataccgaacagggcctgattgtaccgaacgttaagaatgtgcaaatctgctccattttcgatatcgcaaccgaactcaatagactgcagaagttgggctcagtgtcccagttaagtaccaccgacttgacaggtgggaccttcaccttgagtaacatcgggtccattggaggaacctttgcaaagcctgtgattatgccgcccgaggtcgccatcggtgcgctgggctcgatcaaagccatccctaggtttaatcaaaaaggagaggtctataaggcgcagatcatgaatgtgtcctggagcgcagaccaccgggtgatcgacggcgccactatgtcccgcttttccaatctctggaagtcttacctggaaaacccagctttcatgctgctcgatttgaag

SEQ ID NO: 249971 - DNA, 1446 bp, synthetic construct
  misc_feature 1..1446: note = Description of Artificial Sequence: Synthetic coding sequence
  source 1..1446: mol_type = other DNA
atggccgccgttcgaatgcttaggacatggagcaggaatgccggcaaattgatctgcgtcaggtactttcagacatgtgggaatgtccacgtgctgaagccaaactacgtctgcttctttggctaccctagtttcaaatatagtcatccacaccacttccttaagaccactgcagcgctgcgcggccaagtggtccagtttaagctctctgacattggtgagggaatcagagaggtcactgttaaggagtggtatgtcaaggaaggtgacaccgtgtcccagtttgatagcatttgcgaggtccaaagcgataaggcctcagtgacaatcacatcaagatacgatggggtgatcaaaaaactctattacaatctcgatgatatcgcctatgttgggaaacctctggtcgacatagaaacagaagctctgaaggactctgaagaggatgttgtggaaacccccgccgttagccacgacgaacatacgcatcaggagataaaaggacggaaaaccctcgcgacacctgccgtgcgcaggcttgccatggagaacaatataaaacttagtgaggtggtcggatctgggaaggatggacggatacttaaagaggatatcttgaactaccttgagaagcagaccggcgcaatcctcccgccttcacctaaggtcgagattatgcctccaccaccaaagcctaaagacatgaccgtacccatcctggtgtctaagcctcctgtgttcaccgggaaggataaaaccgagccaattaagggctttcagaaagctatggtgaagaccatgtcagcagcgctgaagataccacacttcggatattgtgacgaaattgacctgacggaactggtgaagctgcgcgaggagctgaagcctattgctttcgctcgcggaattaagctgtcctttatgccttttttcctgaaagctgcctctcttggactgttgcagttcccaatcctgaacgcatcagtagacgagaattgccaaaacataacgtataaggcttcacataacattggcatagccatggatacggagcaggggctcatcgttcctaacgtaaagaacgttcaaatatgtagcattttcgacattgcaaccgaactcaatcggctgcagaagcttggaagcgtatctcaactgtcaaccactgaccttactggggggacttttaccctcagtaatatcggaagtattggcgggacattcgcgaagccagtgataatgccaccagaggtcgctataggagccctgggaagcatcaaagccatcccacgcttcaaccagaaaggggaggtgtacaaggcacagatcatgaatgtcagctggagcgccgaccaccgcgtgatagacggtgccaccatgagccgcttctctaacctgtggaagagttacttggagaaccctgctttcatgctgttggacctgaag

SEQ ID NO: 249972 - DNA, 1446 bp, synthetic construct
  misc_feature 1..1446: note = Description of Artificial Sequence: Synthetic coding sequence
  source 1..1446: mol_type = other DNA
atggctgccgtcaggatgctgagaacttggtctagaaacgcgggcaaactcatttgcgtgaggtatttccaaacttgtgggaacgtgcacgtgcttaagcccaactacgtctgtttcttcggctacccaagctttaaatatagtcacccacatcatttcctcaaaacaacagctgcactgaggggacaagtcgtgcagtttaaactttcggacatcggtgagggaatccgcgaagtcacagtgaaggaatggtatgtcaaggagggagacactgtgtcccagttcgatagtatttgcgaagtccagtcagataaagctagcgtaacaattacgagccgctatgatggcgtgataaaaaaactctactataatcttgatgatattgcttacgtgggcaagccattagtggacattgagaccgaagcccttaaagacagcgaggaggatgtcgttgaaacgccggctgtgtcccatgacgaacacacccaccaagaaataaaaggacgaaaaaccctggcaacaccggccgttagaagactcgcaatggagaacaacattaagttgtccgaagtggtcggcagtggaaaagacggaaggatcctgaaagaagacatcctgaactacctggaaaaacagaccggggccatcctcccgccgtcacctaaagttgagattatgccgcctccaccaaagcccaaggacatgacagtacctatcctggtctcaaaaccgcccgttttcaccggaaaggacaagacagagccaatcaaaggcttccagaaggccatggtgaagaccatgagcgcagcattgaaaattcctcactttggttactgcgatgaaatcgatctcacagagctcgtgaagctccgcgaggagctgaaacctatcgctttcgctagaggaatcaagcttagcttcatgcccttctttctgaaggctgcaagtctggggcttctgcagtttcctatcctcaacgcaagtgtggatgaaaactgccagaatatcacctataaagctagtcacaacatcggcatcgctatggacacagagcaaggactcatcgtgcctaacgtgaagaacgtacagatctgtagtatctttgacatcgcaaccgagttgaaccgcctgcagaagttagggtctgtctcccagctcagcacaactgacctcactggaggaacctttaccctcagcaacattggatcaattgggggaacttttgcaaaacccgtcatcatgccccctgaggttgcaatcggcgccttgggaagtatcaaggctattcctagatttaaccaaaaaggcgaggtctacaaggcccaaattatgaacgtaagctggagcgccgaccaccgggtgatcgatggcgcaacaatgagccggttcagcaatctgtggaaaagctacttggagaaccctgccttcatgcttttggacctgaag

SEQ ID NO: 249973 - DNA, 1446 bp, synthetic construct
  misc_feature 1..1446: note = Description of Artificial Sequence: Synthetic coding sequence
  source 1..1446: mol_type = other DNA
atggccgcagtaaggatgttaagaacgtggagtaggaatgccgggaagctcatctgtgtgaggtatttccagacatgtgggaacgtacacgtcctgaaacctaattatgtttgcttttttggatatccttccttcaaatattcccacccacatcacttccttaaaacaactgccgcacttagagggcaagtggttcagtttaagctgtcagacatcggagaaggaatccgagaggtcactgtaaaagagtggtatgtgaaagaaggggatacagtgtcccagttcgattcaatatgtgaagtccaatcagacaaagcctccgtgacaattactagtagatacgacggggtgattaaaaaactatattacaacctggatgacatcgcctatgtcgggaaacctcttgtagacattgaaacagaagccctcaaagattcagaagaagacgtggtcgaaactcccgcagtttctcatgatgaacatactcatcaggaaataaagggacggaaaactctggctactcctgctgtgcggagactagctatggaaaacaacataaaactctccgaagtcgtagggtctggaaaagacgggcgcatcctaaaagaagatatcctcaattatctcgagaaacagactggggcaatattgcctccctcaccaaaggtggaaatcatgcctccaccccccaaaccaaaagatatgactgtgcctatcctggtgagtaaaccccctgtatttacagggaaagataagacagaaccaatcaaagggtttcagaaggccatggtaaaaacaatgtctgcagcactcaaaatccctcattttgggtactgtgatgaaattgacctaactgagctagtgaagctcagagaagaattaaaaccaatcgccttcgctagaggaataaaactctcctttatgccatttttcctcaaagccgcttctctgggactcctacagttccccattctgaacgctagtgtggatgaaaattgtcagaatatcacgtataaagcaagtcacaatatcggaattgcaatggacactgaacaggggctgatcgttccaaacgtaaaaaatgtacagatttgctccatcttcgatattgccacggaactgaaccggcttcagaagctaggatcagttagtcagctttctactactgatttaacgggggggacattcacactatcaaacataggatcaatagggggaacatttgcaaagcccgtgataatgcctccagaagtggctattggagcactgggatcaatcaaagcaataccccgattcaatcaaaaaggggaggtttacaaagcccagattatgaatgtgtcctggtcggcagatcatagggtcattgatggagcaacaatgtccaggttttccaatctatggaaatcctacctagaaaacccagcattcatgcttctggatctcaaa

SEQ ID NO: 249974 - DNA, 1446 bp, synthetic construct
  misc_feature 1..1446: note = Description of Artificial Sequence: Synthetic coding sequence
  source 1..1446: mol_type = other DNA
atggctgcggtccgcatgcttcgcacctggagtagaaatgcaggaaagctgatctgtgtcagatacttccagacctgcggcaacgtgcacgttctaaagcctaactacgtttgtttcttcgggtacccaagctttaaatactctcatccacatcactttctgaagacaaccgctgcccttagaggccaggtggtccagtttaaactgagcgatatcggtgagggtatccgggaggtgactgtgaaggaatggtacgtgaaggagggggacactgtgtctcaattcgacagcatctgtgaagtacaatccgataaagcttctgtaaccattacaagtcgctacgacggcgtgatcaaaaagttgtactacaacctggacgatatcgcgtatgtcggcaagcccctggtggacatagaaaccgaggccctgaaggactctgaggaggacgttgtggaaactccagctgtaagccatgacgaacacacacaccaggagataaaaggaaggaagacactggcaaccccagctgtgaggaggttagcaatggaaaacaacatcaagttatcagaggtggttggaagtggtaaggatggtaggattcttaaagaggatatcttaaactatctggagaaacagaccggagcaatcctgcctccatcacctaaagtggagattatgccaccacctcctaagcccaaggatatgactgtgccaatactggttagtaagccgccagtattcaccggaaaagacaagacagaaccgatcaagggatttcagaaagctatggtgaagactatgtccgcagctttgaaaatcccccattttggctattgcgatgaaatcgacctcaccgagctcgtaaagctccgggaggagcttaagccaatagcttttgccagagggatcaaactttcttttatgccttttttccttaaggctgcgtcactgggattgctacaatttcccatcctgaacgcttctgtagacgaaaactgtcaaaacatcacctataaagcatcgcataatatcgggatcgccatggacaccgaacaaggcctcatcgtgcccaatgtcaagaacgtgcagatctgctccatctttgacatcgccactgaactcaacagattgcaaaaacttggctctgttagccagctttctaccaccgacctgactggaggtacattcaccctgtccaatatcggcagtatagggggcacgttcgccaaacctgtcattatgcctccagaggtggccatcggggcactgggatctataaaggccattcctagatttaaccaaaaaggcgaggtctacaaagcccagatcatgaacgtgtcctggagcgcagatcatcgggttattgacggagcaacgatgagcagatttagcaacctctggaaaagctatctcgagaaccctgccttcatgctgcttgacctgaaa

SEQ ID NO: 249975 - DNA, 1446 bp, synthetic construct
  misc_feature 1..1446: note = Description of Artificial Sequence: Synthetic coding sequence
  source 1..1446: mol_type = other DNA
atggctgcggtgaggatgcttcggacgtggtcaagaaacgccggaaagcttatctgcgtacgctacttccagacctgcgggaatgtccacgtattgaaaccaaattacgtctgctttttcggatatccgtcgtttaagtacagccatccccaccattttctcaagaccaccgctgccctacgcggtcaggtcgtgcagttcaagctttccgacattggagaaggtatccgcgaggtcaccgtgaaggagtggtatgtgaaggagggtgacaccgtaagccaattcgattcgatttgcgaggtgcaatccgacaaagcaagtgtcaccatcacctctagatacgatggagtgattaagaagctgtactacaacctcgatgatatcgcgtacgtcggcaaaccactcgtcgacatcgagactgaggctctgaaagattccgaggaagatgtggtcgaaacaccggctgtgagtcatgacgagcacacacaccaggagataaaaggtcggaaaacccttgccactcccgcagtgcgtcggctggccatggagaataacataaagctgagcgaagtggtggggtccgggaaggacggtcgaattctgaaggaagatattctgaattacctggagaaacaaactggtgcgattttgccaccgtcaccaaaggtggaaattatgcctcccccccccaagcctaaggatatgacagtgcctatactggtctccaaacctcctgtcttcacagggaaggataagacagagccaataaaagggttccagaaggcaatggtaaaaacgatgtctgccgccctgaaaattccgcacttcggctactgtgacgagatcgatcttacagagttagtgaaactgagagaggaactgaaaccgattgcattcgctcggggcatcaagttaagcttcatgccgttcttcctcaaggcagcatccttgggcttgctgcaatttccgatcctgaatgcatcagttgacgagaactgtcaaaatataacatacaaggcctcccataacattggcatcgctatggacaccgagcaagggctaatagtccccaacgtgaagaatgtccagatttgcagcatcttcgatatcgccacagaactgaaccgtttacaaaagctcgggagcgtaagtcagttgtctacgactgatctcactggaggcacgtttacgttgtccaacatcggaagtattgggggcacctttgcgaaaccggtgattatgccacccgaggtcgctatcggggccctgggcagtatcaaggcgatcccccggttcaaccagaagggggaggtttataaggcgcaaataatgaatgtctcgtggagcgctgaccacagagttatcgacggagcgactatgtcgaggttctctaacctttggaaaagctacctcgaaaaccccgcttttatgctgctggatctcaag

SEQ ID NO: 249976 - DNA, 1446 bp, synthetic construct
  misc_feature 1..1446: note = Description of Artificial Sequence: Synthetic coding sequence
  source 1..1446: mol_type = other DNA
atggccgctgtgaggatgctgcgcacgtggtcacggaatgccgggaagttgatctgtgtgcgctactttcagacgtgcggaaacgtgcatgtccttaagccgaattacgtgtgcttctttggatacccatcgttcaagtattcacacccacatcatttcctcaagactaccgcagcgctgagaggccaagttgtgcagtttaagctcagcgacatcggagagggaatccgggaagtgactgtgaaggagtggtacgtgaaagaaggcgacaccgtcagccaattcgacagcatttgtgaagtgcagtccgataaagccagcgtgaccattacctcacgctacgacggagtgatcaagaagctgtactacaacctcgacgacattgcctacgttggcaaaccgctcgtggacatcgaaactgaggctctgaaagattcggaggaggacgttgtggagactccggcagtgtcccatgacgagcacacccaccaagagatcaagggacgaaaaaccctggctacccctgccgtgaggcggctggctatggagaacaacatcaaactgtcggaagtggtgggatccggaaaagacggacgcatcctcaaggaagatattctgaattaccttgagaagcagaccggtgctatcctgccaccgtccccaaaggtcgagattatgcctccaccacctaagccgaaggacatgaccgtccccatcctggtgtctaagccgcctgtctttactggaaaggataagactgaaccgatcaaggggttccagaaagcgatggtcaagactatgtccgctgcactgaagatcccccacttcggttactgcgacgaaatcgatctgaccgaactcgtcaaactgcgcgaagaactgaaaccgattgcgtttgcacgggggatcaagctgtccttcatgccgttcttccttaaggccgcatcgctcggcctgctgcagttccctatcctcaatgccagcgtggatgaaaactgccagaacatcacttacaaggcgagccacaacatcggaatcgcgatggataccgaacaaggattgatcgtgccgaacgtcaaaaacgtccagatctgctcgatcttcgacatcgccactgaactcaacagattgcagaaactcggatcggtgtcacaactgtcgaccacggatctgactggtgggactttcaccctctcaaacattggctcaatcggaggtacctttgccaagccagtgatcatgcctccggaagtcgccatcggagccctgggctcgattaaggcgatcccgagattcaatcagaagggcgaggtgtacaaagcccaaatcatgaacgtgtcctggtccgcggatcaccgggtcatcgacggcgcaactatgagccgcttctcgaatctttggaagtcctatttggagaatcccgccttcatgctcttggatctgaag

SEQ ID NO: 249977 - DNA, 1446 bp, synthetic construct
  misc_feature 1..1446: note = Description of Artificial Sequence: Synthetic coding sequence
  source 1..1446: mol_type = other DNA
atggccgcggtgcgcatgctgaggacatggtctcgcaatgcaggaaagctgatctgcgtgcggtactttcagacctgcggcaatgtccatgtgcttaagcctaattatgtgtgtttcttcggctacccctcctttaagtacagtcacccccaccatttcctgaaaactaccgcggcactcaggggacaggtggtacagtttaagcttagcgatatcggagagggaattcgcgaggtgaccgtgaaggagtggtatgttaaagaaggagatacagtctctcagtttgattctatctgcgaggtgcagtcggataaagctagtgtgacaatcacttctaggtacgacggggtgattaagaaactgtactacaatctggacgacatcgcctacgttggcaaaccattggtcgacatagagaccgaagccctgaaggattccgaggaggacgtggttgagacgccagccgtgagtcacgatgagcatacccatcaagagattaaaggacgaaaaactctggcgactccagcagtgcgaagattggccatggaaaataacatcaaactttccgaggtagtgggatctggcaaagatggcagaatcctcaaggaagatatactgaactatctggagaaacaaacaggcgctatcctacctcccagccccaaagtggagattatgcctccgcccccgaaacccaaggacatgactgttcctatcctggtgagcaagccaccagtgttcaccggcaaggataaaaccgagcctatcaagggatttcaaaaagccatggtgaagaccatgtcggcagcgctaaaaatccctcactttggctattgcgacgagatcgatctgacagaactcgtgaaattacgcgaagaacttaagccaatcgcatttgctagaggcatcaagctcagctttatgcctttttttctgaaagccgcttctcttgggctccttcagtttccaatccttaacgcgagtgtcgacgaaaattgccaaaacattacctataaggccagccacaacattgggattgccatggatactgaacagggtttaatcgtcccgaatgtgaaaaatgtccagatctgcagcatctttgacattgcaacagagctgaataggcttcagaagctgggcagtgtgtcacaacttagcacaaccgacctgactggcggaacattcaccttaagcaacatcggatcaatcgggggtacgtttgctaagccagtaattatgcctcccgaagtggctatcggcgcgctgggaagcatcaaagcaataccccgctttaaccagaaaggagaggtttataaagctcaaatcatgaacgtttcttggagtgccgatcaccgcgtgatagacggtgccacaatgtcccgtttcagcaacctgtggaagtcatatttagagaaccctgccttcatgttgctggaccttaaa

SEQ ID NO: 249978 - DNA, 1446 bp, synthetic construct
  misc_feature 1..1446: note = Description of Artificial Sequence: Synthetic coding sequence
  source 1..1446: mol_type = other DNA
atggccgccgttagaatgttacgtacctggagccggaacgccggcaaactgatctgcgttagatacttccagacctgcggcaatgtgcatgtgttgaagccgaattacgtgtgcttctttggctatccttcgtttaagtattcacaccctcaccatttcttgaagaccaccgctgctctcaggggacaggtggttcaatttaaactgagcgacatcggtgaggggatccgcgaggtgacagtcaaagaatggtacgtcaaagaaggggacaccgtcagccagttcgattccatttgcgaagttcaatccgacaaagcaagtgtgacaataacaagcaggtacgatggagttatcaaaaaactttattataacctggacgacatagcatacgtcggcaaacctctggtggacatcgaaacagaggcactcaaggacagcgaggaagacgttgtggagactccagcagtcagccatgatgaacatactcaccaagagatcaagggaagaaaaacgctagcaacaccggctgtccgcaggctcgccatggaaaacaacataaagttgagcgaagtggtaggctctggaaaagacggccggatcctgaaagaggacatcctgaattatctcgagaagcaaacgggcgctattctgccaccgtctcctaaagtagaaatcatgccgcctccaccgaaaccgaaagatatgacagtgccgatccttgtgagtaagccgccagtctttacaggaaaagacaagacagaaccaatcaaaggctttcaaaaggctatggtcaagacaatgagcgcagcgttgaaaatcccccatttcggatactgtgacgaaatcgatcttaccgagttggttaagctgagagaggagctgaagccaatcgcttttgcacgcgggattaagttgagcttcatgccattctttcttaaagcagccagcctgggactgcttcagtttccgattctgaatgcctccgtggatgagaactgccagaacatcacatataaggccagccataacatcggcatcgcaatggacacagagcaaggattgatagtgccaaacgtcaaaaacgttcagatttgttcaatctttgacattgctaccgaacttaaccgcctgcaaaaattaggttccgtctcccagttaagcactaccgatcttaccggaggcactttcactttgtctaacatcggatccatcggaggaacctttgcgaaaccagtcataatgcctcctgaagtggccattggcgctctgggcagcatcaaagccatcccgaggttcaaccagaagggcgaagtttataaagctcaaatcatgaatgtgagctggagcgccgatcacagagtgatcgatggggcaaccatgagcagattctctaatttgtggaaaagctacctggaaaaccctgcattcatgctcttggatctgaag

SEQ ID NO: 249979 - DNA, 1446 bp, synthetic construct
  misc_feature 1..1446: note = Description of Artificial Sequence: Synthetic coding sequence
  source 1..1446: mol_type = other DNA
atggctgctgtgagaatgttacggacctggtcaaggaatgctggcaagctgatttgcgtcaggtacttccagacctgtgggaatgtccatgtgctgaagcctaactacgtatgcttcttcggatacccaagtttcaagtacagccacccacatcactttctgaaaactacagctgccctgcgcgggcaggtcgtgcagttcaagttgagtgatatcggtgagggcataagggaggtgaccgttaaggagtggtatgttaaagaaggcgacaccgtcagccaatttgattccatctgtgaggtgcagtcggacaaagcatctgttactatcacatctcggtatgacggcgtgatcaagaaactctactataacctggatgacattgcatatgtcggaaaaccattggtcgatatagagactgaggcgttgaaggatagcgaggaggacgtagtggaaactcctgctgtcagccacgatgaacatacacaccaggagatcaagggccggaagactcttgcaacgcccgccgttagaaggctggctatggagaacaatatcaagctttctgaagtcgtgggcagtggaaaggacggtcggattctcaaggaggacattctgaactatttggaaaaacagaccggcgctatccttcccccatcgccgaaagtggaaatcatgcctccaccaccaaagcccaaagatatgactgtccccatcctggtttctaagccacctgtgtttacaggcaaagacaaaaccgaacctattaaggggtttcagaaagctatggtcaagaccatgagcgccgctctcaagatcccccacttcggctattgcgatgagatcgatttaactgaattggttaaacttagagaagagctaaagccgatcgcctttgctcgggggatcaaattaagtttcatgcccttctttctgaaggctgcaagcctggggttgctgcagtttcccattctgaacgccagtgtggacgagaactgccagaacattacttacaaagcatcccacaacattgggatcgccatggacacagagcaggggcttatagtccccaatgttaaaaacgtgcagatttgtagtatctttgacatagccacagaactgaacagactgcagaaattgggctcagtgtcgcagctctccactaccgacctcaccgggggcacatttaccctcagcaacattgggtctattgggggcacttttgccaagccagtgatcatgccccccgaagtggcaatcggtgctcttggctctatcaaggccattccaagatttaaccaaaaaggggaagtgtacaaggcacagatcatgaacgtctcatggtccgcagaccaccgtgtcattgacggagccaccatgagcaggttctccaacctgtggaagtcctatctggagaatcccgccttcatgctcctggacctgaag

SEQ ID NO: 249980 - DNA, 1446 bp, synthetic construct
  misc_feature 1..1446: note = Description of Artificial Sequence: Synthetic coding sequence
  source 1..1446: mol_type = other DNA
atggcggccgtgcggatgctccgtacgtggtcaaggaacgcaggcaagctgatttgcgtacggtacttccagacctgcggcaacgtgcacgtcctgaagccgaactacgtgtgcttctttggatacccgagcttcaaatattcccatccccaccactttttaaagacaacagctgccctgagggggcaggtggtccaatttaagctgtcagacatcggggaagggattcgcgaagtgacggtcaaggagtggtacgtgaaagaaggtgacaccgtgagccagttcgattctatttgtgaggttcagagcgataaggctagtgttactattactagcagatacgatggcgtgataaaaaagctgtattataatctagacgacattgcgtacgtgggaaaacccttagtggatatagagactgaggctttgaaggacagcgaggaggatgtggtggagacccccgcggtgtctcatgacgaacacacacatcaagaaataaaggggaggaagactctggcgaccccagctgtgaggcggctggctatggagaacaacatcaagctgtctgaggttgtgggtagtggtaaagatggaagaattctcaaagaggatattctcaactacctggagaagcaaactggtgccattctgccaccgtctcctaaggtggagattatgcctccccctccaaaacctaaggacatgacagtgcccatcctggtaagtaaaccccctgtgttcaccgggaaggacaagactgagcccattaagggattccagaaagcaatggtgaagaccatgagtgcagcactcaaaatcccgcacttcggctactgtgacgagatcgatctgactgagctcgtgaagttgagagaggaactgaaacctatagcgtttgcaaggggaattaagttgtcttttatgcccttcttcctcaaagcggctagcttgggccttctccagttcccgattctgaacgcctcagtcgacgagaattgccaaaatatcacctataaagcctcccacaatattgggatcgccatggataccgagcagggccttattgtgccaaacgtcaaaaacgtgcagatttgctccattttcgatatcgcaaccgaattgaacaggctgcagaaactcgggtccgtgtctcagctgagcactactgatcttaccggtggtaccttcacattgagtaacattggctctattggtggcacctttgcaaagccagttatcatgccccctgaggtcgctatcggagcgctcggaagtatcaaagccataccgaggtttaatcagaaaggagaggtgtacaaagcacaaatcatgaacgtctcatggtctgccgatcatagagtcatagatggggccacaatgtcaaggttcagtaacctatggaaatcttaccttgagaatccggcatttatgttactggaccttaaa

SEQ ID NO: 249981 - DNA, 1446 bp, synthetic construct
  misc_feature 1..1446: note = Description of Artificial Sequence: Synthetic coding sequence
  source 1..1446: mol_type = other DNA
atggccgcagtccggatgcttaggacctggtcgcgaaatgcgggaaaactgatatgcgtgagatactttcaaacttgtggtaacgtgcatgtgctcaaacctaactacgtctgcttcttcggttacccttcgtttaagtactcgcatcctcatcattttcttaagactaccgcagcacttcgcggacaagtggtccagtttaagctttcggacattggagaaggaatcagagaggtgaccgtgaaggagtggtatgtcaaagagggcgataccgtttcacaattcgacagcatttgtgaagtgcagtccgataaggcatccgtgactattacctcaagatacgacggagtgattaagaagctgtactacaaccttgatgacatcgcctacgtgggaaaaccacttgtggatatcgaaactgaagcactcaaggatagcgaagaagatgtggtggaaactccggcagtgtcacacgatgagcacacccatcaagagattaagggccgtaagaccttggcaaccccagccgtgcgcagactggctatggaaaacaacataaagctgtcagaagtggtcgggtcaggaaaagatgggaggattctcaaagaagatattctgaactatcttgaaaagcaaaccggtgcaattcttccaccatccccaaaggtggaaatcatgccgcctccacccaaaccaaaagacatgaccgtgccgattctcgtctccaagcctcccgtgtttactggaaaggataagaccgagcccattaaggggttccagaaggcgatggtcaaaaccatgtcagcagccctcaagatcccccattttggatactgcgatgaaattgacctgacggaacttgtgaagctgagggaagaactgaagcctatcgcatttgctcggggtatcaaattgagctttatgcctttctttttgaaagcagcgtcgctggggcttcttcaatttccaattctgaatgcgtcggttgatgagaattgtcagaacataacttacaaggcctcccacaacatcggtattgcgatggacactgagcaaggcctgattgtgcctaacgtcaagaatgtgcaaatctgtagcatctttgacattgcaactgagctcaatcgactgcagaagctgggatccgtctcgcagcttagcacgactgatctcactgggggaaccttcactctgtccaacatcggttcgattggcggtacgttcgctaagcctgtcataatgcctccagaggtggccatcggcgcactgggctccatcaaagcaataccccggtttaaccaaaaaggagaagtctacaaggcacagatcatgaatgtcagctggagcgccgatcaccgcgttattgatggtgccaccatgtcgagattttctaatctttggaagtcctacctcgaaaaccctgcattcatgttgctggacctcaag

SEQ ID NO: 249982 - DNA, 1446 bp, synthetic construct
  misc_feature 1..1446: note = Description of Artificial Sequence: Synthetic coding sequence
  source 1..1446: mol_type = other DNA
atggcagcagtgcgcatgttgaggacctggagcagaaacgccggcaagctgatttgtgttagatatttccagacctgcgggaacgtccatgtccttaagccaaattacgtgtgtttcttcggttatccatccttcaaatattctcatccacatcactttctgaaaactactgccgccctgcgggggcaggtggtgcagtttaagctctccgacataggcgaagggattcgggaggttacagtgaaagagtggtacgtgaaggaaggcgataccgtgagccagttcgatagcatctgtgaggtgcaaagcgataaggcaagcgtgaccattacgtctcgctacgatggtgtgataaagaagctgtattataatctggacgatatcgcctacgtggggaagcctctggttgacattgaaacagaggctttgaaagattctgaggaggatgtcgtcgaaacccccgctgtatcccacgacgagcatacacatcaggagattaagggtagaaagacgctcgccacacccgcagtccgccggttggccatggagaataatatcaaactttcagaggtggtaggcagtggcaaagacggaagaatcctgaaagaggacatcctcaattacttggagaaacagaccggagccatactgcccccatcccctaaagttgagatcatgccaccccctcccaagcccaaagatatgactgtgccaattttggtgtctaagccgcctgtcttcaccggaaaagataaaacagaacccatcaagggatttcagaaggccatggtcaagactatgagtgctgctctcaaaatcccccactttggatactgcgacgagatcgatctgaccgaacttgtgaaactccgcgaggagctcaagcctatcgcgttcgcacgggggattaaattgagtttcatgcctttttttctgaaggccgcttccttggggctcctgcagttccccatcctgaatgcttcagtggatgagaactgtcagaatatcacttataaggccagccacaatattggaatcgctatggacacggaacagggcttgatcgtccctaacgtgaagaacgtccagatctgttccatctttgacatcgctacagagctgaatcggcttcaaaagttgggatccgtgtctcagctctctactaccgatctgaccggcggaacgttcacgctctcaaacatcggcagtatagggggcaccttcgcaaagccagtgataatgccaccagaagtagctattggcgccctggggagcattaaagcaatccccaggttcaaccagaagggggaagtctacaaggctcagataatgaacgtgtcatggtctgccgaccaccgcgtcatagatggggctactatgagccgcttctccaatttgtggaaatcttatctggaaaaccccgcctttatgcttctggatctgaaa

SEQ ID NO: 249983 - DNA, 1446 bp, synthetic construct
  misc_feature 1..1446: note = Description of Artificial Sequence: Synthetic coding sequence
  source 1..1446: mol_type = other DNA
atggcagcagtgcgcatgctgcgcacatggagccgcaacgctggaaaacttatatgcgtccggtactttcaaacttgtggaaatgttcatgtcctgaagccaaactacgtttgcttttttgggtacccgagcttcaaatactctcacccccaccacttcctgaaaaccaccgctgcgctgagaggacaggtcgtccagtttaagctgtctgatatcggggaaggtattcgggaagtgaccgtgaaagagtggtacgtcaaggaaggcgataccgtgtcacaatttgacagcatctgtgaagtgcagagcgacaaggcgagcgtcacaatcacatcacgctacgatggcgtgatcaaaaagctgtactataatcttgacgatattgcttacgtaggcaagccgttggttgatatcgaaaccgaggccctgaaggatagtgaggaggatgtggtggagacccccgctgtgtcccatgatgagcatacccaccaggagatcaagggcaggaagactttggctacccctgctgttaggaggctagcgatggaaaataacattaaattgtcagaggtcgtggggtcaggaaaggatggcagaattctcaaagaggatattttgaattacctggagaaacagaccggggctatcttacccccaagccctaaagttgagatcatgcctccccctcctaaacctaaggatatgactgtgccaatcctcgtcagcaagcccccagttttcaccggtaaggataaaactgagccgatcaaaggatttcagaaggccatggtgaaaaccatgagcgccgctttgaagatcccccactttggatactgcgatgagatcgatctcaccgaacttgtgaaactgagagaggagctcaagcccattgctttcgccaggggaattaaactcagttttatgcctttctttcttaaagccgcatccttgggattacttcagtttcccatcctgaacgcgagcgtggatgagaactgccagaatatcacatacaaagcatcacacaatatcggaatcgcaatggataccgaacagggactcatcgtgccaaacgttaaaaacgttcagatttgcagcatctttgacattgccaccgagcttaacaggctgcaaaagttaggatcagtcagccagctgagtaccacagatttgaccggcggaacctttacactctctaacatcggcagtattggtggaaccttcgcaaaaccagttattatgcctcctgaagtggcaatcggagcactgggcagcatcaaagcaatccctagattcaaccagaaaggcgaagtatataaggcacagatcatgaacgtgagttggagcgctgatcacagggtgatcgatggcgctaccatgtctagattctccaacctgtggaagagttacctggagaaccccgccttcatgcttctggatctgaag

SEQ ID NO: 249984 - DNA, 1446 bp, synthetic construct
  misc_feature 1..1446: note = Description of Artificial Sequence: Synthetic coding sequence
  source 1..1446: mol_type = other DNA
atggcggcggtacggatgctgagaacttggtctagaaatgcgggcaagctgatttgcgtacggtatttccaaacttgtggaaatgtgcacgtattgaagcccaattatgtctgtttctttggctaccccagctttaagtactcccacccccatcacttcttaaaaaccaccgcagccctgcgcggtcaagttgtgcagttcaaactaagtgatatcggtgaggggatacgcgaagttaccgtgaaggagtggtatgttaaagagggagacaccgtcagtcaattcgattccatctgcgaagtccagagcgataaggctagcgtcaccattacgtcccgatatgatggggttattaagaaactgtactacaatctggatgacattgcctacgttggtaagccccttgtcgacatcgagacggaagcccttaaggattccgaagaggacgtcgttgagacccctgcagtgtcacacgacgaacatacacaccaggagattaagggacggaaaaccctagccacaccagccgtgcgcaggctggcaatggagaacaatatcaaactctccgaggtggtggggtctggaaaggatgggcgaattcttaaggaggacattctgaactatctcgagaaacagaccggtgccatactgcctcccagcccaaaggtcgagatcatgcctcctccacccaagcccaaagacatgactgtgcctattctagtgagcaagccacccgtgtttaccggcaaagacaagaccgaacccattaaagggtttcagaaagccatggtgaagacgatgtccgccgcgttgaaaatcccccattttgggtactgcgacgagattgacctcactgaattggtcaagctccgcgaggagctgaaaccaatagcatttgccagagggattaagctgtcctttatgccattctttctgaaggctgcaagtctgggcctactccagtttccaatactgaacgcgtccgttgatgagaattgtcagaatattacatataaagcatctcataacatcggcatcgcaatggatacggagcagggcctgattgtgcccaacgtcaagaacgtacaaatctgcagcatattcgatattgccaccgaattgaatcgcctgcagaagctgggatcagtttcgcagttgagtacaacagacctgactggcgggaccttcaccctgtccaatattggatccattggagggacgttcgccaagcccgtaatcatgccccctgaagtagctatcggtgcgctcgggagcatcaaggcaattccccgcttcaatcagaaaggtgaagtgtataaagcccagattatgaatgtttcttggtctgcagaccaccgtgtgatcgacggggcgaccatgtccagatttagcaacctttggaaatcatatctcgaaaacccagcttttatgctgctggatttgaag

SEQ ID NO: 249985 - DNA, 1446 bp, synthetic construct
  misc_feature 1..1446: note = Description of Artificial Sequence: Synthetic coding sequence
  source 1..1446: mol_type = other DNA
atggccgctgtccggatgctgaggacttggtcccggaatgcaggaaaattaatatgcgtccgatattttcagacttgtgggaatgtgcatgtactgaaacccaattatgtatgtttttttggatatccttctttcaaatactcacaccctcaccacttcctcaaaacaacagccgccctgcgaggacaggtcgttcagtttaaactgtccgatatcggggaaggaatccgagaggtcactgtcaaggaatggtacgtaaaagaaggagatacagtttctcagtttgattccatctgtgaggttcagtcagataaagcgtctgtgacaattacttcccgatacgatggggttataaagaaactttattacaacctcgatgatatagcatacgtgggaaaaccactagtggatattgaaactgaagctcttaaagatagtgaagaagatgtggtcgaaactccagcagtctctcacgatgaacacactcaccaggaaatcaaagggaggaaaacacttgcaactcctgctgtacggcggttagctatggaaaataatatcaaactctcagaagtcgtgggatctgggaaagatgggcgaatactgaaagaagatatcctcaattacctggaaaagcagacaggggccatcctgcctccatcgccaaaagtcgagattatgcccccaccccctaagccaaaagatatgactgtacccattcttgtctctaaaccaccagtatttactgggaaagataaaacagaaccaattaaagggtttcagaaagcaatggtaaagacaatgtctgcagctctaaaaataccacattttggatattgtgatgaaatagacctcacagaactcgtgaaactaagagaagagctcaaacccatagcttttgcacgggggatcaaacttagttttatgcccttttttctgaaagcagccagtcttggactcctacagttccccatattaaacgcttctgtggacgaaaattgccagaacattacttataaagcctcccataacatcgggatagctatggatactgaacagggactgatcgtgcccaacgtgaaaaacgtgcagatatgtagtatttttgatatagccacagagctgaacaggctccagaaactggggtccgtatcacagctgtctactactgatctaactggaggaactttcactctctctaatatcgggagtatcggagggactttcgccaaaccagttatcatgccccccgaagtggctatcggagcattagggtccataaaagctattccccggttcaaccagaagggagaagtgtataaagcacagataatgaacgtttcatggtccgccgatcatcgggtgatagatggagcaacaatgtcccgcttctccaacctttggaaatcgtacttagagaaccctgcgtttatgctcctcgatttaaaa

SEQ ID NO: 249986 - DNA, 1446 bp, synthetic construct
  misc_feature 1..1446: note = Description of Artificial Sequence: Synthetic coding sequence
  source 1..1446: mol_type = other DNA
atggccgccgtgcggatgcttagaacttggtcccgaaacgccggtaagctgatctgtgttcgctatttccagacttgcgggaacgtgcacgtgttgaagcctaattatgtatgtttcttcgggtatcctagcttcaaatattctcacccccatcatttcctgaagaccaccgctgccctgcgcggacaggtcgtgcagtttaagctgtctgatattggcgaggggattcgggaggtcaccgtcaaagagtggtacgtgaaagagggggataccgtgtcccagttcgactccatttgcgaggtccaatccgacaaagcctccgtcactatcacctcccggtacgatggcgtcatcaaaaagctgtattataatctcgatgatattgcatacgttggaaaaccactcgttgatattgaaacagaggctctgaaagactcagaagaggatgtcgtggagacgcctgccgtctctcacgatgagcacacccatcaggagataaaaggaaggaaaacattggccacccctgcagtccgccgcctcgctatggaaaacaacatcaaattgtcagaagtcgtcggatctgggaaggacggacggatcctgaaggaggatattctcaactacttggagaagcagacaggggctatccttcccccatcccccaaggtggaaatcatgcctcccccgcccaagccaaaggatatgaccgtcccaatcctggtatccaagcctcccgtttttaccggaaaggacaagaccgaacctatcaaaggctttcagaaggccatggtcaaaacgatgagcgctgcactcaagatcccgcatttcgggtattgcgatgaaattgacctgaccgaattggtgaagctccgagaagagctcaagcctatagcattcgctcggggaataaaactgagcttcatgccatttttcctcaaagccgcctcccttggactgctccaattccccatcctgaatgcttccgtggacgagaattgccaaaacattacctacaaggcctcccacaatatcgggatagcgatggacaccgagcaggggctcattgtgccgaacgtgaaaaacgtccagatatgctcaatcttcgatatcgctaccgagctgaatagactgcagaagctgggctccgttagtcagctgagtacaaccgatcttactggggggactttcacgctgagcaatatcggctctatcggtggaacctttgctaagcccgtgattatgcccccagaggtcgcgataggtgctctgggcagcataaaggctattcccagatttaaccagaagggcgaagtgtacaaggcacagataatgaacgtgtcttggagtgccgaccacagagtcatcgacggtgctactatgagtcgattctcaaatctttggaaatcttatctggaaaatccagcgtttatgctcctcgacctgaaa

SEQ ID NO: 249987 - DNA, 1446 bp, synthetic construct
  misc_feature 1..1446: note = Description of Artificial Sequence: Synthetic coding sequence
  source 1..1446: mol_type = other DNA
atggcagctgtaaggatgctgcgcacttggagcagaaacgctggcaaacttatctgcgtgagatactttcaaacttgcggtaatgtgcatgtgttaaagcctaactacgtctgtttctttggatatccttcgtttaaatactctcatccccatcactttcttaaaacgacagctgccctaagaggtcaggtggtgcagttcaaactgtccgacatcggcgagggcatccgagaagtgacggtgaaagaatggtacgtgaaagagggagacaccgtgtcccagtttgattccatttgcgaggtccagtccgataaggcctcagtcactataacatcgcgctacgacggcgtgatcaaaaagctgtattataacctggatgacatagcctacgtcggaaagcccctggtcgacatcgagaccgaggccctgaaggacagtgaggaagatgtggtggagactccagcagtctctcacgacgaacatacccaccaggagattaaaggtcggaaaactctcgccaccccggcagtacgccgtttggcaatggagaacaatatcaagctgagtgaggtagttgggtctggcaaggacggtcggattcttaaagaggacatactgaactatttggagaagcagactggagccattctgcctccttcaccaaaggtcgaaattatgcctccccccccaaagccaaaggacatgacagtacccattctggtgtccaagccccccgtgttcacgggaaaagacaaaaccgaacccattaaaggctttcagaaggccatggtcaaaacgatgtctgcagcgctcaaaataccacatttcgggtactgtgacgagatcgatcttactgagttggtaaagctgcgggaggagctgaagcctatcgctttcgcgcgcggcatcaaattgtcctttatgccattttttctgaaggcggcttccttaggactactgcagtttcctatcctgaatgcatcggtcgatgaaaattgccagaatatcacatacaaggcctcccacaatatcggcatcgctatggacaccgagcaggggctcatcgtccccaatgtcaagaacgtgcagatttgttcaatatttgatattgctacggaactgaaccgacttcaaaaactgggaagcgtatcccagctcagcacaactgatctcaccggggggacatttactttgagcaacattggaagcattggcggtacttttgccaaacccgttattatgcccccggaagtggcaatcggtgccctcggatctatcaaggcgattcccaggttcaatcaaaagggcgaagtgtacaaggctcagattatgaacgtgagttggtcagctgaccatagagtcatagatggtgccacaatgtcgaggtttagcaacctctggaagtcctacttggaaaatcctgcgtttatgctgctggacctgaag

SEQ ID NO: 249988 - DNA, 1446 bp, synthetic construct
  misc_feature 1..1446: note = Description of Artificial Sequence: Synthetic coding sequence
  source 1..1446: mol_type = other DNA
atggcagcagtacggatgcttagaacatggtctagaaacgcaggaaaactgatctgcgtgcggtatttccaaacttgtggtaacgtgcacgtcctgaagccgaactatgtgtgctttttcggatatccatccttcaagtattcccacccccaccacttcctcaagaccacggcggcgttaagaggacaggtggtgcagttcaagctgtccgatatcggggaaggaatacgcgaggttactgtcaaagaatggtatgtgaaagagggggacaccgtttctcagttcgactcaatatgtgaggtacagtccgacaaggcatccgtgacgatcacatcacggtacgacggcgtgatcaagaaactgtactataatttagatgacattgcgtatgtggggaaaccattggtggacatcgaaactgaggccctgaaggatagtgaggaggatgtagtcgagacaccagcagtgtcccatgatgaacacactcaccaggaaattaaaggccggaaaaccttagccaccccagccgtcagacgcttggctatggagaacaatatcaaactgtccgaggttgtcgggagcgggaaggacggacggatcctgaaggaggacatcctgaactatctggagaagcagacaggggctattctcccaccgtcacccaaagttgagataatgcccccacccccaaagcccaaggatatgacggtgcccatactggtgtcaaaaccccccgtcttcaccggcaaggataagactgagccaataaaaggcttccagaaggcaatggtgaaaactatgtctgctgctctcaagataccacacttcggatactgcgatgaaatcgacctgactgagttggtaaagctccgcgaggaactcaaacccatcgcctttgcccgtgggatcaaattatctttcatgcctttcttcctgaaagccgctagcctgggcctactgcagtttcccatcttgaacgcttcagtcgatgagaattgtcagaatataacatataaagcgtcccacaatattgggattgcaatggatactgagcagggcctaattgtgcccaatgtgaagaatgtgcaaatctgttccatcttcgatattgcaacagaactgaataggctacagaagctcgggtctgtctcccagctaagtactactgatctgacgggtggaacatttacacttagcaatattggctctatcggtggcactttcgctaaacctgtcatcatgcccccagaggtagccatcggggccttgggcagtattaaggcgatcccacgcttcaatcagaaaggagaggtctacaaagcccagatcatgaatgtttcctggtccgcagatcatagggtgatcgatggagcaaccatgtctcgattcagtaacctatggaaatcttatctggagaatcccgcattcatgcttctggacctgaag

SEQ ID NO: 249989 - DNA, 1446 bp, synthetic construct
  misc_feature 1..1446: note = Description of Artificial Sequence: Synthetic coding sequence
  source 1..1446: mol_type = other DNA
atggccgctgtgcgcatgctccgaacttggtcaagaaacgctgggaaacttatctgtgtacgctatttccagacatgtggaaacgttcacgtattaaaacctaactacgtctgtttcttcgggtatccttcattcaagtatagtcacccccaccattttctcaaaacaacagctgcactgagggggcaggtggtgcagttcaaactttccgatataggggaagggattcgagaagtgacagtgaaagaatggtacgtcaaggaaggggatacagtgtcacagtttgattcaatctgcgaagtccagagtgataaagcttcggtcactatcacatcaagatatgatggagtcatcaaaaagctgtattataatctagatgatattgcttacgtggggaaaccattagtagatatcgaaactgaagcattaaaagatagtgaagaggatgttgtggagacaccagctgttagtcatgatgaacatactcaccaggaaattaaagggcgaaaaacactggccactcctgccgtaagacgcctcgctatggagaacaatataaaactctcagaagtagtcgggtcaggaaaagatggaaggatccttaaggaagacatacttaactatctggaaaaacagacaggggccatattacccccctctcctaaagtagaaataatgccccctcctcccaaacccaaggatatgactgtgcccatcctcgtaagtaaacctccggtatttacaggaaaagataaaacagaacctatcaaaggatttcagaaagccatggtaaaaactatgtcagccgcccttaaaatcccccactttgggtactgtgatgaaatcgatctgacagagctcgttaaactgcgggaggaactcaaaccaattgcttttgcaagggggatcaaactttcctttatgcccttttttctcaaagctgcctcactcgggcttttacagttccctatactgaacgcctccgttgacgaaaactgtcagaatataacttataaagcctcccataacataggaattgccatggatactgaacagggactgatcgtgcctaacgtgaaaaatgtgcaaatatgctcaattttcgacatcgctacggaacttaaccggctacagaagctcgggtcagtgtctcagctatccactactgatcttactgggggaacatttacactatctaacataggatcgatcgggggaacatttgctaaacctgtgatcatgcctcccgaagtggccataggagcactgggaagtatcaaagccataccaagatttaaccagaaaggggaggtgtacaaagctcagataatgaacgtgagttggtccgccgatcaccgggtaatcgacggggcgacaatgagtaggttttccaatttgtggaaatcttatttggaaaaccccgccttcatgcttctagacctgaaa

SEQ ID NO: 249990 - DNA, 1446 bp, synthetic construct
  misc_feature 1..1446: note = Description of Artificial Sequence: Synthetic coding sequence
  source 1..1446: mol_type = other DNA
atggcggcagtgaggatgctgcggacatggagcaggaatgccggtaagctgatctgtgtgcggtacttccaaacgtgtggtaatgttcacgtgctgaaacccaactacgtctgcttctttggctaccctagcttcaagtactcccaccctcaccattttcttaagacaacggcagcgctgcgggggcaggtggtgcagtttaaactcagtgatatcggcgaaggaatccgcgaagtcaccgtgaaggaatggtatgtaaaagaaggcgacaccgtctcccagtttgacagcatctgcgaggtgcaaagcgacaaagcgtcggtgactattacttccagatacgacggagtgatcaagaagctgtactacaatctggatgacattgcttacgtcggcaagccgctggtggatatcgaaacggaagccctgaaggattcggaggaggacgtcgtggagacccccgcggttagtcatgatgaacacactcatcaggagataaaaggcagaaagaccttggctaccccagcagtccggcgcctggctatggagaacaacatcaagctgtcggaggtggtgggaagcggcaaggacggaaggatcctaaaagaagatatccttaactatttagaaaagcagaccggtgctatcctgcctccaagccctaaagtggagattatgcccccccccccaaagccgaaggatatgacggtgcctattttggtgagtaagccgccagttttcaccggcaaggacaaaacagagccgattaaaggatttcagaaagccatggtgaaaactatgtctgcagcgctgaaaattccacatttcggctactgtgacgaaattgatctcacagagttagttaaactcagagaagaactcaagccaattgccttcgcacggggcataaagttatccttcatgcctttcttcctgaaagccgctagcctggggttgctccaattccccatcctgaacgcctcagtggacgaaaactgtcagaacatcacttacaaagccagccataatatcggtatcgccatggatacagaacagggcttgatcgtcccaaacgtgaagaacgtgcagatttgcagcatatttgacatcgctacagagctcaacagactgcagaagcttggaagtgtgtctcagctgtctacaactgacttgacaggtggcactttcactctgtctaacataggtagtataggagggaccttcgccaagcctgtaatcatgccgccagaggtggctatcggcgccttaggatcaattaaagcgatccccagattcaaccagaagggcgaggtatataaagcgcaaattatgaacgttagctggagcgccgaccacagagtcattgatggcgccacgatgagtcgcttctcgaatctctggaagtcctatttagagaaccctgctttcatgctgctggatctcaaa

SEQ ID NO: 249991 - DNA, 1446 bp, synthetic construct
  misc_feature 1..1446: note = Description of Artificial Sequence: Synthetic coding sequence
  source 1..1446: mol_type = other DNA
atggccgctgtaaggatgctaaggacatggagtcgcaacgcagggaaactgatatgtgtacgatatttccagacatgcgggaatgttcatgtgctgaaacccaactacgtctgcttttttgggtatccttctttcaaatattctcacccccaccattttcttaaaacaacagccgccctcaggggacaggtcgtccagtttaaactctccgatattggggaagggataagggaagtcacagttaaagaatggtatgttaaagagggagatacagtttctcagttcgattctatctgtgaagtacagtccgataaagcctctgtgactataacatcaagatatgatggagtcataaagaaactttattacaatcttgatgatattgcgtacgttgggaaaccactcgtcgatatcgaaacagaagcccttaaagattccgaagaagatgtagtcgaaacacccgctgtgtcccatgacgaacatactcatcaggaaataaaaggaagaaagacactcgccacgcccgcagtcaggaggctagctatggaaaataatattaaactctccgaagtggtcggatccgggaaagatgggaggattcttaaggaagatatcttaaactatctggaaaagcaaacaggggccatactgcctccctctcccaaagtagagattatgccacctccccctaaacctaaagacatgactgtccccatcttggtgagtaaacctcccgtcttcacagggaaagataaaactgagcctattaaggggtttcagaaagcaatggtgaaaacaatgtctgcagcgctcaagatacctcatttcgggtattgtgatgaaatcgatctaactgaacttgtgaaattacgcgaggaactgaaacccatcgcttttgccaggggaatcaaactgtcatttatgccattttttttaaaagccgcgtccctgggactactccagttccccatacttaacgcttcagttgatgaaaattgtcagaacatcacatataaggcaagtcataatataggaatagcaatggatactgaacagggacttattgtacccaacgtcaaaaatgtgcagatatgttctatcttcgatatcgccacagaactcaaccgacttcaaaaattaggatcagtgtcccagctgtccactacagatctgacagggggaacatttacactgtctaacataggatcgattgggggaacattcgctaaaccagtcatcatgccccccgaagtagcgatcggggcactcgggtcaatcaaagctattcctaggtttaaccagaaaggagaagtgtacaaagcccagatcatgaatgtgtcttggtctgccgatcatcgggtcatagatggagcgactatgtctcgattctccaacctctggaaatcctacttggaaaacccagcttttatgttgctcgatctaaag

SEQ ID NO: 249992 - DNA, 1446 bp, synthetic construct
  misc_feature 1..1446: note = Description of Artificial Sequence: Synthetic coding sequence
  source 1..1446: mol_type = other DNA
atggcagctgttagaatgctcagaacttggagcaggaacgcaggcaagctgatctgtgttcgatacttccagacctgtggcaatgtgcatgtcttgaagcccaactacgtgtgctttttcggctatccgagtttcaagtactcacatccccaccacttcctgaagactacagcagccctcaggggccaggtggtgcagttcaagcttagcgacatcggcgaaggcatccgggaagtaactgtgaaagagtggtacgtgaaggaaggagacacagtgtcccagtttgattcaatttgtgaggtccaaagcgacaaggccagcgtgactattaccagtcgttatgatggcgtaatcaaaaaactgtattacaatctggacgacatagcctatgtcggcaaacctttagtggacatcgaaactgaagcacttaaggactctgaggaggacgtagtggagacaccagccgtgtctcacgacgaacatacacatcaggagattaagggacgcaaaactcttgcaactcccgcggtccgccgtttggcaatggagaataatatcaaactgtcggaggtggtgggttcaggcaaggacggtagaattctgaaagaggacatactaaattatctggaaaaacagacaggggcaatcttgccccccagcccaaaagtcgagattatgccccccccaccaaaacccaaggacatgactgtgcctatcttggttagtaagccccccgttttcactggaaaagacaagaccgaacccataaaaggattccagaaggcaatggtcaagacaatgtcggctgctctcaaaattccccactttggttactgtgacgagattgatctgaccgaactggttaagttgcgcgaagagctgaagccaatcgcttttgccaggggcataaaacttagttttatgcctttctttcttaaggcagcaagcctgggactactccagtttcctatcttaaatgcttcggttgacgagaattgccaaaatatcacttacaaagccagccacaacataggaatagctatggacactgaacaggggttgattgtgcccaacgtcaaaaacgtacagatctgcagcatcttcgatatagccactgaactgaacaggctacagaagttgggatctgtttctcagttgagcaccactgacctgactggcgggacatttaccctctctaatatcggaagtattggaggtaccttcgcaaagcccgtgattatgccaccagaggtcgccatcggggccttgggtagtattaaggccatcccaagatttaaccagaagggcgaagtttacaaggcacagattatgaatgtatcttggtcagctgaccatagagtgatagacggggcgaccatgagtagattctctaatttatggaagtcatacctcgagaatccagcctttatgttgctggaccttaaa

SEQ ID NO: 249993 - DNA, 1446 bp, synthetic construct
  misc_feature 1..1446: note = Description of Artificial Sequence: Synthetic coding sequence
  source 1..1446: mol_type = other DNA
atggctgctgtgaggatgttgagaacctggtccaggaacgctggaaaacttatttgcgtgcggtattttcagacatgcggcaacgttcatgttctgaagccaaattacgtttgcttcttcggatacccttctttcaagtactctcatccgcatcattttctgaagacaactgcggcactccgcgggcaagtcgtgcagtttaaactcagcgatataggtgaagggataagggaggtgaccgtaaaagagtggtacgtgaaggagggagatactgtgagccagtttgactcaatatgtgaggttcagagtgacaaggcttctgtcaccattacatctcggtacgacggtgtgatcaagaaattgtactataacctggacgatatcgcatatgttgggaagccacttgtggatatagagacagaagccctgaaggattctgaggaggacgtggtcgagactccagccgtcagccacgacgaacatacccaccaagagatcaaaggccgcaagactttggccacaccggcggtgcgacgccttgccatggagaacaacatcaaacttagcgaagtggtaggatcaggtaaagatggaaggatcctcaaagaggacattttgaactatcttgaaaaacagaccggagccattctgcctccctcaccaaaagtcgagattatgccacctccacctaagcctaaagatatgactgtcccaatccttgtgtcaaagcctccagtatttacgggaaaggacaagactgaacctatcaaaggatttcagaaagcaatggttaaaaccatgtccgcggctcttaagatccctcattttggctactgtgacgagattgatctgacagaacttgttaagctgagagaggaactgaaacctatcgctttcgcacgcggcatcaaactttcattcatgccattctttctgaaagccgctagcctgggactgctgcagttccctattctcaacgcttccgtggatgagaattgtcagaacattacatacaaagcctctcacaatataggcatcgctatggacaccgagcagggcctcatcgtgcctaacgtcaagaatgtgcagatatgcagcatttttgacatcgcaaccgaactcaaccgcctccagaagttgggaagcgtgagccaactgagtacaaccgatctcactgggggaaccttcactttgtcgaacatcggcagtattggcggcaccttcgctaagcccgtgatcatgccacccgaagtggcaatcggcgcactggggtctatcaaggctattccaaggttcaaccaaaaaggggaggtttacaaggctcaaatcatgaacgttagctggtccgcagaccacagggttatagacggcgcgactatgtccaggttctctaacctctggaaaagctacctggagaaccctgcatttatgttgctggaccttaaa

SEQ ID NO: 249994 - DNA, 1446 bp, synthetic construct
  misc_feature 1..1446: note = Description of Artificial Sequence: Synthetic coding sequence
  source 1..1446: mol_type = other DNA
atggctgcggttagaatgcttagaacctggagccgtaacgccgggaaattgatctgtgtgcgatatttccagacatgtggaaatgtgcacgtcctgaaaccaaattacgtttgtttctttggctaccccagcttcaaatattcacacccacaccacttccttaagacaacagcagccctccgtggacaggtggtgcagtttaagttgagtgacattggggaagggatccgtgaagtgaccgttaaggaatggtacgtgaaggagggcgacaccgtgagccagttcgattccatctgcgaggtgcagtctgacaaggcaagcgtgaccattacctcccggtatgacggagttatcaaaaaactctattataatctcgacgatatcgcatacgtaggcaagcccctagtcgacatcgagacagaggcactgaaggattctgaagaagacgtcgtggagaccccagctgtcagtcacgatgagcacacccaccaggagataaaggggcggaaaactttggccaccccggctgtgcggcgactggctatggaaaacaacataaaactgagcgaggttgtggggagcggcaaggacgggcgtatcttaaaagaggatattctgaactatctcgaaaaacagaccggggccatactgccacctagtccgaaggtagaaatcatgcctccaccaccaaagccaaaggatatgaccgtccctattctcgtttctaagcccccagtgttcacaggaaaggacaaaacagagcccattaaaggatttcagaaggccatggtgaagaccatgtcagccgccctcaaaattccacactttggatattgtgatgagattgaccttactgagcttgtgaagctcagagaggaacttaagcctatagctttcgccagggggatcaagctgtcttttatgcccttcttcctcaaggccgcttctctgggattactgcaattcccaatcttaaatgcttcagtcgacgagaactgtcagaacatcacctacaaggcctcacacaacatagggattgcgatggacaccgagcagggtctgatagtgccaaacgtgaagaatgtacagatctgctctatctttgacatagccaccgagctgaatagattgcagaagcttgggtctgtgtcacaactctccaccaccgaccttacaggaggaacattcacactctctaatattgggtcaatcggagggacgttcgccaaaccagtcatcatgccacccgaagtggctattggcgcacttggatccatcaaagcaatcccgcgatttaatcagaaaggggaggtgtataaagcccaaataatgaatgtttcctggtctgctgaccaccgggtcatcgacggcgcgactatgtcccggttttctaatttatggaagagctatctggagaacccagctttcatgctgctggacttgaag

SEQ ID NO: 249995 - DNA, 1446 bp, synthetic construct
  misc_feature 1..1446: note = Description of Artificial Sequence: Synthetic coding sequence
  source 1..1446: mol_type = other DNA
atggctgccgtgcgaatgttacgcacttggtctcgcaatgccgggaaattaatatgcgtgcggtatttccagacatgtggaaacgtgcatgtccttaagcccaactatgtctgcttctttgggtatccttcgttcaagtattctcatccccaccatttcctaaaaactacagcagcacttcgggggcaggtggttcagtttaaactttctgacatcggagagggaatccgggaagtgactgtaaaagagtggtatgtgaaagaaggggatacagtctcgcagttcgattctatatgtgaggtacagagtgataaagccagtgtcacaatcacttccaggtatgatggagtgatcaagaaattatactataatcttgacgacatcgcctacgtggggaaacctctagtagacatagaaactgaagcactcaaagactcggaggaggatgtcgtagagacacccgccgtatcccatgatgaacacacacaccaggaaattaaagggcgaaaaacactggccactccggcagtgcgccgtctggccatggaaaacaacatcaaattgagtgaagtagtcggatccgggaaggatgggcggattttaaaggaagacatactaaactatctagaaaaacagacaggggcgatactgcccccgtctcctaaagtggaaatcatgccaccaccaccaaaacccaaggatatgacagtgcctatattggtatcaaagcctcccgtctttacagggaaggataaaactgaacccattaaagggttccaaaaagccatggtgaaaactatgtcggccgccctaaaaataccccattttgggtattgtgatgaaatagatctgactgaactcgtgaaactccgggaagagcttaagcccatagctttcgccaggggaatcaaactgagttttatgcccttcttcctcaaagcagcatccctgggactgctccagttccctatcctgaatgcctcagtggatgaaaattgtcagaatatcacttataaagcttctcataacataggaatcgccatggatactgaacaggggctcatcgtccccaacgtaaaaaacgtgcagatatgtagtatctttgatattgctacagagctgaacaggctccagaaacttggatcagtgtcacagctgagtacaactgatctcactggaggaacttttacacttagtaatattgggtctattggggggacttttgcaaaacctgttattatgccccccgaagtagctattggagcactcgggtcaattaaagctatcccacggtttaatcagaaaggagaggtctataaagcgcagataatgaatgtgtcttggtctgctgatcatcgagtgatcgatggggccacaatgtcaagattctccaatctgtggaagtcgtatctcgaaaaccctgcattcatgctgctggacttaaag

SEQ ID NO: 249996 - DNA, 1446 bp, synthetic construct
  misc_feature 1..1446: note = Description of Artificial Sequence: Synthetic coding sequence
  source 1..1446: mol_type = other DNA
atggccgcagtccggatgctacgcacgtggtctcggaacgccgggaaactcatctgcgtgagatatttccaaacttgtggaaatgtccacgtgttgaagcctaattatgtttgcttctttggatacccctcctttaaatattctcatcctcaccactttctgaaaacaactgcagctctcaggggacaggtggttcagtttaaactctccgatatcggagaagggattcgagaggtgacagttaaggaatggtatgtcaaagaaggggatacagtgagtcagttcgattcgatctgtgaggtccaatctgataaagctagtgtaacaatcacttcaaggtatgatggagttataaaaaaattatattacaatctagatgatattgcatatgttgggaaacctttggtggacatcgagacagaagcactcaaagattccgaagaggatgtagtcgaaacacccgctgtgtcccacgatgagcatacacaccaggaaatcaagggacggaaaactctcgctacacctgccgttcgacgcctggccatggaaaataatattaaactttctgaagtggtcggatctgggaaggatgggagaatcctcaaagaagatattctaaattatctcgaaaaacagacaggagccatactaccaccttcccccaaagtggaaatcatgccccctccacctaagcctaaagatatgacagtgcccatcctcgtttctaaaccccctgtgttcacgggaaaggataaaacagaacctataaagggatttcagaaagcaatggtgaagacaatgtccgcagcattaaaaataccacattttgggtattgtgatgaaatcgatctaacagaacttgtgaagcttcgggaggaacttaaacccattgcatttgcacggggaatcaaactttccttcatgccctttttcctaaaagccgctagtctcgggctccttcagtttccaatcctcaatgcatccgtagatgaaaactgtcagaacattacatacaaagccagtcataatatagggatagcaatggatacagaacagggactcattgttccaaatgtaaaaaatgtgcagatctgcagtatatttgatatcgccactgaactgaaccggctccagaaactcggaagtgtctctcagttatcgacgacagatctcactgggggaacatttactctgtctaatatcgggtcaatcggagggacttttgcaaaacccgtgataatgccaccagaagtcgccatcggagccctggggagtatcaaagctattcctcgatttaatcagaaaggagaagtgtacaaagcacagataatgaacgtaagttggtccgccgatcaccgcgtcattgatggagctactatgagtaggttctctaatttatggaaatcctatcttgaaaaccccgctttcatgctcctggacttaaaa

SEQ ID NO: 249997 - DNA, 1446 bp, synthetic construct
  misc_feature 1..1446: note = Description of Artificial Sequence: Synthetic coding sequence
  source 1..1446: mol_type = other DNA
atggcagcagtacgtatgctcagaacatggtcgagaaatgccggaaagctgatctgcgttcgatacttccagacgtgcggcaacgttcatgtactgaaaccgaattacgtgtgtttcttcggatacccctctttcaaatactcccatcctcaccacttcttgaaaaccacagccgcactccgcgggcaggttgtgcagttcaaattatctgatatcggtgagggcattagagaagtaacagtaaaggagtggtacgtcaaagagggggacaccgtgtctcagtttgattccatctgcgaggttcaatctgacaaagccagcgtcacaataacttcccggtatgatggcgtgattaaaaagctttactacaatttggatgacatcgcctatgtgggaaaacctctggttgacatcgaaacggaagctcttaaagactccgaagaggacgtcgtcgaaacccccgcagtgagccatgatgaacacacccatcaagagatcaaaggccgcaaaactctggctaccccagctgtcagacgtctggctatggaaaataacattaaactgagtgaagtggttggcagcgggaaggatggtaggatcctgaaggaagatatcttgaattacctggagaagcagacgggcgccatcctccccccatctccaaaagtcgagatcatgccacctcctcctaaaccaaaagacatgacagttcccattttggtgtctaaaccccctgttttcacggggaaggataaaaccgagccaatcaagggcttccaaaaagctatggtcaaaacaatgtccgcggcattaaaaattccccacttcggatactgcgacgaaatagatctgaccgagctagtcaaactaagagaggagctcaaaccaatcgcgtttgcccggggtatcaagctctcgtttatgcccttcttccttaaggcagcctctctcggtctcctccagtttcccattctgaacgcatctgttgacgaaaattgccagaacataacgtacaaggctagtcacaacataggaatagccatggataccgaacagggactcatcgtgccgaatgtcaaaaatgtccagatctgcagcatattcgatatcgccaccgagctgaaccgcttacagaagctgggttctgtgtcacagctctcgacgacggacctcactggcgggactttcacgctgtccaacatcggctccattggaggtacttttgctaaaccagtcatcatgccacccgaagtcgccattggcgccctggggtctattaaggccattcctaggttcaatcagaagggtgaagtgtataaggcccagattatgaacgtctcgtggtccgctgaccaccgcgttattgatggagcgacgatgagccggttctctaacctgtggaagtcttacctagaaaaccctgcctttatgcttttggacctgaag

SEQ ID NO: 249998 - DNA, 1446 bp, synthetic construct
  misc_feature 1..1446: note = Description of Artificial Sequence: Synthetic coding sequence
  source 1..1446: mol_type = other DNA
atggcggcagtgagaatgctccggacttggagtcgaaatgccggaaagctaatttgtgtgaggtactttcagacgtgtggaaatgtacatgtgttaaaacctaactatgtgtgcttctttgggtatccatctttcaaatatagtcacccccatcactttctcaaaacaactgccgcactcagaggacaggtggtgcagtttaagctcagtgatataggagagggaatccgggaagtgacagtcaaagagtggtatgtcaaagaaggggatacagtttcgcagtttgattcaatctgcgaggtgcagagtgacaaagcctctgtgacaataacatccagatatgatggagtgataaaaaagctgtattataacctagatgatatcgcctatgtggggaaacctctagtagatatcgagacagaagcactcaaagattccgaagaagatgtcgtggagacaccagcagttagtcatgatgaacatacacatcaggagatcaagggaaggaagactcttgctacaccagcagtgcgccggctcgccatggaaaacaacataaagctcagtgaagtggtggggtctgggaaagatggacgcattttaaaagaagacatactaaactacctggaaaaacagacaggagcaatcctcccaccttccccaaaggttgagataatgcccccaccccctaaacctaaggatatgacagtgcctatactggtgtcaaaaccaccagtcttcactgggaaagataaaactgaacctataaaaggattccagaaagccatggttaaaacaatgtccgcagccctgaaaatcccccatttcggatattgtgatgaaatagatttaacggaactcgtcaagctcagggaggaactcaaaccaatagccttcgcgcggggaatcaaactttctttcatgccattcttcctaaaggcggcttctctagggctgctccagtttcccattttaaacgcctccgtcgatgaaaattgtcagaatattacatataaagcctctcacaacataggaatagctatggacacagaacaggggctcatagtacctaacgtgaagaatgtgcagatatgttctatattcgatatcgccactgaacttaaccgactccagaaactcgggtctgttagtcagcttagtacaacagatttgactggggggacattcactctctctaacattggatctattgggggaacatttgccaaacccgttattatgccccctgaagtagccatcggggccctcggatcaatcaaagccatacctcgcttcaatcagaagggggaagtgtacaaagctcagatcatgaacgtgagttggtcagcagatcaccgggtaatagacggagccactatgtcacggttttccaatttatggaaatcttatcttgagaacccagcttttatgcttctcgatttaaaa

SEQ ID NO: 249999 - DNA, 1446 bp, synthetic construct
  misc_feature 1..1446: note = Description of Artificial Sequence: Synthetic coding sequence
  source 1..1446: mol_type = other DNA
atggccgccgttcgtatgcttcggacgtggtctcgcaatgccggcaagctgatctgtgttagatacttccagacctgcggtaatgtgcacgtgctaaagcctaactacgtatgctttttcggatatcctagcttcaaatatagtcacccacatcacttcctgaagacaactgcagctcttcgcgggcaggtggttcagttcaagctcagcgacatcggggaaggcattcgggaagtcaccgtcaaagaatggtatgtcaaggagggggacacagtgtcccagttcgattcaatatgcgaggtccagagcgacaaagcttcagtgaccattacctcacgatacgatggcgtcatcaaaaagctgtactataacctggacgacattgcttatgttggaaagcccctcgtcgatattgagactgaagcactgaaagattccgaggaagacgtcgtcgagacacccgctgtttcccacgatgaacatacacaccaagagatcaaaggccggaagacccttgcgacgcccgcagtccgtaggttggcaatggagaacaacattaaactgagcgaggtcgtcgggtcaggcaaggatggccggatattaaaagaggacattttaaattacctagagaaacagacgggggcaatcctgcccccctcacccaaagtggagattatgcctcctcccccaaagcccaaagacatgacagtccccatcctggtgtcaaaacccccagtgtttactgggaaggacaagacagagcccattaaaggattccaaaaagccatggtgaaaactatgtcagctgcactgaagattccccattttgggtactgtgacgaaattgatttaaccgagctggtcaagcttagagaggagctgaagcccattgcatttgcacgtggtattaagctgtccttcatgcctttttttcttaaggctgcctcgctgggtttgctgcaattccctattctgaatgctagtgtcgacgaaaattgtcagaacattacttacaaggcctctcataatatcggaatagctatggatacagaacaggggttaatcgtgccgaatgtcaagaatgtgcagatttgctcaatcttcgacatcgcaacggagctgaatcggctccagaagctgggatctgtcagtcagctgtccaccacggatctgaccggggggacgtttactctctccaatatcggatccattgggggcacattcgctaaacccgtgataatgccccccgaagtggcaatcggcgctctgggatctatcaaggccatcccacgctttaaccagaagggagaggtgtacaaggctcagatcatgaatgtgagttggagtgccgatcatcgcgtgattgacggcgctaccatgagccgtttctcaaacctgtggaaatcctatctcgaaaaccccgcttttatgctactggacttgaaa

SEQ ID NO: 250000 - DNA, 1446 bp, synthetic construct
  misc_feature 1..1446: note = Description of Artificial Sequence: Synthetic coding sequence
  source 1..1446: mol_type = other DNA
atggccgcagtgcggatgctgcgcacttggtcgcggaatgccggaaagctgatttgtgtgcggtactttcaaacttgcggaaacgttcatgtccttaaaccgaattacgtgtgtttctttggttatccctcgtttaagtacagccaccctcatcacttccttaagaccaccgcagcgcttcgtgggcaggtggtgcaattcaagctgtccgatatcggcgaagggatcagggaggttaccgtgaaggaatggtatgtcaaggagggagatacggtttcgcaatttgacagcatttgcgaagtccaatcggacaaggcatccgtgaccattacctcaagatacgatggtgtgatcaagaagctgtactacaatctcgatgacattgcgtacgtcggcaaacctctggtggatattgaaaccgaggcacttaaggattcagaagaagatgtcgtcgaaacgcctgccgtgtcacatgacgaacatactcatcaagagataaagggacgaaagactctggcgacccctgcagtcaggagactggcgatggagaacaacatcaagctttcggaagtggtcggctccggaaaggatgggagaatactgaaagaagatatactgaactacctcgagaaacagactggtgcaattcttccgccctcccctaaagtggaaatcatgcctccaccacccaagccaaaggacatgaccgtcccaattctggtgagcaaacctccggtctttaccggaaaggacaaaaccgagcctatcaagggttttcaaaaagcaatggtcaaaacgatgtccgcagcattgaaaatcccacacttcggatactgcgacgaaatcgacttgaccgaacttgtgaagcttcgcgaagaattgaagcccatcgcatttgctagagggatcaagctgagctttatgccattctttcttaaggcagcatccctcggactgcttcaattccctattctcaacgcatcggtggatgaaaactgtcagaacattacttacaaagcatctcacaacattggcattgctatggatactgagcaaggcctgattgtgcctaatgtgaagaacgtgcagatctgtagcattttcgatattgccaccgaactgaatcgactccaaaagctcggtagcgtgtcgcagctttcaaccactgatctgactggaggaacttttactctctcgaacatcggtagcatagggggtacttttgcaaagcccgtgatcatgccaccagaagtggccattggagcacttggttccataaaggccattcctcgctttaaccagaaaggagaggtgtacaaagcccagattatgaatgtgtcatggtcggcggaccatcgtgtgattgatggcgctaccatgtccagattttcaaatctctggaagagctaccttgagaacccagccttcatgcttctggatctcaag

SEQ ID NO: 250001 - DNA, 1446 bp, synthetic construct
  misc_feature 1..1446: note = Description of Artificial Sequence: Synthetic coding sequence
  source 1..1446: mol_type = other DNA
atggcagccgtgcggatgctgcggacttggtcacggaatgccggaaaactcatttgtgtgcgctactttcagacgtgcggtaacgtgcacgtcctcaagccgaactacgtgtgcttctttggctatcctagcttcaagtattcgcacccccatcatttccttaagaccactgcggcactgcgcggacaagtggtccagttcaaactgtcagacattggagaaggcatccgcgaggtgactgtgaaagaatggtacgtgaaggagggagacaccgtctcacagttcgattccatttgcgaagtgcagtcagataaggcctccgtgaccatcacctcgcgttacgatggcgtcatcaaaaagctgtactacaatcttgatgacattgcctacgtgggcaaaccattggtggacatcgaaactgaagccttgaaagatagcgaagaggacgtggttgagacgccagccgtgtcgcacgacgagcacacccaccaagaaatcaaaggacgcaagaccctggctaccccagccgtccgcagactggcgatggaaaacaacatcaagctctccgaagtggtgggcagcgggaaggacggacgcatccttaaggaagatattctgaattacttggaaaagcaaaccggtgccatcctcccaccgtcgccgaaggtcgaaatcatgcctcctcccccgaagccaaaggacatgactgtgccgattttggtgagcaagcccccagtgttcaccggaaaggacaaaactgaaccgatcaagggattccagaaggcgatggtcaagaccatgtcagcagctctgaagattccacattttggatactgcgacgaaatcgacctgactgagctggtcaagctcagagaggagctcaaaccgatcgccttcgccaggggaatcaaactgtccttcatgccgtttttcctcaaggcggcatcgctgggcctgttgcagttcccgatcctcaatgcgtccgtggacgagaactgtcagaatatcacttacaaggcttctcacaacattggtatcgcaatggacaccgagcagggcctgatcgtgccgaacgtcaagaacgtccaaatctgctccatcttcgatatcgcaactgagctgaataggctgcaaaaactcggcagcgtctcccaactgtcgactaccgatctgactggagggaccttcacgctgtcgaacatcggaagcatcggaggtacctttgctaagccggttatcatgcctccggaggttgcgatcggagccctcgggtccatcaaggcaatccctagattcaatcagaagggggaggtgtacaaagcccagatcatgaacgtgtcctggtcggctgatcatcgggtgatcgacggagcgactatgtcgcggttttcaaacctctggaagagctaccttgaaaaccccgctttcatgctgctcgatctgaaa

SEQ ID NO: 250002 - DNA, 1446 bp, synthetic construct
  misc_feature 1..1446: note = Description of Artificial Sequence: Synthetic coding sequence
  source 1..1446: mol_type = other DNA
atggctgccgtgaggatgctccgaacatggtccaggaatgctggaaaactaatctgtgtgcggtacttccagacctgtggaaacgttcacgtgttaaaacccaattatgtgtgttttttcgggtatccatcgttcaagtattcacatcctcatcattttctcaagaccactgccgccctgcgcggtcaggtggtgcagttcaagctcagcgacattggcgaagggatacgagaagttaccgtcaaggaatggtacgtgaaagagggagacacggtttcccaattcgattccatctgcgaggtgcagtccgataaggctagcgtcacaataacttccagatacgatggggtcatcaagaaactgtactataacttggacgatattgcttacgtgggtaagccccttgtcgatattgagaccgaagccctgaaggatagcgaggaggacgtagtagagacaccggctgtgtcccacgatgagcacactcaccaggagatcaaaggccggaagacccttgctactcctgccgtacggaggctggctatggagaataacatcaaactctccgaagtggtggggagtgggaaagatggtcggattctgaaagaagatatactgaactacctggaaaaacaaactggagccatcctgccgccttcccctaaggttgaaatcatgccccctccaccaaaacccaaggatatgactgtacccattcttgtcagtaagccgcctgtctttaccggcaaggacaaaaccgagcctattaagggattccagaaggccatggtcaagacaatgagtgccgctttaaagatcccacattttggctactgcgacgagattgatctgacagagctggtgaaacttagggaagagctgaaaccgatagccttcgccaggggcatcaagctgtcattcatgccattctttctcaaggccgcatctcttgggcttttacaatttccaatcttgaatgcaagcgttgacgaaaactgccagaacatcacctataaagcaagccataatatcggaatcgccatggacactgaacagggcctgatcgtccccaatgtcaagaatgtccagatttgttccatttttgatatcgcaacagaactcaatcgcttacagaaattgggctcagtatctcagctgagcaccaccgatttaacaggcggcactttcaccctcagtaatatcgggagtattggaggcaccttcgcgaagcccgtgatcatgcctccggaggtcgccattggggctctgggatccattaaggctattccccgcttcaaccagaaaggagaagtctataaggctcaaataatgaatgtcagctggagtgctgaccaccgggtgatcgatggggccaccatgagtcggtttagcaatctctggaaatcctatctcgagaatcctgcatttatgctgctggacttaaaa

SEQ ID NO: 250003 - DNA, 1446 bp, synthetic construct
  misc_feature 1..1446: note = Description of Artificial Sequence: Synthetic coding sequence
  source 1..1446: mol_type = other DNA
atggctgccgtgcgcatgctccgcacctggagcaggaacgcaggaaagttgatctgcgtgagatacttccaaacttgcgggaatgtgcacgttttaaagcccaactacgtatgcttctttgggtatcctagcttcaaatactcacaccctcaccattttcttaagactaccgctgctcttcgtggacaggtggtacaatttaaactctcggatataggggaaggtatcagggaagtaaccgtgaaagagtggtatgtgaaagaaggtgacactgtttcacagtttgattcgatttgtgaagtccagagtgacaaggcgagcgttaccattacatcaagatacgatggcgtcatcaaaaaactttactacaacctggacgacatcgcatacgttggcaagccactggttgacatcgaaactgaagcactcaaggatagcgaggaagatgtagttgaaactcccgctgtgtctcacgatgagcacacccatcaagaaatcaaaggacggaagaccctggctactcctgctgtgcggagactcgctatggagaacaacatcaaactgtctgaagtggtgggctcaggcaaagatgggcgcattcttaaggaggatatcttgaactacctggaaaaacagactggggctattctcccaccaagcccaaaagtggagatcatgccacccccgcctaaacctaaggacatgacagtccccatccttgtttccaagccgccggtcttcaccggtaaggacaaaaccgaacctataaagggattccagaaagctatggtgaaaaccatgagcgccgctctgaaaatcccacatttcggatattgcgacgagatcgatctcacggaattggtgaagcttcgggaggaactcaagccaatcgctttcgcgaggggcatcaagctgagctttatgcccttctttctgaaagccgcttcgctgggcctgctccaatttcccatcttgaacgcttcagtcgatgaaaattgccagaacataacatataaagcctcacacaacattgggatcgctatggataccgagcagggactaatcgtgcccaatgtcaaaaacgtgcaaatttgttccatctttgatattgctacagaactgaatcgactgcagaaattagggtccgtgagtcagcttagtaccactgatctcaccgggggaacctttacgctcagcaatatagggtcaatcggtggaacatttgccaaaccagtgatcatgcctcccgaagtcgctatcggcgcactcggatccattaaagcaataccccggttcaaccaaaaaggggaagtgtacaaagcccagattatgaacgtcagttggagcgccgaccacagagtgattgacggcgcaacaatgtctcgctttagcaacctctggaagtcgtatctggagaatccagcgtttatgctcctggatcttaag

SEQ ID NO: 250004 - DNA, 1446 bp, synthetic construct
  misc_feature 1..1446: note = Description of Artificial Sequence: Synthetic coding sequence
  source 1..1446: mol_type = other DNA
atggctgctgtgaggatgttgagaacctggagccgtaacgctgggaaactgatctgtgtgaggtactttcaaacatgcggaaatgttcacgtgttgaagcctaattacgtgtgctttttcggttacccttcatttaagtactcacatccgcaccatttccttaagaccactgcggccctgagaggtcaagtggtgcaatttaaattgtccgatattggtgaaggaatcagagaggtaaccgtgaaagaatggtacgtcaaggaaggagatactgtgtcccagttcgatagcatatgtgaagtgcaatcagataaggcaagtgttacgatcacctctagatatgatggagtgattaagaagctgtactataacctcgatgacatcgcttacgtgggaaagcccttagttgacattgagactgaggccctgaaagacagtgaagaggatgtggttgaaactccagctgtttctcacgatgagcatactcaccaggagattaaaggaagaaagactttagctacccccgccgtcaggagactcgccatggagaacaatatcaagttgagtgaggtggtcggttcgggcaaagacggccgcattctgaaagaagatatcttaaattacctggagaagcagaccggagctatcctgccaccatctcccaaggtagagatcatgccaccaccgcccaaaccaaaagacatgacagtgcctattctggtgagcaagcctcccgtctttacaggaaaggataagaccgagccaattaaaggattccagaaagccatggtaaagaccatgagtgctgccttaaagattccgcactttgggtactgcgacgagattgacctcaccgaactggtgaagctgagagaggagttgaaacctatcgcttttgctaggggtataaagctttcttttatgcctttctttttaaaagcggcttcactgggactgctgcagttcccaatcctcaatgctagcgtcgatgagaattgtcaaaacattacatataaagcttctcacaatataggcatcgccatggataccgagcaggggttaattgtgcctaacgtaaagaacgttcagatatgctcgatctttgatatcgctaccgaacttaataggcttcagaaactgggaagtgtctctcaactcagtaccaccgacctgactggcggaacatttacactgagcaatataggatctatcggcggtactttcgccaaaccagtgatcatgcctccagaggtggccatcggcgctcttgggtccatcaaagctatccctcgctttaatcaaaaaggcgaagtctataaggctcagatcatgaatgtgtcatggtcagccgaccatagggtcatcgacggagccacaatgtcgagatttagcaacctgtggaagagttatctagaaaaccctgcttttatgctgctggaccttaaa

SEQ ID NO: 250005 - DNA, 1446 bp, synthetic construct
  misc_feature 1..1446: note = Description of Artificial Sequence: Synthetic coding sequence
  source 1..1446: mol_type = other DNA
atggccgccgtgagaatgcttcgtacctggtcccgcaacgctgggaaactcatctgtgtgcggtattttcagacatgcggaaatgtccacgttctcaagccgaattacgtatgtttctttggttacccttcttttaagtactcccaccctcaccattttttgaagaccaccgccgcactgagaggccaagtggttcagttcaagctcagcgatatcggcgaggggatccgtgaggtcacagtgaaagagtggtacgtgaaagagggagacacagtctcccagttcgactctatatgcgaggtgcaatcagataaggccagcgtcacaattacgagcaggtatgacggtgttatcaagaagctatactacaacctggacgacattgcttacgtaggtaagccattagtcgacatcgagaccgaagcactgaaagactctgaggaggacgtggttgagaccccggcagtctcccatgacgagcatactcaccaggagattaagggacggaaaacgttagccaccccagccgttagacgcctggccatggaaaataacatcaagttgtccgaggtggtcgggtctggaaaggacgggcggattctgaaggaggatatattgaactatttggagaaacagacgggcgccattctcccaccgagtcctaaggttgagattatgccacccccccccaagcctaaagatatgaccgtccctatactggtgtcgaaaccgccagtgtttaccgggaaggacaaaacagaaccgattaagggctttcagaaggcaatggtgaagacgatgtccgccgccctcaaaataccccactttggatattgtgacgaaattgaccttacagaactggtgaaactcagggaagagctgaagccaatcgcatttgcgcggggcatcaaactttcatttatgcccttctttctgaaggcggccagtctcggcctgctgcagttcccaatcctcaacgcctccgtggacgagaactgccagaacattacatataaggcctctcacaacataggaatcgctatggatacagagcaggggttgattgttcccaatgttaagaacgtgcagatttgctcaattttcgatatagctaccgagctgaatagactgcagaaactgggatcagtctcccagttatccacgaccgacctcacgggtgggacattcaccctgagcaacattggatctatcggcggcacgtttgccaagcccgtgattatgccacccgaggtcgcaattggagcccttggctctatcaaagcaatccccagattcaaccagaagggggaggtttataaggcccagattatgaatgtatcttggtccgctgatcacagagttattgacggcgcgacgatgtccagattcagtaatttatggaaaagctacctggagaatccggcatttatgctattagacctgaag

SEQ ID NO: 250006 - DNA, 1446 bp, synthetic construct
  misc_feature 1..1446: note = Description of Artificial Sequence: Synthetic coding sequence
  source 1..1446: mol_type = other DNA
atggctgctgtgcgaatgctgcgaacctggagccgcaacgcgggcaaattaatctgtgtgaggtatttccagacatgtgggaacgtgcatgtccttaaacctaactacgtgtgtttcttcggctacccctctttcaagtactcccaccctcaccacttcctaaagacaactgccgcactccgcggtcaggtggtgcagtttaagttgtctgacatcggggaaggcatacgagaggtgacagtcaaagaatggtacgtgaaagaaggcgatactgtttcccaatttgactccatctgtgaggtgcagtccgacaaggcctcagtaaccatcacatctcgctacgacggtgtgatcaaaaaattgtactacaacctggatgacatagcatacgtgggcaaacctcttgtggacatcgagaccgaagcactcaaagattcggaggaggatgtcgtggagacaccggccgttagtcacgacgaacacacccaccaggaaattaaagggagaaagaccttggcgacacctgccgttagaaggttggccatggagaacaatatcaaactgtccgaagtcgtggggagcgggaaggacggaagaattctgaaggaagacatcctgaattaccttgaaaagcagacaggggccatcctcccgccctctcccaaagtggagatcatgccacccccgcctaaacccaaagatatgactgtccccattcttgtatccaagccccctgtgttcaccggcaaagacaagaccgaacccattaagggatttcagaaagccatggtcaagacaatgtctgctgcattgaagatccctcactttggatactgtgatgagatcgacttgaccgagctggtcaagctcagggaggagctgaaaccgatcgccttcgctagggggatcaagttgtcattcatgcccttctttctgaaagccgctagccttggcttgctacaatttccaatcctgaacgcgtccgtcgatgaaaattgccagaatattacttacaaggcctctcacaacatcggtatagctatggataccgagcaggggctcatcgtccctaatgtgaagaatgttcagatctgtagcatctttgatattgccactgagctgaaccgcctgcaaaagctgggatccgtgtctcagctgagcactaccgacctgacaggaggtacgttcaccctttccaacatcggctctatcgggggaacctttgccaaaccggtgatcatgcctcccgaggtagcgattggcgctctcggttctatcaaggccatcccacggtttaatcagaaaggagaagtttacaaggcgcagatcatgaatgtgtcttggtccgcagatcaccgcgtcatcgatggggcgaccatgtctcgcttcagtaatctttggaaaagctacctcgagaatccagcgtttatgctgctggatctgaaa

SEQ ID NO: 250007 - DNA, 1446 bp, synthetic construct
  misc_feature 1..1446: note = Description of Artificial Sequence: Synthetic coding sequence
  source 1..1446: mol_type = other DNA
atggcagccgtcaggatgttgcgcacatggagcagaaacgcgggaaagctcatatgcgttcggtacttccagacctgcggaaatgtccacgtgctgaagcctaactatgtttgtttcttcggataccccagtttcaaatacagccacccacatcacttcctgaaaactaccgccgcgctgcgcggacaagtagtgcagttcaagttaagtgatattggcgagggaataagagaagtgacagttaaggagtggtatgtaaaagagggagatacagtcagtcagttcgatagcatatgcgaagtacagtccgacaaggcatctgtgaccattacctcacggtatgatggcgtgattaaaaaactgtattacaatttggacgacattgcttatgtagggaagccgctggtcgatattgagaccgaggctttgaaggactcagaggaggacgtggttgaaacccccgccgtttcacatgacgagcatacgcatcaggaaataaaaggccgaaaaacactagcaacacctgctgtgcgcagactggcaatggaaaataacatcaagctgtcagaggttgtggggtcaggcaaggatggaaggatcctcaaagaagacattctcaactatttggaaaagcagacaggagctatactgccgccgtcccccaaggtggagataatgcctccaccacccaagcctaaggacatgacagtgcctatactagtctccaagccacctgtttttacagggaaggacaagaccgagcccatcaaaggatttcagaaggctatggtaaaaaccatgtctgccgcccttaagattccccattttgggtactgcgacgagatagacctgaccgagttggtgaagcttcgagaggagctcaagccaatcgcgtttgccagggggattaaactgtccttcatgccctttttccttaaagctgctagcctgggactgctgcagtttcccattttgaacgcttccgtcgacgaaaattgccaaaatataacctataaggccagtcacaacataggaatcgcaatggatacggagcagggactcatcgtgccaaacgtgaaaaatgtgcaaatctgctctatttttgatattgccacggaactcaataggctccaaaaattaggatcagtaagccagctgtccacaaccgacctaaccgggggcacgttcaccctgagcaacataggttccataggagggacatttgccaaaccagtgatcatgcctcccgaagttgctataggggcgcttgggtctattaaggcaattccaagatttaatcagaagggggaggtctataaggcccagatcatgaacgtatcctggtccgctgatcatagagtcatcgatggtgccactatgagtcgcttcagtaacctgtggaagtcctacctggagaaccctgcattcatgctgttagacctgaag

SEQ ID NO: 250008 - DNA, 1446 bp, synthetic construct
  misc_feature 1..1446: note = Description of Artificial Sequence: Synthetic coding sequence
  source 1..1446: mol_type = other DNA
atggccgcggtgagaatgcttcggacctggtcaagaaacgccgggaagttgatttgtgtcaggtacttccagacatgcggtaacgtgcacgtgctgaagccaaactacgtatgcttcttcggttacccatccttcaagtactcccacccccatcacttcctgaaaactacggctgccctgagaggccaggtggtgcagttcaagctttctgacatcggggaaggcatcagggaggtgacagtcaaagaatggtatgtaaaggagggcgataccgtgagtcagtttgatagcatatgcgaggttcagagtgataaggcatcagtcaccattactagccggtatgacggggttatcaagaagctgtactacaacctcgacgatattgcctacgtaggtaagcccctcgtggatatcgagaccgaagcactgaaagattcagaagaggacgtcgtggagacacctgccgtgagccacgacgagcacacccatcaggagataaagggtcgcaaaacactcgctactccggcagtgagaaggctcgcaatggagaacaacatcaagctgagtgaagtcgttggatccggaaaggatggaaggatcctcaaggaggacatcctcaattaccttgagaagcagacaggcgcaatcctgccacctagcccaaaagtcgagatcatgccacctcctcccaaacctaaggacatgacagtgcccattttggtcagtaaaccacctgtgttcacaggtaaggacaagaccgaaccaattaagggatttcagaaagctatggtaaaaactatgagtgccgcacttaaaattccacactttggctactgtgatgagattgatctgacagagttggtgaaattgcgcgaggaactgaaaccgattgcctttgcgcgcggcataaagctctcattcatgccttttttcctgaaggctgctagcttgggcctgttgcaatttccgatccttaacgcctcagtggacgaaaactgccaaaacatcacgtataaagcctcacacaatatcggtatagctatggacacagagcagggcctcatcgtgcctaacgtcaaaaacgtgcagatatgcagcatcttcgacattgctacggaattgaatagactgcagaagctcggatccgttagccagctctccactaccgaccttacagggggaacttttaccctgtcaaatatcggatcaattggagggacatttgccaaacccgtcattatgcctcctgaggtggcgatcggggccttgggatctattaaggccattcctcggttcaaccaaaagggagaagtgtataaggcccagatcatgaatgtgagttggtcagccgaccatcgcgtcatcgacggagccacaatgagccggttctccaacctgtggaagtcctaccttgagaaccccgcattcatgcttctggatctcaaa

SEQ ID NO: 250009 - DNA, 1446 bp, synthetic construct
  misc_feature 1..1446: note = Description of Artificial Sequence: Synthetic coding sequence
  source 1..1446: mol_type = other DNA
atggccgcggtccggatgctgagaacatggtctagaaacgccggtaaactgatctgtgtgcggtatttccagacctgcgggaacgtccacgtcctgaagcctaactacgtctgctttttcggctatccatcattcaagtattcccacccgcaccattttctgaagaccaccgcagctctgagaggccaggtcgtacagttcaagctgtctgacatcggtgaggggatccgggaggtaactgtcaaggaatggtatgtcaaggaaggcgacaccgtttcccagttcgattccatctgtgaggtacagagtgacaaggcttccgttacgatcacgtcaaggtatgatggtgttatcaaaaagctgtattacaatctggacgacatcgcatacgtcggaaaaccactggtcgacatcgagaccgaggctctcaaggattccgaggaagacgtcgtagagaccccagctgtttcccacgacgaacacacccatcaggaaatcaaggggagaaagacactggctacccccgctgtacgcaggctggccatggaaaataacataaaactgtccgaggtcgtgggaagcggtaaggatggccgcattctgaaggaggacattctcaattacctggaaaaacaaaccggagccatattgcctccatcccctaaagtagagattatgccccctccacctaaacccaaagacatgaccgtgcctatactggtgtccaagccaccagtgtttaccggaaaggataagacggagcccattaaggggtttcaaaaggccatggtcaagacaatgagcgctgccctgaaaataccccatttcgggtactgcgacgagatagatctgactgagcttgtaaaactgagggaggaactcaagcctattgcgtttgcacgaggtattaaactgtcttttatgcccttctttctgaaggccgcatccttgggacttctccagttccctattttgaatgcgtcagtcgatgaaaactgccaaaacatcacgtataaagccagccacaatattggaattgccatggacactgagcagggtctgatcgtgcctaacgtgaagaacgtgcagatatgttcaatcttcgatatcgcaaccgagcttaatagattgcagaaacttggttcagtgtcccagctgagtacgaccgacctgaccggagggaccttcacactgagcaacattgggagcattgggggtactttcgctaaacccgttatcatgccgccagaagtcgccataggggccctgggcagcataaaagccatacccaggtttaaccaaaaaggtgaggtgtacaaggcacaaataatgaatgtcagttggtccgcggaccatcgagtgatcgacggtgctaccatgtccagattcagcaatctgtggaaaagctatttggagaatccggctttcatgctgctggacctcaaa

SEQ ID NO: 250010 - DNA, 1032 bp, synthetic construct
  misc_feature 1..1032: note = Description of Artificial Sequence: Synthetic coding sequence
  source 1..1032: mol_type = other DNA
atggtccgcgcccgacaccaaccgggagggctctgtctgctgcttcttctgctttgtcagtttatggaggacaggagtgcccaggccggaaactgctggcttagacaagccaagaacgggcgctgccaggtgctgtataaaactgaactctctaaggaagagtgctgctccaccggcaggctatctacgtcatggacagaggaggacgtcaatgataacacactgttcaagtggatgatctttaatggaggcgcacccaattgtattccttgcaaagagacttgtgagaacgtagattgcgggccgggaaaaaagtgccgaatgaacaagaaaaacaagccgagatgtgtgtgtgctcccgactgttctaacatcacttggaagggacccgtgtgtggcttagatggcaagacctaccggaatgagtgtgcactgcttaaggcccgttgtaaagagcagcctgaactggaggtccagtatcagggacgatgtaagaagacctgcagagacgtcttctgcccgggctcctctacttgtgttgtcgatcagaccaacaacgcctactgcgttacctgcaatagaatatgccccgaacccgcgtcgtccgagcagtacctgtgcgggaacgatggcgtaacttattcttctgcctgtcacctgagaaaggccacatgccttctgggcaggtctataggactggcgtacgaaggtaaatgtattaaagcaaaaagctgtgaggatatccaatgtacaggcgggaagaagtgtttatgggacttcaaggtaggcaggggacggtgcagcctctgtgacgaactctgcccagacagtaaaagcgatgaaccagtgtgtgcatcggacaacgccacctatgcaagcgagtgcgccatgaaagaggcggcctgttcctcgggcgtcctgctcgaagtgaagcattctggaagctgcaattctattagtgaagataccgaggaggaggaagaagacgaggaccaggactatagttttcccataagctccatccttgaatgg

SEQ ID NO: 250011 - DNA, 1032 bp, synthetic construct
  misc_feature 1..1032: note = Description of Artificial Sequence: Synthetic coding sequence
  source 1..1032: mol_type = other DNA
atggtccgtgctaggcaccaacctgggggcctctgcctcctactgctgctcctgtgtcagtttatggaggaccgctccgcccaggccggtaattgctggctcaggcaagcaaagaatgggcgctgccaggtgctgtataagacagagctgagcaaggaagaatgttgctctacaggaaggctgtccacatcgtggaccgaagaggacgtgaatgacaacacccttttcaagtggatgatcttcaatggaggggctccgaattgtatcccttgtaaggagacttgtgagaatgtggattgcggaccagggaagaaatgcaggatgaataagaagaataaacccagatgcgtctgcgccccagactgttctaatataacctggaagggacccgtgtgtgggctggacgggaaaacctaccgcaatgaatgtgccctcctcaaagcacggtgcaaagagcagcctgagttggaggtgcaataccagggccgctgcaagaaaacatgcagagacgtcttctgccctgggtcatcaacctgcgtggtggaccaaactaataacgcctattgcgtgacttgcaaccgaatctgccccgaaccagcgtccagtgaacagtatctgtgcggcaacgacggtgtaacttactctagtgcatgccacctgcggaaagctacctgcttgctggggcgaagcatcggactggcctacgaaggtaaatgtatcaaggctaagtcttgcgaggacatccagtgcactggtggcaagaaatgtctgtgggacttcaaggtcggaagaggacggtgctccctttgtgacgagctgtgtcccgattccaaaagtgacgagccggtgtgcgctagtgataacgcaacttatgcaagcgaatgcgccatgaaagaagccgcctgcagctcaggggtcctattagaggttaaacactctggctcttgtaacagcataagtgaggacactgaggaggaagaagaggacgaggatcaagactactcctttcctatcagctctattctggaatgg

SEQ ID NO: 250012 - DNA, 1032 bp, synthetic construct
  misc_feature 1..1032: note = Description of Artificial Sequence: Synthetic coding sequence
  source 1..1032: mol_type = other DNA
atggtgagagccagacaccagccaggcggtttgtgcttgctcctactgctactgtgtcagtttatggaggatagatcggctcaggccgggaattgttggctgagacaggccaagaatgggcgttgccaggtgctatacaagactgagctgagcaaagaggagtgttgctcaacaggacgcctgtccacgagttggacagaagaagacgttaacgacaataccttgttcaagtggatgattttcaacggcggggccccaaactgcataccctgtaaagaaacctgcgaaaatgtagactgcgggcccggaaagaaatgccgtatgaacaagaagaataagccacgatgtgtctgcgctccggattgcagcaatatcacctggaaaggacccgtgtgtggtttggatggaaagacctacaggaacgaatgtgcccttctgaaggcccgttgcaaggaacagcccgagctcgaggtgcagtatcagggccgctgtaagaagacgtgtcgcgatgtcttctgccccggcagcagcacttgcgtggtggaccagacaaacaatgcctactgtgtgacatgcaatcgaatctgcccggaacctgccagcagcgagcagtacctttgcggtaacgacggagtcacgtacagctctgcgtgccatctgaggaaagccacgtgcctgcttgggcgctctattggcctggcgtacgaagggaagtgcatcaaggcgaagagttgcgaggatatccagtgtacaggaggtaagaagtgtttgtgggacttcaaggttggtaggggcaggtgcagcttatgtgatgagctgtgtccagactcgaagagcgacgagccagtatgtgccagtgacaatgctacttacgccagcgagtgcgcaatgaaggaagccgcatgtagctccggcgtgctcctggaggtgaaacattccggcagttgtaattctatctccgaagatactgaagaagaggaagaggatgaggatcaagattacagttttcctatttcatcaatcctcgaatgg

SEQ ID NO: 250013 - DNA, 1032 bp, synthetic construct
  misc_feature 1..1032: note = Description of Artificial Sequence: Synthetic coding sequence
  source 1..1032: mol_type = other DNA
atggtccgggccaggcaccaacccggaggcctatgcctgctattattgctgctgtgccagtttatggaggaccggtcagcccaggccggcaactgttggctgcgacaggcaaaaaacggccggtgtcaggtgctctacaagaccgaactcagtaaggaagagtgctgtagcaccggccgccttagcacatcttggactgaggaggacgtgaacgataatacactttttaaatggatgatctttaatgggggcgcacctaactgtattccctgcaaggagacctgtgaaaatgttgactgcggcccgggcaaaaagtgccgcatgaacaagaaaaataaaccccggtgcgtctgcgcccctgactgttctaacataacatggaagggaccggtctgtggcctggatggcaaaacctacagaaacgagtgcgcactcttaaaagcacgctgtaaggagcaaccagagcttgaggtgcagtatcagggtaggtgtaagaagacttgcagagacgtgttttgcccgggaagttccacgtgcgtcgtagatcaaaccaataatgcttactgcgtgacatgcaaccgcatatgccccgagcccgccagcagcgagcagtacctgtgcggcaatgacggagtaacgtatagtagtgcctgccacctgagaaaggccacttgtctgctgggcaggtctataggtctggcctatgagggtaagtgtatcaaggctaagagctgcgaggatatccagtgcaccgggggcaaaaagtgtctttgggacttcaaggtgggcagaggcagatgtagcctgtgcgatgaactttgcccagacagtaaatctgatgagcccgtctgtgccagcgataacgccacatatgccagcgaatgcgccatgaaggaggctgcctgttcctctggtgtgctgctcgaagtcaagcattcgggatcctgtaactctataagcgaggacaccgaggaggaagaggaagacgaggaccaggattatagcttccccatttcatctattctcgagtgg

SEQ ID NO: 250014 - DNA, 1032 bp, synthetic construct
  misc_feature 1..1032: note = Description of Artificial Sequence: Synthetic coding sequence
  source 1..1032: mol_type = other DNA
atggtccgcgcccggcaccaacctggaggattgtgcctcttgctcctgctgctttgccagtttatggaggacagaagcgcacaggccgggaactgttggctgcgccaggctaagaacggtcgttgtcaggtactctacaagaccgagctttcgaaggaagagtgctgttctaccgggagactctcaaccagctggaccgaagaagatgtcaacgataacaccctgttcaaatggatgatctttaacggtggagcgcccaattgtatcccctgcaaagaaacttgcgaaaacgttgattgcggaccgggaaaaaagtgccggatgaacaagaagaataagccgcgctgcgtatgcgcacctgactgttcaaatatcacctggaagggaccggtgtgcgggctggacggaaaaacttacagaaacgaatgtgctctgctgaaagcgcggtgcaaggagcagcctgaactcgaagtgcagtaccaaggcaggtgcaaaaagacttgccgcgacgtgttctgcccgggctccagcacttgtgttgtggatcagacgaacaatgcttactgcgtgacttgcaaccgcatctgcccggagccagcctcatccgagcaatacctgtgcgggaatgatggagtgacctatagttccgcctgtcatctgagaaaggccacgtgtctcttgggccggtcgattggactggcatacgaaggcaagtgtatcaaggcaaaatcctgtgaggacatccagtgtactggaggaaagaagtgcttgtgggatttcaaggtcggcagaggtcggtgctcactctgcgatgagctgtgcccggactcgaaatctgacgaaccagtgtgcgcgagtgacaacgcgacctacgcgtcggaatgcgctatgaaggaagccgcctgctcgtcgggagtgcttttggaagtgaaacactccggtagctgcaattcgatttccgaggacactgaagaggaggaagaagatgaggaccaagactacagcttcccaatcagctcgatactggagtgg

SEQ ID NO: 250015 - DNA, 1032 bp, synthetic construct
  misc_feature 1..1032: note = Description of Artificial Sequence: Synthetic coding sequence
  source 1..1032: mol_type = other DNA
atggttcgcgctcgacaccagccggggggactgtgcttgctactgctgttactgtgccagtttatggaggaccggtctgctcaggcaggcaactgctggctgagacaggccaagaatggccgttgccaggtgctttacaagactgagctgagtaaggaagagtgttgttcaactggccggctctctaccagctggactgaagaagacgtcaacgacaacacgctgttcaaatggatgatttttaatgggggagctcctaattgtatcccatgtaaggaaacctgtgagaatgtggattgtgggcccgggaagaagtgccgcatgaataagaagaataagccacgctgtgtttgcgcccctgactgttctaatatcacctggaaaggaccagtgtgcggacttgacgggaaaacgtatcggaatgagtgtgcccttctgaaggctcgatgtaaagagcaacccgagctagaggtgcagtatcaaggccggtgcaagaagacatgccgcgatgtgttttgcccaggtagttctacctgcgtggtcgaccagacgaataacgcttattgcgtaacatgtaataggatatgtccagagcctgcctcgtcagaacaatacctgtgcggaaacgacggagtgacatactctagcgcatgccatctacgcaaagcaacctgtctcctgggtcgaagcattggactcgcttacgaaggcaaatgcattaaagccaagagctgcgaggatatccaatgcactggagggaagaagtgcctctgggacttcaaagtcgggcgaggacgctgcagtttatgcgatgagctgtgcccggattccaagtccgacgagcccgtgtgcgcctccgacaatgcaacatacgcgagtgaatgtgccatgaaagaggctgcttgctccagcggcgtactactcgaggtgaaacatagcggctcttgtaactcaatctccgaggatacagaagaagaggaagaagacgaggaccaagactactcatttcccataagttcaatccttgagtgg

SEQ ID NO: 250016 - DNA, 1032 bp, synthetic construct
  misc_feature 1..1032: note = Description of Artificial Sequence: Synthetic coding sequence
  source 1..1032: mol_type = other DNA
atggtcagggccaggcaccaacccggcggtttgtgcctcctgttgttgctcctttgccagttcatggaggatcgttcagcacaggctggaaactgctggcttaggcaggcaaagaacggtcgctgccaggttctgtacaagacagaactgtcaaaggaagaatgttgttccaccggccgtctgtccacttcctggacagaggaagacgtcaatgataacaccttgttcaaatggatgatcttcaacggtggcgcaccaaactgcattccttgcaaggagacttgtgagaacgtggactgcggccccggaaagaagtgcagaatgaacaaaaagaacaagccacgctgcgtctgtgccccagattgttcaaatattacatggaagggaccagtctgtggacttgatggaaaaacttaccgcaacgagtgcgcactgctgaaggcccgttgcaaggagcagccagaactcgaggtgcaataccagggacgctgcaagaagacttgcagggacgtcttctgccccggttcttcaacatgcgtagtggatcaaaccaacaatgcctactgtgtcacctgtaaccgtatctgccccgagcccgcttcttctgagcagtacctgtgcggcaacgatggtgtgacatactcttccgcctgccaccttagaaaggccacctgcttgcttggcaggagcatcggcctcgcctacgaaggcaagtgcattaaggccaagtcttgtgaggatatccagtgcactggaggcaagaagtgtctgtgggacttcaaagtaggcaggggacgctgctccctctgcgacgaactttgtcccgattctaaatctgacgagcccgtgtgtgctagcgataatgcaacttacgcatctgagtgcgccatgaaagaagccgcttgctcatcaggtgtccttctggaggtgaagcacagcggatcttgtaactccatctcagaggataccgaggaggaggaagaggacgaagatcaggactattccttcccaatctccagcatcctggagtgg

SEQ ID NO: 250017 - DNA, 1032 bp, synthetic construct
  misc_feature 1..1032: note = Description of Artificial Sequence: Synthetic coding sequence
  source 1..1032: mol_type = other DNA
atggtccgagcgcggcatcaaccgggcggcttgtgccttctcctcctgctgctgtgtcagtttatggaagataggtcggctcaagcaggaaactgctggctcagacaagccaaaaatgggcggtgtcaagttctgtacaaaacggaactcagcaaagaagaatgttgtagcaccgggcgcctgtcaacttcctggaccgaggaggatgtgaatgataatactcttttcaaatggatgatctttaatggcggtgccccaaactgtatcccatgtaaggaaacctgtgaaaacgtggattgcggaccgggcaagaagtgtcgaatgaacaagaagaataagccacgttgcgtgtgtgcgcctgactgttcgaatatcacgtggaagggccctgtctgcggacttgatggaaagacttaccgtaacgaatgcgcactgttgaaggcacgttgcaaagagcagcctgaacttgaagtccagtaccagggtcggtgcaaaaagacctgtcgtgatgtcttttgtccaggatctagtacttgtgtcgtggaccaaaccaacaacgcctactgtgtgacctgcaacagaatctgtcctgagcccgcatcgtcggaacagtacctttgtggaaacgacggcgttacgtactcatcggcgtgccacttgcggaaggcgacttgccttctcggacgaagcataggactcgcttacgagggaaagtgtattaaggccaagtcatgcgaagatattcaatgcactggaggcaagaaatgcctgtgggactttaaggtgggccgtgggagatgttctttgtgtgacgaactgtgcccagacagcaagtcagatgagcctgtttgcgcaagcgataacgcaacctatgcatcagagtgtgcaatgaaagaagcagcatgctcgagcggagtgctgcttgaagtgaagcattcaggttcctgtaactcgatctccgaagataccgaagaagaggaggaagatgaagatcaggactactccttccccatttccagcattttggagtgg

SEQ ID NO: 250018 - DNA, 1032 bp, synthetic construct
  misc_feature 1..1032: note = Description of Artificial Sequence: Synthetic coding sequence
  source 1..1032: mol_type = other DNA
atggtgcgggcacgccaccaaccgggcggactctgccttctcctgctgcttttgtgccaattcatggaggacaggagcgcccaggccggcaactgttggctgcgccaggctaaaaacggacgctgccaggtcctgtacaaaaccgaactttcgaaagaagagtgttgctcaactggacggctgtcaaccagctggactgaggaggatgtcaatgacaacactctgttcaaatggatgatcttcaacggtggcgcgccaaattgcatcccgtgtaaagaaacctgcgaaaacgtcgactgcggaccagggaaaaagtgccggatgaacaaaaagaacaagccgcgctgcgtctgcgcgccggattgtagcaacatcacttggaagggaccagtgtgtgggctggatggaaagacctatcggaacgagtgtgcgcttctgaaggcacggtgcaaggagcagccggagcttgaggtccaataccaaggccgctgcaaaaagacctgtcgtgacgtattttgcccgggatcgtccacttgtgttgtggaccagactaacaatgcgtattgtgtgacctgtaatagaatctgccctgaacctgcatcctcagagcaatacctttgcggtaacgatggagtgacctactcatcggcttgccatctgcgcaaggcaacctgcctcctgggacgctctatcgggttggcgtacgaaggcaaatgcatcaaggcgaagtcttgcgaagatatccaatgcactggtggaaagaagtgcctctgggatttcaaggtgggccgggggcgctgcagcctgtgcgacgaactgtgcccggattccaagagcgacgagcctgtgtgtgcgtctgacaacgccacttacgcatcggagtgtgccatgaaggaagcagcatgttcctccggagtcctcctggaagtgaagcactccggctcatgcaatagcatttccgaggatactgaagaagaagaggaggacgaggaccaggactactcgtttcccattagctcgatcctggagtgg

SEQ ID NO: 250019 - DNA, 1032 bp, synthetic construct
  misc_feature 1..1032: note = Description of Artificial Sequence: Synthetic coding sequence
  source 1..1032: mol_type = other DNA
atggttcgcgctcggcatcaacctggtggactctgtttgctgctccttctgttgtgtcagtttatggaggatcgctcggcacaagcagggaattgctggctcagacaggcaaagaacggacgctgtcaggtcctctataagactgaactgtcaaaggaagagtgttgttcgaccggcagattgtcaactagctggaccgaggaggacgtgaatgataacaccttgttcaagtggatgatcttcaacggaggggccccaaactgtataccatgcaaggaaacttgcgaaaacgtcgattgtggcccaggcaagaagtgtcgtatgaataagaaaaacaaaccccgctgtgtctgcgcccctgattgttctaacattacgtggaaaggtcccgtgtgcggtctggacggtaagacgtatcggaacgaatgtgcacttctgaaagctcgatgtaaagaacaaccagagttggaagtgcagtaccaaggacgatgtaagaaaacttgcagagatgttttttgtcctggttcgtcgacctgtgtggtggatcaaaccaacaacgcgtactgcgtcacgtgcaatcgtatctgtcccgaacctgccagctcggaacaatatctgtgtggtaatgacggagtcacttacagctccgcgtgtcacctcaggaaagcaacctgcctgcttggtaggtctattggactcgcatacgaaggaaaatgcattaaggcgaagtcgtgtgaggatattcagtgtacgggtggaaagaagtgcctttgggactttaaggtgggacgaggaagatgttcactttgtgacgaactgtgtccagacagcaagtcggatgaacctgtctgtgcctctgacaacgcaacttatgcttccgagtgcgccatgaaggaagcagcatgctcgtcaggtgtgcttcttgaagtgaagcattccgggtcgtgcaatagcatctcggaagatactgaagaagaggaggaggacgaagatcaagattacagctttccgatctcctcgattctggagtgg

SEQ ID NO: 250020 - DNA, 1032 bp, synthetic construct
  misc_feature 1..1032: note = Description of Artificial Sequence: Synthetic coding sequence
  source 1..1032: mol_type = other DNA
atggtgagagcgaggcaccagcctggcggactgtgcttgttgctgcttctactgtgtcagtttatggaggatcgcagcgctcaagcaggcaactgctggttacgccaggccaagaatggacgctgccaagtgctgtataagaccgaactgagcaaggaggaatgctgcagtactggccggctgtccacaagctggacagaggaggatgtcaacgataacaccctgttcaagtggatgatctttaatggcggggcccctaactgcatcccttgtaaggaaacgtgtgagaacgtcgattgcggacctgggaagaaatgtaggatgaacaagaagaacaaaccgagatgtgtgtgcgcacctgactgttctaacattacttggaaaggacccgtgtgcggcctggacgggaagacttaccggaacgagtgcgctcttttgaaggcgcgatgtaaggagcagcccgagctggaggtgcagtaccagggcaggtgcaaaaagacatgtagggacgtcttttgtcccgggagttctacgtgtgtagtagaccagacgaataacgcctattgtgtgacttgtaacaggatctgccccgagccagcctcatctgagcagtatctgtgcggaaatgacggggttacatattcgtcggcttgccaccttcgcaaggctacttgcctgctaggcagatctatcggcctggcctacgaaggtaaatgtataaaggccaagagttgtgaagacatacagtgcacagggggcaagaagtgtctatgggattttaaagtgggacgcggacggtgtagcctgtgtgacgagctgtgcccagacagtaagtcagacgagcctgtctgtgctagcgacaatgctacctacgcttcggagtgcgcaatgaaagaggcggcctgttcctccggagtccttctcgaggtgaaacactccgggtcttgtaatagcatttccgaggacactgaggaagaagaagaagacgaggatcaggattactcgtttcctatttcttctattctggagtgg

SEQ ID NO: 250021 - DNA, 1032 bp, synthetic construct
  misc_feature 1..1032: note = Description of Artificial Sequence: Synthetic coding sequence
  source 1..1032: mol_type = other DNA
atggtgcgagccagacaccagccaggagggctttgcttgcttcttttgctactgtgtcagtttatggaggatagaagcgctcaagctggaaactgttggcttagacaggcaaagaacggcaggtgtcaggtgctctataagactgaactgagcaaggaggagtgctgttctaccgggagactctccacaagctggactgaggaggacgtgaacgacaataccctctttaaatggatgatctttaacggaggcgctcctaattgcataccatgcaaagaaacttgcgagaacgttgattgtggaccggggaaaaaatgccgtatgaataagaagaacaaacccagatgcgtctgtgcacccgactgctctaacataacttggaaaggtcctgtatgtgggcttgacggtaagacatacaggaacgaatgcgcacttctgaaagcgcgatgtaaggaacaaccagagctggaggtccagtaccagggtcggtgcaaaaagacctgcagagacgtgttttgtccaggtagcagtacctgtgtggtggaccagacaaataatgcatactgcgttacctgcaatcggatctgcccagagcctgcttcttctgaacagtacctctgcggcaacgatggagtgacctattcgtcagcttgtcacttgaggaaagccacttgcttgctcgggcgctcaatcggcctcgcgtatgagggcaagtgtattaaggctaaatcatgtgaggatattcagtgtacagggggaaagaagtgcttgtgggatttcaaggtgggcagaggcaggtgtagcctctgcgatgagctctgtcctgactcaaagtccgacgaacctgtttgcgccagtgataacgccacatatgcatctgagtgcgctatgaaagaagccgcttgctctagtggagtactcctggaagtgaaacatagcggaagttgtaacagcatctccgaagatacggaagaggaagaggaagacgaggaccaggattacagctttccaataagtagcatcctggagtgg

SEQ ID NO: 250022 - DNA, 1032 bp, synthetic construct
  misc_feature 1..1032: note = Description of Artificial Sequence: Synthetic coding sequence
  source 1..1032: mol_type = other DNA
atggtcagggcccggcatcaacccgggggtctgtgcctcctgctgctgctcttgtgtcagttcatggaggaccgaagcgcccaagcagggaattgttggttgagacaggctaaaaacggaaggtgccaggtgctgtacaaaaccgaattgtcaaaagaggagtgctgctcaacggggcggctcagcactagttggacagaagaggacgtgaatgacaacaccctgttcaagtggatgatatttaatggaggagcgcctaattgtattccttgtaaggaaacatgcgaaaatgtggattgcggccctggcaagaagtgtcgtatgaataagaagaataagccgcgttgcgtgtgcgcccctgactgttcgaacatcacctggaaggggcctgtgtgtgggctggacggtaaaacttacagaaacgaatgtgccttactgaaggcacgctgtaaagagcagcccgaactcgaagtccagtaccagggccgctgtaaaaagacctgtagagacgtattctgcccagggagctctacctgcgtcgttgaccagacgaacaacgcttactgtgtgacctgcaatcggatctgtccagaacccgcatctagcgaacagtacttgtgcggtaacgacggcgtaacctacagttctgcttgtcatctgcgtaaagccacatgcctgctggggcggtccattggccttgcctatgagggcaagtgtattaaagcaaaatcctgtgaagacatccagtgtacaggcggcaagaagtgcctatgggatttcaaggtcggacgggggagatgcagcctatgcgatgagctatgccccgactctaagagcgacgagcctgtgtgtgcctccgacaatgctacctatgctagcgagtgcgccatgaaagaggccgcttgtagtagtggcgtgctacttgaagtgaaacacagtggctcgtgcaacagcatctccgaggataccgaagaggaggaggaggatgaagaccaggattatagttttccgattagtagtatcctcgagtgg

SEQ ID NO: 250023 - DNA, 1032 bp, synthetic construct
  misc_feature 1..1032: note = Description of Artificial Sequence: Synthetic coding sequence
  source 1..1032: mol_type = other DNA
atggtccgagcgcgacaccagcccggcgggctgtgcctcctcctgcttctgctttgtcagtttatggaagaccgctcagcccaagctggcaattgttggctaagacaggctaagaatgggcggtgtcaggtcctctataagaccgaattgagcaaagaagaatgttgttccacgggcaggctgtcaacatcatggaccgaagaagatgtgaacgacaacaccctgttcaagtggatgatcttcaatggcggagcgcccaattgtataccgtgcaaggaaacctgcgaaaacgtagactgcggtcctggtaagaagtgccgtatgaacaagaagaataaaccgcgttgtgtctgtgcgcctgactgtagtaacatcacatggaaggggcctgtgtgcggtttagacgggaagacctacagaaatgagtgtgcccttctcaaggcccgatgtaaggagcagcccgagctcgaggtacagtaccagggcagatgtaagaagacgtgcagggatgttttctgccccggatcctccacctgcgtggtcgaccagacaaataacgcgtactgcgtgacatgtaatcgcatatgtcctgaaccagcatcctccgagcaatacctctgtggcaacgacggagtcacctactccagtgcttgccacctcaggaaggccacatgcctgctgggccgcagtatcgggctcgcctacgaagggaaatgcatcaaggccaaatcatgtgaggacatccagtgtaccggcggcaagaagtgtctgtgggacttcaaggtgggccggggacgatgcagtctgtgcgacgagctctgtccggactcgaaatctgacgaacccgtttgtgcttcagacaatgctacctatgctagtgaatgcgccatgaaggaagctgcctgcagtagtggggtcctcctggaggtgaagcactcaggaagttgcaactccatttctgaagataccgaagaagaagaggaggacgaagatcaggactactcttttccgatatcttctatactggagtgg

SEQ ID NO: 250024 - DNA, 1032 bp, synthetic construct
  misc_feature 1..1032: note = Description of Artificial Sequence: Synthetic coding sequence
  source 1..1032: mol_type = other DNA
atggtgagagcgcgacatcagcccgggggactctgcctactgttacttctcctttgccagtttatggaggatcgttctgcccaggccggaaactgttggcttcgacaggccaagaacgggcgctgtcaggtgttatataaaactgaactatccaaggaggaatgttgttccaccggccggctaagcacaagctggactgaggaagatgtcaacgacaatacgctgtttaagtggatgattttcaacggaggagctccgaactgtattccgtgtaaagagacctgtgagaatgtggactgcggccccggaaaaaaatgcaggatgaacaagaagaacaaaccgagatgtgtgtgcgccccagactgttccaacatcacttggaagggaccagtctgcggcctagatggtaaaacctacagaaacgaatgcgccctcctaaaggccaggtgtaaggaacaaccagaactagaggttcagtaccaaggtaggtgcaagaaaacctgccgggatgtgttctgccccgggagtagtacatgtgttgtggatcaaactaataacgcctattgcgtaacctgcaaccgtatttgtcctgaacccgccagctctgagcagtatttatgcggtaatgacggcgtgacatacagcagcgcttgtcatcttcgcaaagcaacctgcctgctgggccgatcaatcgggctagcctacgaaggcaagtgcataaaggcaaagtcttgcgaggacattcagtgtacagggggtaaaaagtgtctgtgggacttcaaagtcggtcgcggccggtgttccctttgcgatgaattatgtcctgacagtaaatccgacgaacccgtgtgcgccagcgacaatgcaacatatgcatccgaatgtgctatgaaagaggctgcatgtagctccggcgttctcctggaagttaaacactctggttcttgtaattcgataagcgaggacacagaggaagaagaggaagacgaagatcaggattatagttttcccatatctagcatcctggagtgg

SEQ ID NO: 250025 - DNA, 1032 bp, synthetic construct
  misc_feature 1..1032: note = Description of Artificial Sequence: Synthetic coding sequence
  source 1..1032: mol_type = other DNA
atggtgagggcccgtcatcaacctggcggcctgtgcttactactcctccttttgtgtcagttcatggaggataggtcagcccaggccgggaactgctggttgagacaggccaagaatgggagatgccaggtgctctacaaaaccgagctgtcgaaggaagagtgttgcagcaccggacggctgagtacttcttggacagaggaggatgttaatgataatacgttgtttaagtggatgatctttaatgggggcgcccccaactgcataccatgtaaggaaacatgtgagaatgtggattgtggccccggcaagaaatgccgcatgaacaagaagaataagccgagatgtgtgtgcgccccggactgtagtaacatcacatggaagggccccgtttgtgggctagacggcaaaacttatcggaatgagtgcgccctgctgaaggcccgttgtaaagagcagcctgagcttgaagtgcagtaccagggccgctgcaagaagacatgtcgagacgtgttctgccccggaagcagtacttgcgtggttgatcagaccaataatgcgtactgtgtcacctgtaaccgtatctgtcctgaaccagctagttctgaacagtatctgtgtggtaacgacggcgtcacatattcctctgcttgccatctgaggaaggctacttgtcttcttgggcgttccatcggactcgcctacgagggcaaatgcataaaagccaaatcctgcgaggatatccaatgcaccggtggaaagaaatgcctgtgggactttaaggtgggtaggggcagatgttctctatgcgacgaactctgtcccgactctaaatctgatgagccggtgtgcgctagtgataacgccacgtatgcctctgagtgtgccatgaaagaggccgcctgttcatctggcgtgctcctagaggtaaagcattccggtagctgtaattcaatctcagaagacacagaagaggaagaggaggacgaagatcaagattatagcttccccatctcttcaatcctcgaatgg

SEQ ID NO: 250026 - DNA, 1032 bp, synthetic construct
  misc_feature 1..1032: note = Description of Artificial Sequence: Synthetic coding sequence
  source 1..1032: mol_type = other DNA
atggttcgagcacgccaccaaccgggtggactgtgtctcctcctgctgctgctttgtcagttcatggaggatcgttcggctcaggcgggaaattgttggcttcgtcaggccaagaatggacgctgccaggtcttatacaaaaccgagctctctaaggaggagtgttgcagtaccggcagactgtcaacttcctggactgaggaagatgtaaatgataatactcttttcaagtggatgatcttcaatggtggcgcaccgaattgtattccatgtaaggagacgtgcgaaaacgtggactgcggccctggcaaaaaatgcagaatgaataagaagaataaaccgagatgcgtgtgtgccccagattgcagtaacattacctggaaaggccctgtttgtggactggacggcaagacctaccgtaacgagtgcgcgttgctaaaggcacggtgcaaggaacagcccgaactagaggtacagtaccagggacgctgtaagaagacttgccgtgacgtgttctgtcccggatcttcgacatgcgtcgtcgaccagactaacaacgcatactgcgttacttgcaaccgtatctgcccagaaccagcatcctcagaacagtatctgtgcggaaatgatggtgtcacatactcgtcagcgtgtcacctccgcaaggcgacatgtttgcttggcaggtctattggactcgcgtatgaaggtaaatgtatcaaggcaaaaagctgtgaggatattcaatgtaccggtggtaaaaagtgtctttgggatttcaaggtcggccgaggacggtgctctctctgtgacgaactgtgccctgattcaaaatccgatgaacccgtatgcgcctcagacaacgccacatatgctagcgagtgcgcaatgaaggaagcagcctgctcttccggtgttcttcttgaagtcaagcactcaggttcgtgtaacagtatctcagaagatactgaagaggaggaagaggatgaggatcaagactattcattcccaatctcctcgatcctcgagtgg

SEQ ID NO: 250027 - DNA, 1032 bp, synthetic construct
  misc_feature 1..1032: note = Description of Artificial Sequence: Synthetic coding sequence
  source 1..1032: mol_type = other DNA
atggtccgtgcaagacaccagccaggaggcctgtgcctcttgctgctgctgttgtgtcagtttatggaggatcggagtgcccaggcagggaattgttggctacgtcaggctaaaaacggaagatgccaagtgctgtacaaaaccgagctgtcgaaggaagaatgctgcagcaccgggaggcttagtacgtcatggacagaggaggacgtgaatgataacacattgtttaagtggatgatctttaatgggggcgctcctaattgtattccatgcaaagagacgtgcgagaatgtggattgcggtcccgggaaaaaatgccggatgaataaaaaaaacaagccacggtgcgtctgtgctcctgattgttccaatattacctggaagggaccagtctgcggactagatggcaaaacctacaggaatgagtgcgccttactcaaggcacgatgtaaggagcagccagaactggaagtgcagtaccaagggaggtgcaagaaaacatgccgagatgtcttctgtccaggttccagcacctgcgtggtcgaccagacaaacaatgcatattgtgtgacatgtaataggatctgccccgaacccgccagttccgaacagtacctgtgcgggaatgacggcgtgacttacagctcagcctgccacttaagaaaggcaacctgtctattgggccgctctatcggccttgcctacgaaggcaagtgcataaaagcgaaatcttgtgaggatatccagtgcacgggcggaaagaaatgcctgtgggatttcaaagtgggaagaggaagatgttcgctatgtgacgaactctgtcccgactccaagtctgacgaacccgtgtgtgccagcgacaacgccacctatgcttccgagtgcgctatgaaagaagcggcctgtagcagcggcgtgctccttgaagtgaagcactcagggtcatgtaattccatttcagaagataccgaggaggaagaggaggatgaggatcaggactacagcttccctatttcgagcattctggagtgg

SEQ ID NO: 250028 - DNA, 1032 bp, synthetic construct
  misc_feature 1..1032: note = Description of Artificial Sequence: Synthetic coding sequence
  source 1..1032: mol_type = other DNA
atggtgcgggcgcggcaccaacccggcggcctttgcctgctcttactactgctctgccaatttatggaggaccgcagcgcgcaagctgggaactgctggttgaggcaggctaagaatggcaggtgccaagtactgtataaaacagagttgtccaaagaagaatgttgcagtacagggaggctgtccacctcctggacagaggaagacgtgaacgataacactctgtttaagtggatgatctttaacggcggggccccgaactgcattccatgtaaggagacctgcgagaatgtggactgcggcccaggtaaaaaatgccggatgaacaagaagaacaagcctcggtgtgtatgcgctcccgactgcagcaacatcacttggaagggccccgtgtgtgggttggacggcaagacctatcggaacgaatgcgcactactaaaagctaggtgcaaagagcaacctgaactagaggtgcaataccagggtcgctgcaagaaaacctgcagggacgttttctgtccgggatccagcacttgcgtggttgaccagaccaataatgcgtactgcgtcacttgcaaccgtatctgcccggaaccagcttcttcggaacagtatctgtgcggaaatgacggcgtcacttatagctctgcatgtcacctccgaaaggctacatgcctgcttgggaggtccataggactggcttatgaagggaagtgcatcaaggctaagtcctgcgaggacatccagtgtacaggcggaaagaaatgtttgtgggactttaaggtaggcagggggcggtgctctttatgcgatgaactttgtcctgattccaagtcagatgagcccgtgtgcgcctctgacaacgccacgtacgccagtgaatgcgccatgaaggaggcagcctgttccagcggtgtcctcctcgaagttaaacatagcgggtcatgtaattccatatctgaggatacagaagaggaggaggaggacgaagaccaagattactcgttcccaatctcctccattctggaatgg

SEQ ID NO: 250029 - DNA, 1032 bp, synthetic construct
  misc_feature 1..1032: note = Description of Artificial Sequence: Synthetic coding sequence
  source 1..1032: mol_type = other DNA
atggtgagagcaaggcaccagccgggcggactgtgcctgctcctgttgcttctgtgccagttcatggaggaccgctccgcgcaggccggcaactgctggcttagacaggctaaaaacggcagatgccaagtgctgtataagaccgagctgtccaaagaagagtgttgcagtactggtcggctgagtacctcatggacagaggaagacgttaacgataacaccctgttcaagtggatgatttttaacggcggcgcacccaactgcatcccctgtaaggagacctgcgaaaatgtggattgtggtccagggaaaaaatgtagaatgaacaagaagaacaaacctagatgcgtttgcgctcccgattgctctaatataacatggaagggccctgtctgtggattagacggaaaaacttacaggaacgaatgcgccctcttgaaagcaagatgtaaggagcaacctgagctggaggtgcaataccagggccggtgtaagaagacttgccgagatgttttctgcccgggctcatcaacctgcgtagtggaccagaccaacaacgcttactgtgtcacctgcaacaggatttgccccgaacctgctagttcagagcaatacttgtgcggcaacgatggcgtgacctacagtagcgcctgtcatctgcggaaggccacatgccttctgggacgctccattggactcgcttacgaaggaaagtgcatcaaagccaaatcatgcgaggatatacagtgtacaggaggcaaaaagtgtctatgggactttaaggtggggagaggcagatgctccctgtgtgacgagctctgccctgattcgaaaagtgacgagcctgtctgtgctagcgacaatgccacttacgcatctgaatgtgctatgaaggaagctgcttgtagctccggggtgctgctggaagtgaagcatagcgggagttgtaattctatcagcgaagacactgaagaggaggaagaagacgaggaccaggactacagttttcccattagttccattcttgagtgg

SEQ ID NO: 250030 - DNA, 1032 bp, synthetic construct
  misc_feature 1..1032: note = Description of Artificial Sequence: Synthetic coding sequence
  source 1..1032: mol_type = other DNA
atggtgagagcaaggcaccagccaggtggcctgtgccttttgctcctcctgctgtgtcagtttatggaagatagatcagctcaggcaggaaattgctggctgcgccaagccaagaatggtagatgtcaggtactgtacaaaactgaactgtcgaaagaagaatgctgttcaactggccgcctctccactagctggaccgaggaggacgtgaatgataacacgctgtttaagtggatgatattcaatggtggcgcccccaactgcattccctgtaaagaaacttgtgaaaatgtcgactgtggaccaggtaaaaagtgccgcatgaacaagaagaacaagcctcgttgcgtttgcgccccagactgctcaaacattacttggaagggccctgtctgcggtcttgatggaaagacctaccggaacgagtgcgccctcttgaaggcaaggtgcaaggaacaacctgaactggaagtgcaataccaaggcagatgtaaaaagacctgtagggacgtattttgtcccggatcctcgacctgcgtggtggaccaaaccaacaacgcttactgtgtcacctgtaatcgaatctgtccagagcctgcatcctcggaacagtacctctgcggaaacgatggtgtgacctactcgagtgcatgtcatcttagaaaagcaacttgtcttttggggcgctccatcggccttgcgtacgaaggaaagtgtattaaggcgaagagctgtgaggatatccaatgtaccggagggaagaagtgcttgtgggacttcaaggtgggacgggggcgttgcagtctgtgtgatgaactttgtccggactccaagagcgatgaacctgtctgtgcaagcgataacgccacgtatgcatctgaatgtgcgatgaaagaagcagcctgttcaagcggggtgctccttgaagtgaaacattccggatcctgtaactcaatttcagaagataccgaagaagaggaggaggatgaggaccaggattactcttttcctatatctagcattctcgagtgg

SEQ ID NO: 250031 - DNA, 1032 bp, synthetic construct
  misc_feature 1..1032: note = Description of Artificial Sequence: Synthetic coding sequence
  source 1..1032: mol_type = other DNA
atggtccgcgcgaggcatcagcctggcggcttgtgcctgctgttacttctgctatgtcagttcatggaggaccgaagtgcccaagccggaaactgctggcttcgacaggctaagaacgggcgttgccaagttctgtacaagacagagttgagtaaggaggagtgttgttcaaccggacgtctgtctacctcttggactgaggaggacgtgaacgataatactctctttaaatggatgatcttcaacggtggagctcctaactgcataccgtgcaaagaaacttgcgagaacgtggattgtgggcccggcaaaaagtgccgcatgaataagaaaaataagccccgctgtgtatgtgcaccggactgttctaatatcacctggaaaggacctgtctgcggtctggacggaaaaacatatcgcaacgagtgcgctctgctgaaagcgcgctgcaaagagcagcccgagctcgaagtgcagtatcagggccgatgtaaaaagacttgtagagacgtgttttgtccaggaagttccacctgcgtcgttgaccaaacaaacaacgcctactgcgtgacatgcaaccggatctgtcccgagccagctagctccgaacagtacctttgcgggaatgatggagttacatactctagcgcctgtcaccttaggaaagcaacgtgcctgcttggacgctctatcggactcgcatatgaaggaaaatgcataaaggctaaatcttgtgaggacatccaatgtacaggaggaaaaaaatgcttgtgggacttcaaggttggcaggggaagatgtagcctttgcgacgaactatgtcctgactctaaatccgacgaacccgtttgcgctagtgataacgcaacttatgcttcagaatgcgcaatgaaggaagctgcgtgctcttcaggagtcctcctagaggtgaagcattccggcagctgtaactccattagcgaagatacggaagaagaagaggaggacgaagatcaagattatagctttcccatctcaagcattctggagtgg

SEQ ID NO: 250032 - DNA, 1032 bp, synthetic construct
  misc_feature 1..1032: note = Description of Artificial Sequence: Synthetic coding sequence
  source 1..1032: mol_type = other DNA
atggtgagagcacggcaccagccaggtggactgtgtctgctcctgctgctcctgtgccagttcatggaggaccgctcggcccaggctggaaactgctggctgcgacaggccaagaacggacgctgccaagtgctgtacaaaactgaactgtccaaagaagaatgctgtagcaccggacggctgtcgacttcctggactgaagaggacgtcaacgataatactctgtttaagtggatgatcttcaacggtggagcgccgaattgcatcccgtgcaaagagacttgcgaaaacgtggactgcggaccgggcaagaagtgccggatgaacaaaaagaataagccgcgctgcgtgtgcgccccagactgctctaacatcacgtggaagggtccggtgtgcggactcgatggcaagacctaccggaacgaatgcgcgctcttgaaggcacggtgtaaagagcaaccggagctcgaggtgcagtaccagggtcgctgtaagaaaacttgccgcgatgtgttctgcccaggaagcagcacctgcgtcgtggatcaaaccaacaacgcctactgcgtcacctgcaaccgcatatgcccggagccggccagctccgaacagtacttgtgcgggaatgatggagtgacttactcatccgcatgccatctgcgaaaggcaacttgcctgctcgggaggtcgatcggcctggcctacgaaggaaagtgtatcaaggcgaagagctgcgaggacatccaatgcacggggggaaagaagtgcctctgggatttcaaagtgggacgcggacgctgctcactgtgcgatgaactctgcccagatagcaagtccgacgagcccgtctgtgcctccgataatgctacttacgcctcggaatgtgccatgaaggaggcggcatgctcatcgggagtgcttctggaggttaagcattcgggatcttgcaactcaatctcagaagataccgaggaggaagaggaggatgaagatcaggactacagctttcccatttcttcaatcctggagtgg

SEQ ID NO: 250033 - DNA, 1032 bp, synthetic construct
  misc_feature 1..1032: note = Description of Artificial Sequence: Synthetic coding sequence
  source 1..1032: mol_type = other DNA
atggtcagagccaggcatcaacctggcggattgtgcttgctgctgctgctcctctgtcagttcatggaggacaggagcgcacaggccggaaactgctggctgcgccaagctaagaatggaagatgccaggttctctacaagaccgagttgagtaaggaggaatgctgttccactggcaggcttagcacttcctggactgaggaagatgtaaacgacaacaccctttttaagtggatgatctttaatggtggagcgcctaattgcatcccttgcaaggagacgtgcgagaacgtggactgtggtcccggcaaaaagtgtaggatgaataagaaaaacaaacccagatgtgtgtgcgctcctgattgtagcaatattacttggaagggaccagtgtgtggcttggacggtaagacctaccgcaacgagtgcgccttgttgaaggcccgctgcaaagaacaaccggagctggaggttcaatatcagggtcgctgcaaaaagacctgcagagacgtgttctgccccggttctagcacgtgtgtagtggaccaaacaaacaacgcttactgcgtgacctgcaatcgcatctgccctgaacctgcgagttctgaacaatacctgtgcggaaatgacggagtaacttattcctccgcatgtcatctgcgcaaggctacgtgcctcttgggtaggtctattggtctggcctacgaaggcaagtgcatcaaagccaaaagttgcgaagacatccagtgtaccggtggtaagaagtgcctgtgggacttcaaagtgggtagaggaagatgcagcctctgcgacgaattgtgtccagacagcaaaagtgacgagcctgtttgtgcatccgacaatgccacgtacgcatctgaatgcgctatgaaagaagccgcctgtagctccggcgtcttgcttgaagtgaagcatagcggcagctgtaatagtatctctgaagacacagaggaggaagaggaggacgaggaccaagactacagtttccccattagcagtatcctggagtgg

SEQ ID NO: 250034 - DNA, 1032 bp, synthetic construct
  misc_feature 1..1032: note = Description of Artificial Sequence: Synthetic coding sequence
  source 1..1032: mol_type = other DNA
atggtgcgggcccggcatcagcccggcggtctgtgcctcctgctgctgctcctctgccagttcatggaagataggtccgcgcaggccggcaactgctggctgcgccaggccaagaacgggcgctgtcaagtgctgtacaagactgaactgagtaaggaggaatgctgctcaaccgggcgactgtcaaccagctggacggaggaggacgtcaacgataacaccttgttcaaatggatgatcttcaacggcggagcgcctaattgtattccctgtaaggaaacctgcgaaaatgtcgactgcggtccgggcaagaaatgcagaatgaataagaaaaacaagccgaggtgcgtctgtgcaccagactgctcgaacatcacctggaagggaccagtgtgcggattggatgggaaaacttacagaaatgagtgtgcgcttctgaaagcacgctgtaaggagcaaccggaacttgaggtgcaataccagggacggtgcaaaaagacttgcagagatgtcttttgcccgggatcctcaacttgtgtggtggaccagactaataatgcctactgcgtgacctgcaaccgcatttgtccggagccagcttcatctgaacagtatctgtgcggaaacgacggtgtcacttactcctccgcatgccacctccggaaagctacgtgcttgctcgggcgctcgatcggactcgcgtacgaaggaaagtgcatcaaggccaagagctgcgaggatatccagtgtaccggaggaaagaagtgcctgtgggacttcaaggtgggacggggccgctgctcgctctgcgacgagctgtgccctgactcgaagagcgacgaaccggtgtgtgcgtcagacaacgctacctacgcctcggaatgtgccatgaaggaagcagcctgctccagcggcgttcttctggaggtgaaacacagcggatcctgcaactccatctcggaggatactgaagaagaggaagaagatgaagatcaagactactcgtttcctatcagctcgatcctggagtgg

SEQ ID NO: 250035 - DNA, 1032 bp, synthetic construct
  misc_feature 1..1032: note = Description of Artificial Sequence: Synthetic coding sequence
  source 1..1032: mol_type = other DNA
atggtaagagcacgacaccagcccggaggattgtgcctgctactgctgctgctgtgccagtttatggaggaccgatccgctcaggcggggaactgctggcttcggcaggccaagaacggtcggtgtcaagttctctacaaaaccgaactttcaaaggaggaatgctgcagcaccggacgcctatccacctcctggaccgaagaggatgtcaatgacaacaccctttttaagtggatgatcttcaacggcggtgcccccaactgcattccatgtaaagagacttgcgagaatgtcgattgcggacctggcaaaaagtgccgtatgaacaagaagaacaaacctcggtgcgtgtgtgctccagattgttctaatatcacctggaagggccctgtgtgcgggttggatgggaagacatatcgtaatgaatgtgctctgcttaaggcacggtgcaaggaacagccagaactggaagtccagtaccaggggagatgtaagaagacatgtcgggatgtgttttgccccggctcctcgacttgtgttgtggaccagaccaataacgcctactgcgtgacctgtaatagaatctgccccgaacccgcatctagcgaacagtatctctgtgggaacgacggcgtgacctattcttccgcatgtcaccttcgaaaggccacctgccttttaggcagaagtatcggtctggcgtacgaagggaaatgtattaaggccaagagctgtgaagatattcagtgtacaggcggaaagaaatgcctgtgggattttaaggtgggcagggggcgctgttcactttgtgatgagctgtgccccgattcaaaaagcgacgaaccggtatgtgctagcgataacgctacgtatgccagcgaatgcgccatgaaggaggcagcttgttcctccggagtgctgctggaggtgaagcatagcggatcctgtaattccatctcggaagatacagaggaggaggaggaggatgaagaccaggactattctttccccatctcctccattctcgagtgg

SEQ ID NO: 250036 - DNA, 1032 bp, synthetic construct
  misc_feature 1..1032: note = Description of Artificial Sequence: Synthetic coding sequence
  source 1..1032: mol_type = other DNA
atggtgcgtgccaggcatcaacctggaggtttgtgcttgttgctcctcctcctgtgccagttcatggaggaccgttcagctcaggctggtaactgctggctccgccaggcaaagaacggcagatgccaagttctttacaagacagagttgagtaaagaagagtgttgtagcactggtcgtttgtctacaagctggactgaagaggacgttaatgataatacattgttcaaatggatgatcttcaacggaggcgcacccaattgtatcccttgcaaagagacctgtgaaaacgtggactgcggccctggaaagaaatgccgtatgaataaaaaaaataaacccaggtgcgtgtgtgctcccgactgtagcaacatcacctggaagggccccgtgtgcggattggatggaaaaacatatcgtaatgagtgcgcattgctcaaggctcgttgtaaggaacagcctgagttggaggtgcagtatcaaggcagatgtaaaaagacatgcagagacgtcttctgtcccggttcttcaacctgcgtagtcgaccagactaacaatgcatactgcgtgacttgcaaccgtatttgccctgaaccagccagctccgagcaatatttgtgtggtaatgatggcgtaacatactcctctgcttgccatttgaggaaggctacatgtctgctgggtagatccatcggcctggcttacgagggaaaatgtatcaaggcaaagtcctgcgaggatatccagtgtaccggtggaaagaagtgtctttgggactttaaagtgggaaggggaagatgctcattgtgcgacgaactctgtccagattctaaatcagacgagcccgtttgtgctagcgacaacgctacatacgcctcagagtgtgccatgaaagaggctgcctgctcttctggagtgctgctggaggtcaagcatagtggcagttgcaactccatttcagaagatacagaggaggaagaggaggatgaggaccaggactacagcttccctatctccagtatcctggagtgg

SEQ ID NO: 250037 - DNA, 1032 bp, synthetic construct
  misc_feature 1..1032: note = Description of Artificial Sequence: Synthetic coding sequence
  source 1..1032: mol_type = other DNA
atggtccgcgcccgccatcagcccggaggactgtgtctgcttctcctgctgctgtgccagttcatggaagataggtccgcccaggccgggaactgttggttgcgacaagctaagaatgggaggtgccaagtgctgtataaaacggagctcagcaaagaagaatgttgctctaccgggcgcctgagcacaagctggactgaggaagatgtcaatgataataccctgtttaagtggatgattttcaacgggggggcacccaactgtataccctgcaaagagacttgtgaaaatgtggactgtggcccgggtaaaaaatgtagaatgaacaagaagaacaaaccaagatgcgtctgtgccccagactgtagcaatatcacttggaaaggtcccgtttgcggactcgacggcaagacgtacagaaatgagtgcgcccttctgaaagctaggtgcaaggagcagccagagctagaggtccaatatcagggaaggtgcaaaaagacttgtcgggatgtattctgccctggctccagcacgtgcgtggtcgaccagactaataacgcatactgcgtaacctgcaaccgaatctgcccggagccagcatcttcagaacaatacctgtgcggcaatgacggagtgacctactcctccgcctgccatctccgcaaggcaacgtgcctgcttggaagatccataggcctcgcgtacgagggcaagtgcattaaagctaagagctgtgaagacatacagtgtacggggggcaaaaagtgcctatgggatttcaaggtgggcaggggaagatgttccctctgtgatgagctgtgcccggatagtaagagtgacgagccagtctgcgcgtccgataacgccacctacgcatccgagtgtgcgatgaaagaggcagcttgctcttctggcgtcctgctcgaggtgaagcattcaggttcctgcaactccatctccgaggatactgaagaagaggaggaagacgaggaccaagactactcttttcctatttcaagcattctggagtgg

SEQ ID NO: 250038 - DNA, 1032 bp, synthetic construct
  misc_feature 1..1032: note = Description of Artificial Sequence: Synthetic coding sequence
  source 1..1032: mol_type = other DNA
atggtccgggctcgacaccagccgggggggctgtgtctactcctgctgctcctgtgtcagttcatggaggaccgatccgcacaagccgggaactgctggctgcgacaggccaaaaacgggcgatgtcaggtgctgtataaaaccgagctgagcaaggaggagtgctgttctaccgggcggcttagtaccagctggacagaagaggatgtaaacgataatactctgttcaagtggatgatctttaacgggggagccccaaattgtataccctgcaaagaaacctgtgagaacgtcgactgcgggccaggtaagaaatgtaggatgaacaagaaaaataaacctaggtgcgtctgtgctcctgattgtagcaatattacatggaagggccctgtgtgcggcctggacggcaagacgtacaggaacgagtgcgctctcttaaaggcccgatgtaaggagcagcccgagcttgaagtgcaataccagggaagatgtaagaagacttgccgcgacgtcttctgtccagggtcatccacgtgtgtggtagatcaaacaaacaacgcctattgcgtgacctgcaatcggatctgccctgagccagcaagttcagagcagtatctgtgcggaaacgatggtgtgacctacagttccgcttgccacctgaggaaggccacctgcctgttgggacggagcatcggactggcctacgaaggaaagtgcattaaggctaagtcctgcgaagatattcagtgtaccggaggcaagaaatgcctctgggactttaaagtcggccgtggaagatgtagcctgtgcgatgagttatgtcctgatagtaagtccgatgagcctgtctgtgcctccgacaacgctacttacgcatctgagtgtgctatgaaagaggctgcctgctctagtggcgtgctgctggaggtcaagcacagtggatcctgtaatagtatctctgaagacacggaggaggaggaggaggatgaagatcaagattactcgtttccgatctcctccattctagaatgg

SEQ ID NO: 250039 - DNA, 1032 bp, synthetic construct
  misc_feature 1..1032: note = Description of Artificial Sequence: Synthetic coding sequence
  source 1..1032: mol_type = other DNA
atggtcagggctcgccaccagccgggcggactgtgtctcctgttactgctgctctgccaatttatggaggaccgttctgctcaagcaggaaactgttggctgcgtcaagcaaaaaacggacgctgtcaggtactgtataaaacagagctctctaaagaagagtgctgttcaaccggacgcttgagcacttcctggacagaggaggacgtcaatgacaacacactattcaaatggatgatctttaatggaggggcccctaattgtatcccctgtaaagaaacgtgtgagaacgtggactgcggtccaggcaaaaaatgtagaatgaacaagaagaacaagcccagatgcgtgtgcgcccctgattgcagcaacattacgtggaagggccccgtgtgtggactcgacggtaagacctatagaaatgagtgcgccctgctaaaagcccgctgcaaggaacagcccgaactagaggttcagtaccaggggagatgcaagaagacgtgtcgcgatgtgttttgcccaggatcatctacctgcgtagtggaccagactaacaacgcctattgcgttacatgtaacagaatttgccccgagcctgcatccagcgaacagtacttgtgtggaaacgatggcgtgacctattcctccgcctgtcatcttcgaaaggccacatgcctgctggggcggagtattggcctcgcatacgagggaaaatgtataaaagccaagtcctgtgaggatatccagtgcactggcggcaagaaatgcctctgggattttaaagtcggccggggaaggtgtagcttgtgcgacgaactgtgcccggactccaagtcagacgagcccgtctgcgccagcgacaacgcaacatacgccagtgagtgcgctatgaaggaggctgcgtgcagcagcggggtgttactggaagtcaagcactcggggagctgcaactcgattagtgaggatacagaggaagaggaggaagacgaggatcaggactattcttttccaatttcctctatcttagagtgg

SEQ ID NO: 250040 - DNA, 1032 bp, synthetic construct
  misc_feature 1..1032: note = Description of Artificial Sequence: Synthetic coding sequence
  source 1..1032: mol_type = other DNA
atggtgcgagctaggcaccagcccggtggcctgtgtttgcttctgctactgctgtgccagtttatggaggaccggtctgcacaggctgggaactgctggctcaggcaggctaagaacggacggtgtcaggtgctgtacaagacagagctgtccaaagaagagtgctgtagcaccggacggctgagcactagttggacagaagaggacgtgaacgacaatacactgttcaagtggatgatcttcaacgggggagctccaaattgtatcccatgtaaggagacatgtgagaatgtcgactgcggccctggcaaaaaatgcagaatgaataagaaaaataagcccagatgcgtttgtgctcccgactgtagcaatattacatggaagggtcccgtctgtggcctggacggcaaaacatacagaaatgaatgtgctcttttgaaggcacgctgcaaagagcagccggagctcgaggtgcagtatcaaggccgctgtaagaaaacttgtagagatgtattttgccctggttcaagcacttgtgtggtggatcagaccaacaacgcttattgtgtcacttgcaataggatttgccccgagccagcctccagcgaacagtatctgtgtgggaacgatggagtcacatatagttccgcgtgccacctgcgcaaggccacctgtttgcttggccgaagtatcgggctggcctatgaaggcaaatgcataaaggccaaaagttgcgaagacattcaatgtacaggcggcaaaaagtgtctgtgggatttcaaggtggggcgcggacggtgtagcctgtgtgacgaactgtgccccgattccaaatcagacgaacctgtgtgtgcatccgacaatgcgacatacgcttcagaatgcgctatgaaagaagccgcctgctctagtggggtgctgctggaggtcaagcactctggtagttgcaacagcattagtgaggataccgaagaggaggaagaggacgaagaccaagattatagcttccctatcagcagtattctggaatgg

SEQ ID NO: 250041 - DNA, 1032 bp, synthetic construct
  misc_feature 1..1032: note = Description of Artificial Sequence: Synthetic coding sequence
  source 1..1032: mol_type = other DNA
atggtgagagcaaggcatcaacccggtggactctgtctgcttctcctccttctctgccaattcatggaagatcgtagtgcccaggcaggaaactgctggctgagacaagcgaaaaatggacggtgtcaggtgctctataagaccgagctgagcaaggaggaatgctgcagcacgggccgcctttcgacctcatggacggaagaagatgtgaatgacaacactttgttcaaatggatgatctttaatgggggtgcgcctaactgtattccttgtaaggaaacttgtgaaaacgtcgattgtgggcctggaaagaagtgtagaatgaataagaagaataagcctcgctgcgtgtgtgccccagattgctccaacattacgtggaaaggaccagtgtgtggcttggatggaaaaacctaccgcaatgagtgtgcccttttgaaggcgaggtgcaaggagcaacccgagcttgaggtccaataccagggacgctgcaagaaaacctgccgcgacgtcttttgtccgggaagctccacctgcgttgtggatcagactaacaacgcatactgcgtgacttgtaaccggatttgtccagaaccagcatcctccgaacagtacctttgtggaaacgatggtgtcacctactcaagcgcatgccatcttcgtaaggcaacctgtctgctcggaagatcgattgggctggcatacgagggtaagtgtataaaggcgaagagctgtgaagatatccaatgtaccggaggtaagaagtgtttgtgggactttaaagtgggtaggggacgctgttccctctgtgacgaattgtgtcctgactccaaaagcgacgaacctgtgtgtgcgtccgataacgcaacttacgcctccgaatgtgcgatgaaggaagccgcatgttcctccggagtgctccttgaagtgaagcatagcggttcatgtaactccatttcagaagataccgaggaagaagaagaggatgaggatcaagactactcctttcctatctcgtccatcctggaatgg

SEQ ID NO: 250042 - DNA, 1032 bp, synthetic construct
  misc_feature 1..1032: note = Description of Artificial Sequence: Synthetic coding sequence
  source 1..1032: mol_type = other DNA
atggtcagagcgagacatcaacccggaggtttgtgtctcttgctgttgctcctctgtcaattcatggaggatcgttcggctcaggcaggaaactgttggcttcgtcaagcaaagaacggtcgttgccaggttctttacaaaactgaactgagcaaggaagaatgttgttctaccgggaggcttagcacctcatggaccgaggaagatgtcaacgacaacactctgtttaagtggatgatctttaatggaggggcacccaattgtattccatgcaaggaaacctgcgaaaatgtggactgtggcccgggaaagaagtgtcgcatgaacaaaaagaacaagcctcgatgcgtgtgtgcacctgactgctctaacattacttggaagggacctgtatgcggcttggatggaaagacttacaggaacgaatgtgcactgctgaaagccagatgtaaggaacaaccggaactggaagtgcagtatcagggtcggtgtaaaaagacgtgccgagatgtgttttgtccaggtagctcaacttgcgtggtggatcaaacgaataatgcctactgcgtgacctgtaaccggatctgcccggagcctgcatcgtcagaacagtacctgtgtggcaatgatggcgtgacctacagctctgcgtgccaccttagaaaagccacgtgccttctcggccgctcgataggtcttgcttacgagggtaagtgtatcaaggcaaaatcctgtgaagatatccaatgtactggcgggaagaaatgcctgtgggactttaaggtcggcagaggacggtgttctctttgcgatgagttgtgtcctgactcaaagtccgatgagccagtgtgtgcgtccgacaacgccacctacgcaagcgaatgcgcaatgaaggaggccgcctgttcctctggagtccttctcgaggtcaaacatagcggctcctgtaacagcatttcggaggacaccgaagaagaggaagaagatgaggaccaggattacagtttcccaatatcctcaatactggaatgg

SEQ ID NO: 250043 - DNA, 1032 bp, synthetic construct
  misc_feature 1..1032: note = Description of Artificial Sequence: Synthetic coding sequence
  source 1..1032: mol_type = other DNA
atggtacgcgcacgtcatcaacccggtggcttatgcctcctccttctcctgctgtgccagttcatggaagacagaagtgcccaggccgggaattgctggctccgtcaggcgaaaaatggccggtgtcaggttctatacaaaacagagcttagtaaggaagagtgctgctcgacaggcagactgagcacctcatggacagaggaagatgtgaatgataataccttgttcaaatggatgatattcaacggcggtgcacccaattgtatcccctgtaaagaaacctgtgagaatgtggactgtgggcccggtaagaaatgccggatgaacaaaaagaacaagcctaggtgtgtatgtgcccctgactgtagtaacatcacatggaaaggaccagtctgtggcctggatggcaagacgtaccgaaatgagtgtgcactgctgaaggcccgttgcaaggaacaaccagaacttgaagtacagtaccagggaaggtgtaaaaagacatgtcgggacgtattttgtcctggctcaagcacctgcgtggtggatcagacgaacaacgcttactgcgtgacctgtaatcgaatatgtccagagcctgcgagcagcgagcagtacctttgtggtaacgacggtgtaacatattcttcggcctgccatctcagaaaagcgacatgcttactgggaaggagcatcggattggcttatgaggggaagtgtattaaggctaaatcctgcgaggacatccagtgcacgggagggaagaaatgcctgtgggacttcaaagtgggacggggccggtgttccctgtgcgacgagctatgtcccgacagcaaatccgacgagcctgtgtgcgcaagtgataacgcgacctacgcaagcgagtgcgccatgaaagaggccgcgtgctcctcgggcgtgctgctggaggtgaagcactccggttcatgtaactcaattagtgaagatactgaggaagaggaggaagatgaggatcaggactattcgtttcctatctcatccattctggaatgg

SEQ ID NO: 250044 - DNA, 1032 bp, synthetic construct
  misc_feature 1..1032: note = Description of Artificial Sequence: Synthetic coding sequence
  source 1..1032: mol_type = other DNA
atggtgagggcccgtcaccagcctggagggttgtgcctcttactgcttctgctgtgccaattcatggaagatagaagtgcacaggcagggaactgctggctacgacaagccaaaaatggcaggtgccaggttctgtacaagaccgaactctctaaggaggagtgctgctcaaccggcagactgtcaacgtcttggaccgaagaagacgttaacgacaatacactcttcaagtggatgatcttcaacggtggcgcccccaactgtatcccctgcaaagagacttgcgagaacgtcgactgtggtccgggcaagaaatgcaggatgaacaaaaagaacaaacctagatgcgtgtgcgctcctgactgcagcaatatcacatggaagggtccagtgtgtggcctggatggtaaaacgtataggaacgagtgtgctttgttgaaggccagatgtaaggagcaacccgaacttgaggtacaataccagggaagatgtaagaaaacctgtcgggacgtgttttgcccgggctcaagcacctgtgtcgtggatcaaaccaataacgcctactgtgttacctgtaatcgcatatgcccggagcccgcgtctagcgagcaatacctgtgcggcaatgatggggtcacctactcttctgcctgccacctgcgcaaggcgacctgccttctcggccgttccatcggcctggcctatgagggaaaatgtatcaaagccaaatcctgtgaggacatccagtgcacgggaggcaagaagtgtttatgggattttaaagtaggccggggccgctgctccttgtgtgatgaattgtgccctgacagcaagagcgatgaaccagtctgcgcaagcgataacgccacgtacgccagcgagtgcgccatgaaagaagccgcgtgctctagcggagtactgctcgaagttaagcacagcggctcttgcaacagcataagtgaggacacggaggaagaagaggaggacgaagatcaggactactcctttcctataagcagcatcctggagtgg

SEQ ID NO: 250045 - DNA, 1032 bp, synthetic construct
  misc_feature 1..1032: note = Description of Artificial Sequence: Synthetic coding sequence
  source 1..1032: mol_type = other DNA
atggtgagggctcggcaccagccaggaggcctctgccttttactacttctcctctgccagtttatggaggatagaagcgctcaggcaggcaactgttggttgaggcaggccaaaaacggacggtgccaggtactctacaaaacagaactgtccaaggaagaatgttgttcaacagggcgactgagcaccagctggactgaggaagatgttaacgataacacactttttaaatggatgatctttaacggaggagctccaaactgtataccctgcaaggagacatgcgagaacgttgactgcgggcccggcaaaaaatgtcgtatgaacaaaaaaaataagccgaggtgtgtgtgcgcccccgactgctctaatattacttggaagggtcccgtatgcgggcttgatgggaaaacctaccggaatgaatgcgccctactaaaggcgagatgcaaagaacagccagaactggaggtacagtaccagggccggtgcaaaaaaacgtgccgagacgtgttctgccctggatcgtctacgtgcgttgtagatcagaccaataacgcctactgtgttacgtgtaaccgaatctgccctgaaccagcatcaagcgagcagtatctgtgtggcaatgatggcgtgacctactcctctgcatgccacctgcgtaaagctacctgcctgctggggcgaagtattggcttagcgtatgaggggaagtgcataaaggcaaaatcatgcgaggacatccagtgtaccggtggaaagaagtgtctttgggatttcaaggtggggagggggagatgttcgctatgtgatgagttgtgtcccgattctaaaagcgacgagccagtgtgtgcaagcgacaatgccacttatgcctctgagtgtgccatgaaagaggcggcctgcagcagtggtgttttgctcgaagtaaaacactctggatcctgcaacagcatctcagaggacaccgaggaagaagaagaggatgaagaccaggattacagctttccaatctccagtatactcgagtgg

SEQ ID NO: 250046 - DNA, 1032 bp, synthetic construct
  misc_feature 1..1032: note = Description of Artificial Sequence: Synthetic coding sequence
  source 1..1032: mol_type = other DNA
atggtgcgggctcgccaccagccgggcggcctgtgcctgctgctgctcctgctgtgtcagttcatggaggaccggtcagcccaggccgggaactgctggctcagacaagcgaagaatggtcgctgtcaggtcctgtacaagactgagttgtcgaaggaagagtgttgcagtactggcagactgagcacttcgtggactgaagaagatgtgaacgacaatacccttttcaagtggatgatctttaatggcggagcgcctaactgcattccatgcaaagaaacctgcgagaacgtggactgtggacctggtaagaagtgccgcatgaacaagaagaacaaaccacgctgcgtctgcgccccggactgctcgaacattacgtggaaggggcctgtctgtgggttggacggaaagacttaccgcaacgagtgcgcgctgctgaaggcgagatgtaaggaacagccggaactggaggtacaataccaaggccgctgtaagaaaacttgccgcgatgtgttctgtcctggctcgtcaacctgcgtggtggatcagactaataacgcatactgcgtgacgtgcaaccggatctgcccagagcctgcttctagcgagcaatacctctgcggaaatgatggcgtgacttactcctcggcgtgccatttgcgaaaagccacctgcctcttgggaaggagcatcggactggcctacgaggggaagtgcataaaggccaaaagctgcgaagatatccaatgtactggagggaagaagtgtctgtgggactttaaggtcggacggggacgctgcagcctttgcgacgagctgtgcccggatagcaagtccgatgagccagtgtgtgcatccgataatgctacctatgcgagcgagtgcgctatgaaagaggcggcgtgctcctccggagtgcttctggaggtcaaacactccggctcctgcaattccatctcggaagataccgaagaagaggaagaggacgaggatcaggattactctttcccgatctcaagcatccttgaatgg

SEQ ID NO: 250047 - DNA, 1032 bp, synthetic construct
  misc_feature 1..1032: note = Description of Artificial Sequence: Synthetic coding sequence
  source 1..1032: mol_type = other DNA
atggtccgagcaaggcaccagcctggaggactttgtctcttgctactcttactttgtcagttcatggaggacagatccgcccaagccggcaactgttggctgagacaggccaagaatggacgatgccaagtgctgtataagacagagctgtcaaaggaagagtgttgtagcaccggtaggctgtcaacctcatggactgaagaggatgtgaatgataacactcttttcaaatggatgatcttcaatggaggagcccccaattgcataccttgtaaagagacctgcgagaacgtggattgtggtcccggcaaaaagtgcaggatgaataagaagaacaaaccccgatgtgtttgcgcacccgattgttcaaatattacatggaaaggacctgtgtgcggcctggatgggaagacctaccggaacgaatgtgctctcctcaaggctaggtgtaaggaacaacccgagctagaagtgcagtaccaaggtcgatgcaagaagacatgcagggatgttttctgccccggcagctctacatgcgtggtagatcagaccaacaacgcgtattgtgttacctgtaatagaatctgcccagagcctgccagctccgaacagtatttgtgcggcaacgacggtgtcacctactctagcgcttgtcatctgcgaaaagcaacttgtctgctgggtaggtctatcggcctcgcttatgaagggaagtgtatcaaggccaaatcctgtgaagatatacaatgcactggcggtaagaaatgtctttgggatttcaaagtagggcgaggccggtgcagtctctgcgacgagttatgccccgactcaaagagcgacgaacctgtatgtgccagcgataacgcgacttacgcaagcgagtgcgccatgaaagaggcagcgtgcagctccggcgttctgctcgaagttaaacactccgggtcatgcaattctatctctgaggatacggaagaggaagaggaggatgaggaccaggactactcatttcccatttcttcaatcctggagtgg

SEQ ID NO: 250048 - DNA, 1032 bp, synthetic construct
  misc_feature 1..1032: note = Description of Artificial Sequence: Synthetic coding sequence
  source 1..1032: mol_type = other DNA
atggtgagggccaggcaccagcctggtggcctgtgtctgttgcttttgttgctgtgccagtttatggaggacagatcagctcaagccggaaactgctggctcagacaagccaaaaatgggcggtgccaggtgttgtacaagactgaactttcgaaggaagaatgctgctccaccggtcggctgtcaacctcatggacggaagaagatgtgaacgacaatactctgttcaagtggatgatcttcaatggcggagcccccaactgtatcccgtgcaaggagacttgcgaaaacgtcgactgcgggccaggaaaaaagtgccgcatgaacaaaaagaacaaaccgagatgcgtctgcgccccggactgctcgaacattacttggaagggaccggtctgcggactggacggaaagacctaccgcaacgagtgtgcactgctgaaggcaagatgtaaggaacaacctgagctggaagtccagtaccagggtcgctgcaaaaagacttgtcgggatgtgttctgtccaggctcaagcacttgcgtggtcgatcaaactaacaacgcgtactgcgtgacctgcaacagaatttgcccggaaccagcgagcagcgaacagtacttgtgcggcaatgacggtgtgacttacagcagcgcgtgtcaccttcggaaagcaacctgtctcctcggccgctcaatcggactggcctacgagggaaaatgcattaaagccaagtcttgcgaggacatccagtgcaccggtgggaagaagtgcttgtgggactttaaagttggacggggaaggtgttcgctgtgtgacgagctgtgccctgattcgaagtcagacgagccggtttgcgcctcggataacgccacttatgcgtctgagtgcgcgatgaaggaggcggcatgctcctcgggcgtgctcctcgaagtcaagcactcaggaagctgcaattcaatctccgaggacaccgaggaggaggaagaggatgaggatcaggactactccttccccatcagctcgatcctggagtgg

SEQ ID NO: 250049 - DNA, 1032 bp, synthetic construct
  misc_feature 1..1032: note = Description of Artificial Sequence: Synthetic coding sequence
  source 1..1032: mol_type = other DNA
atggtgcgggcccgccaccagccaggagggttgtgtttactgctgctgctcctgtgtcagttcatggaggataggtctgcacaggccggaaattgttggctgaggcaggccaagaacggacgttgccaggtcctgtacaagaccgaattatctaaggaagagtgctgtagtaccggacggctgtccaccagctggacagaagaggatgtcaatgataacaccctcttcaaatggatgatcttcaatggcggcgcccctaactgtattccctgcaaggagacctgtgagaatgtcgactgcgggccaggcaaaaaatgcagaatgaataagaaaaacaagccacggtgtgtctgcgcccccgactgctcgaacataacttggaaaggcccagtatgcggtctagatggcaagacttataggaacgagtgtgccctgctcaaggcaaggtgcaaggaacagcccgagcttgaggtgcagtaccaagggcgctgtaaaaagacctgccgtgacgttttttgccctggctccagcacatgtgtggtggatcagactaacaatgcctattgcgtgacgtgtaatagaatttgcccggagccagcctcatctgaacagtacctttgcggcaacgacggggtgacctactcatccgcttgccatctgaggaaggccacttgtctgctcggtcggtccatcgggcttgcctacgaaggcaaatgtataaaagctaagagctgtgaagatattcagtgcacgggcggcaagaagtgtctgtgggattttaaggtggggaggggacgttgttccctgtgtgacgagctgtgcccggactccaaaagtgacgagcccgtctgtgcctcagataacgccacttacgcgagcgagtgcgcaatgaaagaggcagcttgttccagtggagtgctcctggaggtgaagcattcaggcagctgcaacagtatcagtgaggataccgaagaggaagaagaagacgaggatcaggattactccttcccaatttcaagtattttggaatgg

SEQ ID NO: 250050 - DNA, 1032 bp, synthetic construct
  misc_feature 1..1032: note = Description of Artificial Sequence: Synthetic coding sequence
  source 1..1032: mol_type = other DNA
atggtgcgggcccgccaccagcctgggggtctttgccttctgctgctgctgctttgtcagttcatggaggacagatccgcacaggctggcaattgctggctgcggcaggctaagaacggacggtgccaagtcctgtacaaaaccgaactgagcaaggaggaatgctgcagcactggacgactgagcacctcctggactgaagaagatgtgaacgacaacactctgttcaaatggatgatcttcaatggcggtgcgccgaactgtatcccctgcaaagagacgtgcgagaacgtggactgcggaccagggaagaaatgcaggatgaacaagaagaacaagccgaggtgtgtgtgcgcgcctgattgcagcaatatcacctggaagggcccggtgtgcggactggacggaaaaacttaccgcaacgagtgcgctttgctcaaagcccgctgcaaggagcagccggaactcgaagtgcagtaccagggacgctgcaagaaaacttgtcgggacgtgttctgcccaggatcctccacctgtgtcgtcgatcagactaacaatgcatactgcgtgacctgtaaccggatctgcccggagccagcttcctctgaacaatacctgtgcggcaacgacggagttacctactcgagcgcgtgtcacctgcggaaggcgacttgcctgcttggtcgctccattggactcgcgtacgaaggcaaatgtatcaaggcgaagtcgtgcgaggacatccagtgtaccgggggcaaaaagtgtctctgggatttcaaggtcgggcgcgggcgctgctcgctctgcgacgaactgtgcccggacagcaagagcgacgagccggtttgtgcttccgataatgctacttacgcctcagaatgcgctatgaaagaggcggcttgttcatcgggcgtgctccttgaagtcaagcattcggggtcgtgtaactccatctccgaagatacggaagaagaagaggaggacgaggaccaggattactcgtttccaatctcgagcattctcgaatgg

SEQ ID NO: 250051 - DNA, 1032 bp, synthetic construct
  misc_feature 1..1032: note = Description of Artificial Sequence: Synthetic coding sequence
  source 1..1032: mol_type = other DNA
atggtacgagcgcgccatcagcccggtggcctgtgtctcctgctcctgttgctgtgccagtttatggaggataggagtgcgcaggccggaaattgttggctccggcaggcaaaaaatgggcgctgccaggttttgtataagaccgaactcagcaaggaggagtgttgctctaccggaaggctctctaccagttggactgaggaggacgtgaatgataatacactttttaagtggatgattttcaatgggggggctccaaattgtattccttgtaaagagacatgtgagaatgtcgactgcgggcctggcaaaaaatgtcgaatgaacaaaaagaataaaccaaggtgcgtctgcgccccagactgcagcaatattacatggaaaggtcccgtgtgcggtctcgatgggaagacatacaggaacgagtgcgctctgctgaaggcgaggtgcaaggagcagcccgagctcgaggttcaataccaggggagatgcaagaaaacttgccgcgatgtgttttgtcctggaagcagcacctgtgtggtcgatcagacgaacaatgcctactgtgtaacctgcaaccgcatatgccctgaaccagcgtcctccgagcagtacctttgcgggaacgatggcgtgacatattccagtgcttgtcatttgcgcaaggccacctgtttgttgggtcggtctatcgggttggcatacgagggcaagtgcattaaggccaaatcctgcgaagatatccagtgtaccgggggtaagaaatgcctctgggattttaaagtgggcagagggagatgctcactgtgcgacgaactctgccctgatagcaaatctgacgagcccgtttgcgcatcagataacgcaacttatgccagcgaatgtgctatgaaagaagctgcatgcagtagcggagttttgcttgaggttaaacatagtgggtcatgtaattctatttccgaagatacagaagaggaggaagaagacgaagaccaagactattcattccctatttcttccatactggagtgg

SEQ ID NO: 250052 - DNA, 1032 bp, synthetic construct
  misc_feature 1..1032: note = Description of Artificial Sequence: Synthetic coding sequence
  source 1..1032: mol_type = other DNA
atggtgagagctcggcatcaaccaggtggactctgtctcttgttgttgttgctgtgtcagttcatggaggatagatctgctcaggcgggcaactgctggctcaggcaggccaagaacggacgatgtcaggtcctgtacaagaccgagctgtctaaagaggaatgttgcagtaccgggaggctgtctacatcatggactgaggaagatgtgaacgacaacactctgtttaagtggatgatctttaacggaggcgcgcctaactgtattccctgtaaagagacatgcgaaaatgtcgactgcggtccgggcaagaagtgtaggatgaacaaaaagaacaaacccagatgcgtgtgtgccccggactgttcaaacatcacctggaaaggtcccgtctgtgggcttgatggaaaaacctatagaaacgagtgtgctttgcttaaagcaagatgtaaggagcagccggaattggaggttcagtatcagggaagatgtaaaaagacctgtcgggatgtattctgtccgggcagctccacttgcgtggtagaccaaacaaacaacgcttactgcgtcacatgcaataggatctgccccgagcctgcctcaagtgagcagtatctgtgtgggaacgacggagtaacctactccagcgcttgtcatctcagaaaagccacctgcctcctgggtcggtcaattggactggcttatgaggggaaatgtattaaagctaagagctgcgaagatatacagtgtactgggggaaaaaagtgcttgtgggattttaaggtgggcagagggcgatgctccctgtgtgacgagctctgcccagatagtaaatccgacgagccagtttgtgccagcgataatgccacttacgccagtgaatgtgccatgaaagaggccgcttgctcttcaggtgtcctgctggaagtgaagcattcaggctcttgtaattctataagtgaagacaccgaagaggaggaggaagacgaagatcaggattactctttccctattagctctatacttgagtgg

SEQ ID NO: 250053 - DNA, 1032 bp, synthetic construct
  misc_feature 1..1032: note = Description of Artificial Sequence: Synthetic coding sequence
  source 1..1032: mol_type = other DNA
atggttagagcccgccatcagcccggggggttgtgtctcctactacttcttctgtgccagttcatggaagatcggtctgcccaggcaggaaattgctggcttagacaggcaaaaaacggaaggtgtcaggtgctgtacaaaacagaactctctaaagaggaatgttgctctactggaagactttcgacatcctggacagaagaagacgtaaatgataacactttgtttaaatggatgatatttaatgggggagcaccaaactgtataccctgtaaagaaacttgtgagaatgtggattgtggacccggaaaaaaatgccgcatgaacaagaaaaataaaccaagatgtgtgtgtgcccccgattgtagtaacataacatggaaagggccagtgtgcggactcgatggaaaaacttatcggaacgaatgcgcactgctcaaggctcggtgtaaagaacagccagaacttgaagtccaatatcaagggagatgtaagaaaacttgtagagacgtcttttgtccaggatcatctacttgcgtggtagatcagacgaacaatgcttactgtgtcacatgcaaccggatctgtcctgaacccgcatcctcagaacagtatctgtgcgggaatgatggagttacttacagttcggcgtgtcatcttcgcaaagcaacttgtctccttgggaggagtataggactcgcctatgagggaaaatgcataaaagcaaaatcttgtgaggatatccagtgcactggaggaaaaaagtgcttatgggattttaaagtgggacgagggcgctgttccctctgtgatgaactttgccctgattcaaaatctgatgaacccgtgtgcgcctcagataacgccacttacgcctccgaatgcgcaatgaaagaagccgcctgttcatccggagtcctccttgaggtgaaacattctggatcttgtaacagtatctctgaagatacagaagaggaagaagaagatgaagaccaggattattctttccccattagttctatcttggaatgg

SEQ ID NO: 250054 - DNA, 1032 bp, synthetic construct
  misc_feature 1..1032: note = Description of Artificial Sequence: Synthetic coding sequence
  source 1..1032: mol_type = other DNA
atggttcgggctcgccaccaaccagggggactctgccttctgcttctcctcctctgccaattcatggaagaccgcagcgcccaagcggggaactgctggctgaggcaagccaagaatggaagatgtcaggttctgtacaaaaccgagctatctaaagaggagtgttgctcgacggggcgactgtcaacgtcctggacagaggaggatgtgaatgacaacacacttttcaagtggatgatttttaacggcggggcacctaattgtatcccttgtaaggaaacttgtgagaacgttgattgtggccccgggaaaaaatgtcgcatgaataagaaaaacaagccgcgatgcgtctgtgcaccggactgctccaatattacttggaaagggcccgtgtgtggactcgacgggaaaacatatagaaatgagtgcgccttactcaaggcccgatgcaaagagcagcctgagctcgaggttcaatatcagggcagatgcaagaagacgtgccgagatgtgttctgcccaggctcgtcaacatgcgtcgtggaccaaactaataatgcctattgtgtgacatgtaatcgaatatgccccgaacctgcctcatctgaacagtacctgtgtggaaatgacggcgtcacgtattcttctgcctgtcatcttagaaaggctacctgcctgcttggcagatccatcggcctggcctatgagggcaagtgcatcaaagcgaagtcctgcgaagatatccagtgcacaggcggtaagaagtgtctgtgggacttcaaggtgggacgtggccgctgcagtttatgtgatgaactgtgtcccgactcgaagtctgacgaacctgtttgcgccagtgacaatgctacctacgcatctgagtgcgccatgaaggaggctgcttgctcttcgggagtgctcctagaggtaaagcactcaggctcctgcaattctatatccgaggacacggaagaagaagaggaagacgaagatcaagactactccttccctatctccagcattttggaatgg

SEQ ID NO: 250055 - DNA, 1032 bp, synthetic construct
  misc_feature 1..1032: note = Description of Artificial Sequence: Synthetic coding sequence
  source 1..1032: mol_type = other DNA
atggtcagggccaggcaccaaccaggaggactctgcctcctcctgctgcttctgtgccagtttatggaagatcgttccgcacaggctggaaattgttggctgcgccaagccaaaaacggccggtgtcaagtcctttacaagaccgaactgtcaaaggaggagtgctgttccaccggtaggctttcgacttcgtggaccgaagaggatgtcaatgataacaccctgttcaaatggatgattttcaatggaggggcacctaattgtattccatgcaaggaaacttgcgagaatgtggattgcggacctggtaagaagtgtcgtatgaacaagaagaacaaaccaagatgcgtgtgtgccccagactgttccaacattacgtggaaaggtcctgtctgtggacttgatgggaaaacctaccgcaatgagtgcgccctgctcaaagcgcggtgcaaggaacagccagaactcgaagtccaataccaagggcggtgcaaaaagacgtgcagagatgtgttttgccccggttcttcaacttgcgtggtcgatcagacgaacaatgcttactgtgtcacttgtaacagaatttgtccagaacccgccagctcggaacaatacctttgcggaaacgacggtgtgacttacagctcagcatgtcatctgcggaaagcaacctgtcttttggggcgatcaatcgggctcgcatacgaaggaaagtgcattaaggcgaagtcgtgcgaagatattcaatgtaccggcggaaagaagtgcttgtgggatttcaaagtgggacgaggtagatgttcgctgtgtgatgaactttgcccggatagcaagtccgatgaaccagtgtgtgcatcggacaacgccacctacgcaagcgaatgcgctatgaaggaggcagcatgtagctcgggagtgcttctggaagtgaaacactcaggatcttgtaactcgatttcggaggatactgaagaagaggaggaagatgaagatcaggactacagctttcctatctcgagcatattggagtgg

SEQ ID NO: 250056 - DNA, 1032 bp, synthetic construct
  misc_feature 1..1032: note = Description of Artificial Sequence: Synthetic coding sequence
  source 1..1032: mol_type = other DNA
atggtgcgtgcccgacatcaacctggcggactgtgcttacttttgttgttactctgccagtttatggaagatcgctctgctcaagcaggtaactgttggctgagacaagcaaagaatggccgttgtcaagtgctgtataaaactgagctttcaaaagaagaatgctgtagcacaggccgcttgtctacctcgtggacagaggaagacgtcaatgataatactttatttaagtggatgatcttcaatggcggcgcgccgaactgtatcccatgtaaagaaacatgcgagaacgtagactgtggaccgggtaaaaagtgccgtatgaacaaaaaaaacaaaccacgttgtgtctgtgcacctgattgttccaatattacatggaagggtccggtatgcggattagacggtaaaacgtatagaaatgaatgcgctctcttgaaagcgcgctgtaaggaacagcctgagcttgaagttcagtatcagggtcggtgcaaaaaaacctgccgcgatgttttttgtccgggatcttccacatgcgtggtagatcaaactaacaatgcgtattgtgtgacatgcaaccggatttgtcctgagcctgcctcatcagaacagtatctgtgcgggaatgacggagtcacctatagctctgcatgccatttaaggaaagctacatgcctgctgggccggagcataggccttgcctatgaggggaagtgtataaaggccaagtcttgtgaagatatccaatgcacgggcggaaagaaatgtttatgggactttaaagtcggacgaggacggtgttctttatgcgatgaactgtgtccggatagcaaatcagatgaacctgtgtgtgcctcagacaacgcaacatatgcgtcagagtgtgccatgaaggaagctgcgtgctcatcgggggtgttattggaagtcaaacatagcgggtcgtgcaattccatctccgaggacacagaagaagaggaagaggatgaagaccaagactatagcttccctatttcaagtatcctcgaatgg

SEQ ID NO: 250057 - DNA, 1032 bp, synthetic construct
  misc_feature 1..1032: note = Description of Artificial Sequence: Synthetic coding sequence
  source 1..1032: mol_type = other DNA
atggtccgggctcgccaccaaccgggtgggctctgcctactgctcctcctactctgtcagtttatggaggaccggagcgcacaggccgggaactgttggctgagacaggcaaaaaatgggagatgtcaggtattgtacaagacagagctgtctaaggaggaatgttgcagcacagggaggttaagtacaagctggaccgaggaggacgtcaatgataacaccttgttcaaatggatgatcttcaacgggggagctcccaactgcatcccatgtaaggaaacttgcgagaatgtggattgtggacctgggaagaagtgccgcatgaataaaaagaataagcccaggtgcgtttgcgctcccgattgtagcaacataacctggaaaggacccgtgtgcggcctggatgggaagacgtatcgaaacgagtgtgcccttttaaaagccaggtgtaaggaacagccggagctggaggtgcagtaccaggggagatgcaagaaaacctgtagggacgtgttctgccctggttctagcacctgtgtggtggaccaaaccaataacgcctactgcgtgacctgtaacagaatttgtcccgaaccagcgtcaagcgagcagtacttatgcgggaatgacggtgtcacatattccagtgcctgccacctgcggaaagcgacttgtctgcttgggcggtcaataggcctggcttacgagggcaagtgtattaaggccaaatcatgtgaagatatccagtgcaccggagggaaaaagtgtctctgggacttcaaggtgggccgtgggagatgttcattgtgcgatgagttatgccctgatagcaagagcgatgaaccagtgtgtgcctctgataacgccacttatgcttccgagtgcgcaatgaaagaagctgcctgtagttcaggagttcttctggaggtgaaacacagcgggagctgcaatagtataagcgaagacacagaagaggaagaagaagacgaagaccaagattacagcttccccatcagttctattctggaatgg

SEQ ID NO: 250058 - DNA, 1032 bp, synthetic construct
  misc_feature 1..1032: note = Description of Artificial Sequence: Synthetic coding sequence
  source 1..1032: mol_type = other DNA
atggttcgtgcgcgacatcaaccgggtggtttatgtctattattattattattatgtcaatttatggaagatcgttcggcgcaagcgggtaattgttggttacgacaagcgaaaaatggtcgttgtcaagttttatataaaacggaattatcgaaagaagaatgttgttcgacgggtcgattatcgacgtcgtggacggaagaagatgttaatgataatacgttatttaaatggatgatatttaatggtggtgcgccgaattgtataccgtgtaaagaaacgtgtgaaaatgtagattgtggtccgggtaaaaaatgtcgaatgaataaaaaaaataaaccgcgatgtgtatgtgcgccggattgttcgaatataacgtggaaaggtccggtatgtggtttagatggtaaaacgtatcgtaatgaatgtgcgttactaaaagcgcgatgtaaagaacaaccggaactagaagttcaatatcaaggtcgttgtaaaaaaacgtgtcgagatgtattttgtccgggttcgtcgacgtgtgtagtagatcaaacgaataatgcgtattgtgttacgtgtaatcgaatatgtccggaaccggcgtcgtcggaacaatatttatgtggtaatgatggtgtaacgtattcgtcggcgtgtcatctacgtaaagcgacgtgtctactaggtcgatcgataggtttagcgtatgaaggtaaatgtataaaagcgaaatcgtgtgaagatatacaatgtacgggtggtaaaaaatgtctatgggattttaaagtaggtcgaggtcgttgttcgttatgtgatgaattatgtccggattcgaaatcggatgaaccggtttgtgcgtcggataatgcgacgtatgcgtcggaatgtgcgatgaaagaagcggcgtgttcgtcgggtgtattattagaagtaaaacattcgggttcgtgtaattcgatatcggaagatacggaagaagaagaagaagatgaagatcaagattattcgtttccgatatcgtcgatattagaatgg

SEQ ID NO: 250059 - DNA, 1032 bp, synthetic construct
  misc_feature 1..1032: note = Description of Artificial Sequence: Synthetic coding sequence
  source 1..1032: mol_type = other DNA
atggtcagagcccgccaccagccgggaggtctgtgtcttctcctgttgcttctgtgccaattcatggaagatagaagtgcccaagccggaaattgttggctgcgccaagccaagaatggaaggtgccaggtactttacaagacagagctgtccaaggaagagtgttgttccaccggcaggctgagcaccagctggactgaggaagatgtaaacgataacacactcttcaaatggatgatctttaatggaggcgcaccaaactgcatcccctgcaaggagacatgtgagaacgtggactgcggaccgggcaaaaagtgcaggatgaataagaagaacaagcctagatgtgtatgcgcccccgattgttctaacatcacctggaagggacctgtctgtggcttggatggtaagacgtatagaaacgagtgcgctctgcttaaagccagatgcaaagagcagccggaactcgaagttcagtaccaaggccgctgcaagaagacctgtagggacgtgttctgtccaggctcttctacctgtgtcgtcgaccagacgaataatgcctattgtgtgacgtgcaataggatttgccctgagcctgcttcatcagaacagtacctctgtggaaacgacggtgttacatatagctctgcttgtcatttgagaaaggcaacttgcctcttgggacgctccattggtctcgcttacgagggcaagtgcattaaggcaaagagctgtgaagatattcaatgcactggtggaaaaaaatgtctgtgggacttcaaagtcggcaggggtcgctgttcactgtgtgacgaactttgccctgattctaagtcagacgagcccgtttgcgcatcagataacgcgacctacgcatccgagtgcgcgatgaaagaggcagcctgctctagcggagtcctgctggaagtgaagcacagcggctcatgcaatagcatttctgaggacactgaagaagaggaggaagacgaggatcaggactattcttttcccatttccagcattctcgagtgg

SEQ ID NO: 250060 - DNA, 1032 bp, synthetic construct
  misc_feature 1..1032: note = Description of Artificial Sequence: Synthetic coding sequence
  source 1..1032: mol_type = other DNA
atggtaagggcaaggcaccagcccggaggactgtgtctcctgctgctgttgctgtgtcagttcatggaggacaggagtgcacaggcagggaactgttggcttagacaggcgaaaaacgggagatgccaagttctgtacaagactgaactgagtaaggaggagtgctgttccactggacgcctttcaacttcttggactgaggaggacgtgaacgacaacactctgttcaaatggatgatatttaatgggggcgcacccaactgtattccgtgtaaggaaacgtgtgagaatgtggattgtggtcccggaaagaaatgtaggatgaataaaaaaaataaacctcgctgtgtgtgcgccccagattgttccaatattacatggaagggacctgtgtgtgggctcgacggtaagacttatagaaacgagtgcgcccttctgaaggccaggtgcaaggaacagccagaactggaagtgcagtaccaggggaggtgcaagaagacatgcagagatgttttctgtcccggatccagcacttgcgtggtggaccaaacaaacaacgcctactgtgtgacctgcaatcgcatatgcccagaacccgccagcagcgagcagtacctctgcggcaacgacggggtcacctattctagcgcctgtcatcttaggaaggccacgtgtcttctgggccggtcaatcggtctggcatatgagggaaagtgtattaaagccaaatcctgcgaagatatccagtgtactggcgggaagaaatgcctgtgggatttcaaagtgggcagaggacggtgcagcctgtgtgatgaactgtgtccagatagtaagtctgacgagcccgtgtgtgccagcgataacgccacatacgcctctgagtgcgccatgaaagaagccgcttgctcttcaggcgtcttgctggaggttaagcacagtggaagctgcaactctatctctgaggataccgaagaggaggaggaggacgaagaccaagactacagctttccgatctccagtattttggagtgg

SEQ ID NO: 250061 - DNA, 1032 bp, synthetic construct
  misc_feature 1..1032: note = Description of Artificial Sequence: Synthetic coding sequence
  source 1..1032: mol_type = other DNA
atggtgagagctcgccatcagccaggcggactttgccttcttcttctcctgctttgccagtttatggaggatcgctccgcacaggccggaaactgttggctgcgacaagccaagaacgggaggtgtcaggtgctttacaaaaccgaactttccaaagaagagtgctgctcaaccggaaggctgtcaacttcgtggaccgaagaggacgtgaatgataacacgctgttcaagtggatgattttcaacgggggtgcaccaaactgcatcccttgtaaagaaacttgtgaaaacgtggattgtggaccaggcaaaaagtgtaggatgaacaaaaagaataaaccgcgctgtgtgtgtgctcccgattgctccaacattacttggaaaggccctgtttgtggacttgacggcaagacctacagaaacgaatgtgcccttctgaaggcgcgttgcaaggaacaaccagaacttgaagttcaataccaaggtcgttgtaagaaaacttgtcgagacgtcttttgtcctgggtcgtccacctgtgtggtggatcaaaccaataacgcttactgcgtcacctgtaaccgcatatgccctgagcctgcatccagcgaacagtacctgtgcggtaatgatggtgtgacctattcgtctgcatgccacctgagaaaggctacgtgcctgctgggacgatctattggccttgcgtacgaagggaagtgtattaaggcaaaatcatgtgaggacattcagtgtactggagggaagaagtgtttgtgggatttcaaggtcggtagaggacgttgttctttgtgcgatgaactttgccccgacagcaagtctgatgaaccggtgtgcgcctcagataatgcgacctacgctagcgagtgcgcaatgaaggaagcagcttgttcgtcaggagtccttctggaagtcaaacattcgggaagctgcaactccatttcggaggacacggaagaagaggaggaggatgaagatcaggattattcgttccccatctcctcgatcttggaatgg

SEQ ID NO: 250062 - DNA, 1032 bp, synthetic construct
  misc_feature 1..1032: note = Description of Artificial Sequence: Synthetic coding sequence
  source 1..1032: mol_type = other DNA
atggtgagagctcggcaccagccaggcggcctgtgcctcctcctgctgctgctgtgccagttcatggaagaccgaagcgcccaggcagggaactgttggctgcgccaagctaaaaatggcagatgtcaggtattatacaagacagaactgtcgaaagaggaatgttgctctactgggagactcagtacatcttggacagaggaagatgtgaatgacaatactctgttcaaatggatgatctttaatggtggtgccccaaattgcatcccctgcaaggagacttgtgaaaatgttgactgcgggcccggcaaaaaatgccgtatgaacaagaagaataaaccccgatgcgtgtgtgccccagactgtagcaacataacttggaaaggtccagtgtgcggactggatggaaagacgtatcgaaatgagtgcgccctgctgaaggccaggtgtaaggagcaaccggaactggaagttcagtaccaggggcgctgcaagaagacttgtcgcgacgtcttttgtcccgggtcctctacctgtgtggtggatcagacaaacaacgcctattgtgtcacatgtaatagaatctgccctgaacctgcctcaagtgaacagtacctttgtggcaatgatggtgtaacctattccagtgcttgccatctcaggaaagcgacctgcctgctcgggagatctattggtctggcctatgaaggaaagtgcatcaaggccaagagctgcgaagatatccagtgcactggcggcaagaaatgtctgtgggattttaaagtcggccgcggtcggtgcagcctgtgcgacgagctttgtcctgatagcaaaagtgacgagccggtgtgtgcctccgacaatgcaacttacgcgagtgagtgcgccatgaaagaggcggcctgctcttcaggggtgttgctcgaagtgaagcactcaggatcctgcaattccatctcagaagacaccgaggaggaggaggaagatgaagaccaggactatagcttccccatctcatcaatacttgagtgg

SEQ ID NO: 250063 - DNA, 1032 bp, synthetic construct
  misc_feature 1..1032: note = Description of Artificial Sequence: Synthetic coding sequence
  source 1..1032: mol_type = other DNA
atggtaagggcaaggcaccagccgggaggcttgtgcctgctcttgctgttactgtgccaatttatggaggatcgatccgcccaagcagggaactgttggctgcgacaggccaaaaatggacgctgtcaggtgttgtataaaaccgaactgtcgaaggaggagtgctgttcaaccgggagattatctacaagctggaccgaggaggatgtaaacgacaacacactgttcaagtggatgatattcaatggaggtgcccctaactgtatcccatgcaaagaaacctgtgagaacgtcgactgcggaccaggcaaaaaatgtcgaatgaataaaaagaataagccccgatgcgtgtgcgcgcccgattgtagtaacattacgtggaaagggcccgtgtgcggtctggatggaaagacttaccggaacgaatgtgcgctactgaaggccaggtgtaaggaacagcctgagctggaggtccagtaccagggtagatgcaaaaagacctgcagggacgtgttctgccctgggagtagtacctgcgtcgtcgaccaaacaaacaacgcttactgtgtgacctgcaaccgaatctgtcctgagcctgctagctctgaacaatacttgtgtgggaatgacggcgtgacttatagttcagcttgtcatctccggaaagccacctgcctgctgggccggagcatcgggctcgcttacgagggcaaatgcatcaaggccaaaagctgcgaggacattcaatgtactggcggtaaaaaatgcttgtgggacttcaaggttggtcggggacgctgctccctgtgcgatgaattgtgccccgactccaagagcgacgagccagtttgtgcctcagacaatgccacatacgcctccgaatgcgccatgaaagaagctgcatgctcaagcggcgtgctgctggaggttaaacatagcgggtcctgcaatagcatctccgaggatacagaagaggaggaagaggacgaagaccaagattattcgtttcccatatcaagtattctggagtgg

SEQ ID NO: 250064 - DNA, 1032 bp, synthetic construct
  misc_feature 1..1032: note = Description of Artificial Sequence: Synthetic coding sequence
  source 1..1032: mol_type = other DNA
atggtgagagcacgtcatcaaccgggtggcctctgtctgcttctgctgcttctctgtcagtttatggaggatcggagcgcacaagccggtaactgttggttgagacaggcaaagaacgggcgctgccaagtcctttacaagactgagctctccaaggaagaatgttgttcgaccgggcgcctgtccacttcctggactgaggaagatgtgaatgataataccttgtttaagtggatgattttcaacggcggagcacccaattgcattccatgcaaagaaacctgtgaaaacgtggattgtggccccggcaaaaagtgcagaatgaacaagaagaacaaaccacgatgtgtctgtgcccccgactgctcgaatatcacttggaaggggcctgtgtgtggactggacggtaaaacctacaggaacgagtgtgcacttttgaaggcccgttgtaaggagcaaccggaacttgaagtgcaataccagggaaggtgtaagaaaacctgtagagacgtgttctgtcccggatcgtccacctgcgtggtggaccagacgaataacgcatactgcgtgacttgtaatagaatttgccctgaacctgccagctcggaacaatacttgtgcggcaatgatggtgtcacctactcatcggcatgtcatcttagaaaggcaacttgccttctcggccgatcaatcggtctggcatacgaaggaaagtgtatcaaggcaaagtcctgtgaagatattcagtgtaccggtggtaagaagtgtctttgggatttcaaggtgggacgtggtcgatgtagcctttgcgacgaactgtgtccagattcaaaatcggatgaacctgtctgtgcaagcgacaacgccacctacgcctcagaatgtgcaatgaaggaagccgcgtgttcatcaggagtgctgcttgaggtgaagcattcgggctcgtgtaactcgatatccgaggataccgaagaggaagaggaggacgaagatcaggactactccttcccaatctccagcattcttgaatgg

SEQ ID NO: 250065 - DNA, 1032 bp, synthetic construct
  misc_feature 1..1032: note = Description of Artificial Sequence: Synthetic coding sequence
  source 1..1032: mol_type = other DNA
atggtgagagcccgccatcagcccgggggactttgtcttctccttctattactatgccagtttatggaagatagatccgcacaagccgggaattgttggctgcggcaggctaagaacgggcgctgtcaggttttatataaaacggaactgtccaaggaggaatgctgcagtactggaaggctttctacaagttggactgaagaagacgttaatgataatacattattcaaatggatgatctttaatgggggagcccctaattgtatcccttgtaaagaaacttgtgaaaacgtggactgtgggccggggaaaaaatgtcgaatgaacaagaaaaataaaccccgatgtgtgtgtgctcccgattgttcaaatatcacttggaagggaccagtatgtggactcgatggaaagacatatagaaatgaatgcgctctgttaaaagcccggtgcaaagagcagcctgaattagaagttcagtatcagggaaggtgtaaaaaaacatgccgggatgtcttctgtcccgggtcctccacttgcgtagtcgatcagactaataatgcctactgcgtgacatgtaaccggatctgtcccgaacctgctagttctgaacagtatttgtgcgggaacgatggggtaacatactcatccgcatgccatctacgtaaagctacatgcctgctgggaaggtctatcgggctagcgtatgaaggaaagtgcatcaaagcaaaatcatgtgaagatattcagtgtacaggggggaaaaaatgtctctgggatttcaaagtaggaagagggcgctgctcactctgcgatgaactgtgccctgatagtaagtccgatgaacctgtgtgcgcttctgacaacgctacatacgccagtgaatgtgccatgaaggaagctgcatgttcctctggggtgttattggaagtcaaacattctggatcatgtaacagtatttctgaagatactgaagaagaagaagaggatgaggatcaggattattcgtttcctatttcttcaatactggaatgg

SEQ ID NO: 250066 - DNA, 1032 bp, synthetic construct
  misc_feature 1..1032: note = Description of Artificial Sequence: Synthetic coding sequence
  source 1..1032: mol_type = other DNA
atggtacgagctcgccaccagcctgggggcctgtgcctgctgttgctgctgctgtgtcagttcatggaagatcgatctgcacaggcaggtaactgttggctgagacaagccaagaatggtcggtgccaggttctgtacaagactgagttgtcaaaagaggaatgttgtagcaccgggaggctcagcacaagctggactgaagaggatgtgaatgacaacacgctctttaaatggatgattttcaacggcggcgcaccaaactgcattccctgtaaagagacctgcgagaatgttgactgcggcccaggaaagaaatgtaggatgaataagaaaaacaagcctcgttgcgtatgcgcacccgactgcagtaatatcacttggaaggggcccgtgtgcggactggatggcaaaacataccgcaacgagtgtgctttactgaaagcaaggtgtaaggagcagcctgagctggaggttcagtaccaggggcgctgtaagaagacttgtcgggacgtgttctgccctgggtcgtcaacttgtgtggttgaccaaacaaataatgcctattgcgtcacctgtaacaggatctgccccgaacccgcctcctctgagcagtacctctgtggcaatgatggagttacttattcgtccgcctgccacttgaggaaggcaacctgccttctgggtagatcaatcggcctcgcttatgaggggaaatgtatcaaagctaaatcatgtgaagatatccagtgtactggcggaaagaaatgcctgtgggatttcaaggtaggccgtggcagatgttcactgtgtgatgaactctgtcctgatagcaagagtgacgagcctgtttgtgcatcagacaatgcgacatacgccagcgagtgtgccatgaaggaagcagcttgcagcagtggcgtactgcttgaggtgaaacacagcggaagctgcaactctatctctgaggataccgaggaggaagaagaagacgaagaccaggattactctttccctatttcctcaatacttgagtgg

SEQ ID NO: 250067 - DNA, 1032 bp, synthetic construct
  misc_feature 1..1032: note = Description of Artificial Sequence: Synthetic coding sequence
  source 1..1032: mol_type = other DNA
atggtacgcgctcgccatcagccgggcggcttgtgtctcctgctgcttcttctgtgtcagttcatggaagaccgatccgcccaagctggtaactgttggctgcgtcaggctaaaaatgggaggtgccaagtgctttataagactgaactgtcaaaagaggaatgctgcagcaccggccgccttagtaccagctggactgaagaagatgtaaacgacaacacgcttttcaaatggatgattttcaatggaggagcccccaactgtataccctgcaaggagacatgcgaaaatgtggactgtggccctgggaaaaaatgtagaatgaataaaaagaataagccccgatgtgtgtgcgcccctgattgttcgaacatcacgtggaagggcccagtgtgcggcctggacgggaagacgtataggaatgaatgtgctttgctgaaagctaggtgcaaggagcaacccgagttagaggtgcagtaccaaggtagatgtaaaaagacttgtcgcgatgtgttttgtcccggctcttcaacttgcgtggtcgaccaaacgaataatgcatactgtgtgacgtgcaatcgcatctgcccggagcccgcaagcagtgagcagtacttgtgcgggaacgatggggttacctatagctccgcctgccaccttcggaaggccacgtgcctgctcggacgcagtattgggctcgcctatgaaggtaagtgtattaaagcaaagagttgcgaggatattcagtgtaccgggggcaagaagtgtctctgggattttaaagtcgggagggggaggtgtagcctttgtgacgaactgtgtccagatagcaaatccgatgaaccagtctgtgccagcgacaacgcgacatatgcgagtgaatgtgccatgaaggaggccgcctgttcttcgggggtgttgctggaggtgaagcactctggcagctgtaacagtatctctgaagacacagaagaggaggaagaagacgaagaccaggattactctttccctattagtagcatcttagaatgg

SEQ ID NO: 250068 - DNA, 1032 bp, synthetic construct
  misc_feature 1..1032: note = Description of Artificial Sequence: Synthetic coding sequence
  source 1..1032: mol_type = other DNA
atggttcgggcgaggcatcaacctggtgggttgtgcttgctgctcttgctcctctgccaattcatggaagatcgttcagcgcaagctggcaactgctggctaaggcaagccaagaatggcaggtgccaagtgttgtataagaccgagttgagcaaagaggaatgttgctccacgggaaggctttcaacgtcctggactgaagaagacgtcaatgataacactctattcaagtggatgattttcaacgggggtgcacctaactgtattccgtgtaaagaaacatgcgagaatgtggactgtggaccaggtaagaaatgcagaatgaacaagaaaaacaagcccagatgcgtgtgcgctccggattgtagtaatatcacttggaaggggcctgtgtgcggtcttgacggtaaaacatacagaaacgagtgtgctctgctcaaggctagatgcaaggaacaacctgaacttgaggttcagtatcaaggacgatgcaagaagacatgcagagatgtgttttgtccaggaagttctacatgtgttgtggaccaaactaacaacgcatattgtgttacctgcaaccgtatttgccccgagccagctagcagcgagcagtatctttgcgggaacgatggagttacttattcgtccgcttgccatcttaggaaagccacctgcctcctcggacgttccattggacttgcttatgaagggaagtgtattaaggcaaaaagttgtgaagatatacagtgcaccggtggaaaaaaatgcctttgggattttaaagttggtaggggaaggtgtagtctttgcgacgaactttgcccagatagtaagagtgacgagcctgtgtgcgccagtgataacgcaacgtacgcttcagagtgtgctatgaaggaggccgcttgctcgtcgggagtgttgctagaagtcaagcatagtgggtcttgcaatagcatcagtgaagatactgaggaagaagaagaggatgaagaccaagattactcttttcctataagttcgatcttagagtgg

SEQ ID NO: 250069 - DNA, 1032 bp, synthetic construct
  misc_feature 1..1032: note = Description of Artificial Sequence: Synthetic coding sequence
  source 1..1032: mol_type = other DNA
atggtcagagctcgacaccagcctggaggcttgtgcctcctgttattgctgttatgccagtttatggaggataggagtgcccaagcggggaactgctggctccgccaggccaagaacggtagatgtcaggtgctatacaagactgaactgagcaaagaagagtgctgctccacaggccgcttgtcaacgtcatggaccgaagaagatgtaaacgacaacactctctttaagtggatgatattcaatggtggcgcgccaaattgtataccttgcaaggagacgtgcgagaacgtggactgcggccctggcaagaagtgccgtatgaacaagaagaataagccgcgatgtgtctgcgctcctgattgcagtaacatcacgtggaagggcccggtatgcggactggacggaaagacctatcgaaatgaatgtgccctgctgaaggcccgctgcaaggagcagccggagctcgaagttcagtaccagggccgctgtaagaaaacttgccgcgatgtgttttgcccaggtagcagtacctgcgtggtggaccagacaaacaatgcctattgtgtcacgtgcaacaggatttgccccgaaccggccagctcagagcaatacctgtgcggcaacgacggtgttacttacagttctgcctgccatctgagaaaagcgacatgcttgctgggcagatcgatcggattagcgtatgagggcaaatgtattaaggctaagtcctgcgaggatattcagtgcactggcggaaaaaagtgcctttgggattttaaggtgggccgtggccgctgcagcctgtgcgacgagttgtgccccgacagcaaatcggatgagccagtgtgcgcctccgacaatgccacctacgcgtctgagtgcgcgatgaaggaagcagcctgcagcagcggcgtgctgttggaagtcaaacactccggctcctgtaatagcatctcggaagataccgaagaagaagaggaggacgaggaccaagattacagtttcccgatctcctccatcctggaatgg

SEQ ID NO: 250070 - DNA, 1032 bp, synthetic construct
  misc_feature 1..1032: note = Description of Artificial Sequence: Synthetic coding sequence
  source 1..1032: mol_type = other DNA
atggtgagggcccgccaccagccagggggcctctgcctactgttgctgctgttatgccaatttatggaagaccggtccgcccaggcgggtaactgctggctccgccaagcaaaaaatgggcggtgccaagtcctgtataagacagaattatctaaggaggagtgttgctctaccgggcggttgagtacgtcttggacagaagaagacgtgaacgacaacacactttttaaatggatgatctttaatgggggtgctcccaactgcatcccttgtaaagagacatgcgagaatgtggattgcggccccgggaagaagtgtaggatgaacaaaaagaataagcccaggtgcgtgtgtgccccagactgttccaacatcacttggaaaggtcctgtgtgcggtctagacggaaaaacctataggaacgagtgtgctctgttgaaagcccgctgcaaggagcagccagaactggaagtccaatatcaagggcgatgcaaaaagacatgtcgggatgttttctgccccggttcctcaacctgtgtggtggatcagaccaacaacgcctactgcgttacatgtaatcgaatctgccccgagcccgcaagctccgagcagtatctatgcggcaatgacggcgtgacatacagtagcgcatgccaccttagaaaagcaacctgcctcctcggacgatcgatcggcctcgcttatgaaggaaagtgtatcaaggctaagtcttgcgaggatattcagtgcactggagggaagaagtgtttatgggattttaaggtcgggagggggcgctgttccctctgcgacgaattatgtccagactctaagtctgacgaacccgtttgcgcgtcggacaatgcaacgtacgcctcagaatgtgctatgaaggaagcagcttgctcatccggcgtattactggaggttaagcacagtggatcgtgcaattctatctccgaggacactgaagaggaggaggaggacgaagatcaggactattcgtttcccatctcaagtatcctggaatgg

SEQ ID NO: 250071 - DNA, 1032 bp, synthetic construct
  misc_feature 1..1032: note = Description of Artificial Sequence: Synthetic coding sequence
  source 1..1032: mol_type = other DNA
atggtccgcgccagacaccaacccggcgggctttgtctactgctgctgctcctgtgccagttcatggaggacagatctgcgcaggcaggaaactgttggttacgacaggctaagaacggtaggtgtcaggtcctttataagaccgagctcagcaaggaggagtgctgctcaaccggaaggttgtcaacgagctggactgaggaggacgtgaatgacaacaccctctttaaatggatgatcttcaatggtggggcgcctaattgtattccttgtaaggaaacatgtgagaacgtcgactgtggaccaggcaagaaatgcaggatgaataagaagaacaagccccgctgtgtgtgtgcccccgactgttcgaatatcacttggaaaggccccgtttgtggattggacggcaagacctaccgaaacgaatgcgctttgctaaaggccagatgtaaagagcagccagaactggaggtgcagtaccagggtcggtgcaaaaagacctgccgcgatgtcttttgcccagggagtagcacttgcgtcgtggatcaaacaaataacgcctactgcgtgacttgcaatcggatttgccctgagccagcctccagtgaacagtatctctgtggaaatgacggagtaacctactccagcgcctgccatctgaggaaagccacttgtctgttgggcagatcaattggcctggcgtacgaagggaagtgcatcaaagcaaagtcctgtgaggacattcagtgcaccggagggaaaaagtgcttgtgggacttcaaggtcggaagaggacgatgctctctttgcgatgagttgtgtcccgattccaagagcgacgagccagtgtgcgccagtgataatgctacctatgcttccgaatgcgccatgaaggaggccgcctgctcctcaggggtattactcgaggttaagcactcaggctcttgcaatagcatctccgaagataccgaagaagaggaggaagatgaagaccaggattatagttttcccatatcgtccatcctggagtgg

SEQ ID NO: 250072 - DNA, 1032 bp, synthetic construct
  misc_feature 1..1032: note = Description of Artificial Sequence: Synthetic coding sequence
  source 1..1032: mol_type = other DNA
atggtaagggccaggcatcagcctggcgggctgtgcctccttctcctcctcctgtgccagtttatggaggaccggtcggcacaggcaggaaactgctggctgagacaggccaagaacggccgctgtcaagtgctgtacaagaccgaactgtcaaaggaagaatgctgttccactggtcggctgtctacctcgtggactgaagaagatgtgaatgacaataccttgttcaagtggatgatctttaacgggggagcaccaaattgcatcccgtgcaaggaaacgtgtgagaatgtcgactgcggcccgggcaaaaagtgccggatgaacaaaaagaacaaaccgcgctgcgtttgcgccccggattgttctaacatcacctggaaagggccagtctgtggattggacggcaagacctaccgcaacgagtgcgccttgcttaaggcgcgctgtaaggaacagcctgagcttgaagtccaataccaggggcgatgcaaaaagacctgtagagacgtgttctgccccggatcctcgacgtgtgtggtggatcaaaccaacaatgcctactgcgtcacttgtaaccggatttgtccagagcccgcgagcagcgagcaatatctgtgcggaaatgacggagtgacttactcgtcggcctgccacctcagaaaagcaacctgcctgctgggacggtcgattggactcgcatacgaaggcaagtgtattaaggcgaaatcctgcgaggatattcagtgtacggggggaaagaaatgcttgtgggatttcaaagtcggacggggccggtgctccctgtgtgacgaactgtgccctgactcaaagtccgacgagccggtgtgcgcaagcgacaacgctacctacgctagtgaatgtgcaatgaaggaagcggcctgcagctcgggagtgctgctggaggtaaagcactccggatcgtgcaattccatatcagaggacactgaagaggaggaggaagatgaggatcaggactactctttcccgatctcgtctatcctcgagtgg

SEQ ID NO: 250073 - DNA, 1032 bp, synthetic construct
  misc_feature 1..1032: note = Description of Artificial Sequence: Synthetic coding sequence
  source 1..1032: mol_type = other DNA
atggttcgcgcccggcaccaaccgggcggcctctgtttgctccttctgcttctctgtcaattcatggaggatcggagcgcgcaagcaggaaactgttggttgcggcaggccaaaaacggacggtgccaggtcctgtacaagaccgagctcagtaaagaagagtgctgtagcactggacgcttgtccacgtcgtggaccgaggaggatgtgaatgataacaccctgtttaagtggatgatcttcaatgggggcgcaccaaattgtatcccgtgcaaggagacttgtgaaaacgtggactgtggcccgggaaagaaatgccgcatgaataagaagaacaagccgcgctgcgtgtgcgcgccggactgctccaacataacctggaagggtccggtgtgcgggttggatggcaaaacctaccgcaatgagtgcgctctgctcaaagcaagatgtaaagagcagccggagcttgaagtccaataccaaggacgctgcaaaaagacgtgtcgagatgtgttctgccccggctcgtccacttgcgtggtggaccagaccaacaacgcctattgcgtgacttgtaaccggatctgcccggagccagcctccagcgagcagtacctgtgcggaaacgacggagtgacttactcctcagcatgccacctccgcaaggcgacctgccttctgggacgctccatcggactggcttacgaaggaaaatgcattaaggcaaagtcctgcgaggatattcagtgcactggaggaaaaaagtgtctctgggatttcaaagtgggccggggtagatgctcgctgtgtgatgagctctgcccagattccaagagcgacgaaccagtgtgtgcttcggataatgccacctacgcctcggagtgcgcgatgaaggaggccgcttgctcgtccggcgtcctcttggaggtgaagcactcaggttcgtgcaattcaatctcggaggacactgaagaagaagaagaggacgaggaccaggattactctttcccaatctcgtcgatcctcgaatgg

SEQ ID NO: 250074 - DNA, 1032 bp, synthetic construct
  misc_feature 1..1032: note = Description of Artificial Sequence: Synthetic coding sequence
  source 1..1032: mol_type = other DNA
atggtccgcgcacggcaccagccaggtggcttgtgccttcttctactgcttctttgtcagttcatggaagatagaagtgctcaagccggtaactgttggctgcgccaggcaaagaatggtaggtgccaggtgctctataagaccgaactgtccaaggaggagtgttgctccacaggacgcctctccacgtcttggactgaggaagatgttaatgacaataccctattcaagtggatgatattcaatggaggggcgcctaactgtattccatgtaaggaaacgtgcgagaatgtggactgcgggccgggtaagaaatgccggatgaataagaagaacaaacctcggtgtgtgtgtgcaccagactgctcgaacattacttggaagggcccagtctgcggtctcgatgggaagacgtatcgaaacgaatgtgcattgctgaaggcccgatgtaaggaacaacctgaactggaggtgcaataccagggtcgttgcaagaaaacgtgcagggacgtcttctgtccaggcagttctacctgtgtcgtagaccaaacaaacaatgcgtactgcgtgacctgtaaccgcatttgtcctgagcctgcctcgtctgagcaatacttatgcggaaacgatggggtaacgtacagctccgcctgccacctgcgcaaagcaacctgcctcctagggaggtcaatcggtcttgcgtatgaaggcaagtgcattaaagctaagagctgcgaggatatccagtgcacaggtggaaagaagtgcctctgggacttcaaggttggtaggggtcgatgctctttgtgtgatgaactttgccctgattccaagtcagatgagcccgtttgtgctagcgacaacgcaacttacgcgtccgaatgtgctatgaaggaggccgcttgttccagcggggtcctcttggaggttaagcattccggatcgtgtaattcgatttctgaggacaccgaggaggaggaggaggacgaagatcaagattacagcttcccaatatcgagcatcctcgagtgg

SEQ ID NO: 250075 - DNA, 1032 bp, synthetic construct
  misc_feature 1..1032: note = Description of Artificial Sequence: Synthetic coding sequence
  source 1..1032: mol_type = other DNA
atggtccgcgctagacatcagccaggcgggctgtgcctgctgttgctactgctttgtcagttcatggaagataggtcagcccaagctgggaattgctggctccgccaggctaagaacggtcgctgtcaggtgctctacaagactgagttgtccaaggaggaatgctgctctaccggccgcctgtcgacatcctggacggaggaagatgttaatgataacaccctgtttaaatggatgattttcaacggaggcgcacccaattgcatcccctgtaaagagacgtgtgagaatgtggactgcggcccaggcaagaagtgtcgaatgaacaaaaagaacaaacctcgctgcgtttgtgccccggattgttctaacatcacatggaaggggccagtgtgtggtttggatggaaagacctatcgcaacgagtgcgccctgctcaaggcacgctgcaaggagcagccagagctagaggttcaatatcaaggaagatgcaagaagacctgtcgtgacgtcttctgccctggctcctcgacgtgcgtagtggaccagaccaataacgcctattgtgtcacatgtaatcgtatatgccccgagccggcctccagcgagcagtacctgtgtggaaatgatggtgtcacctacagttcagcctgtcacctgaggaaggctacgtgcctgcttggtcgcagcatcggactggcgtatgagggcaaatgtatcaaagcaaaaagctgcgaagacatccaatgcaccggcggaaagaagtgcctatgggattttaaagtaggcaggggacgttgctcgctgtgcgacgagctgtgccctgattctaaaagcgatgagccagtttgcgcctcagacaacgccacctatgcctcagaatgcgccatgaaggaggctgcttgcagctccggagtcttgctggaggtaaaacactccggctcttgcaactccatttccgaggacacagaagaggaggaagaggatgaagatcaagactacagcttcccaatttccagcatcctggagtgg

SEQ ID NO: 250076 - DNA, 1032 bp, synthetic construct
  misc_feature 1..1032: note = Description of Artificial Sequence: Synthetic coding sequence
  source 1..1032: mol_type = other DNA
atggtgagggcgcgacatcagcccggggggctttgtctgttgcttttgcttttgtgtcagtttatggaagatagaagcgcgcaggccggaaattgctggctgcggcaggccaaaaacgggaggtgccaggtgctatacaagactgaactgagtaaggaggagtgttgttccacaggaagactgagcacttcctggactgaagaagatgtcaatgacaataccctcttcaagtggatgatatttaacggtggggcacccaactgtataccttgtaaggaaacgtgcgagaacgtcgattgcggacccggcaaaaaatgccggatgaataaaaaaaacaagcccagatgcgtctgtgccccagattgcagtaacataacatggaaaggacctgtatgtggactggatgggaagacctatagaaacgagtgtgctctactcaaggcccgctgcaaggaacagccggagttggaggtgcagtaccagggacgatgtaagaagacctgccgcgacgtgttctgtcctggctcgtctacctgcgtggtggatcaaacgaataacgcatactgtgtcacctgtaatcgtatttgccccgaaccagctagctccgaacagtacctctgcgggaatgacggagtgacttattcttccgcttgccatctcagaaaggccacatgccttctgggccgctcgatcggcctggcttatgagggaaaatgcatcaaggcaaagtcctgcgaggacatccagtgcacaggaggcaaaaaatgtctgtgggacttcaaggtgggacgtggtcggtgtagtctttgtgacgagttgtgcccagactcaaagtctgatgagcccgtttgcgcgtccgacaatgctacatacgcgtcagagtgcgctatgaaggaggctgcgtgttcctcaggtgtccttctggaggtcaaacactcgggctcctgtaacagtatttccgaggatacagaggaggaggaagaagatgaagaccaagactatagtttccctatcagcagcatcctggagtgg

SEQ ID NO: 250077 - DNA, 1032 bp, synthetic construct
  misc_feature 1..1032: note = Description of Artificial Sequence: Synthetic coding sequence
  source 1..1032: mol_type = other DNA
atggtaagagcgagacaccaacccgggggactgtgccttttgctcttactcctctgtcaatttatggaagatagatcggcgcaagcaggaaactgttggcttagacaagcaaaaaacggccgttgccaagtcctgtacaaaacggagttgtcaaaagaagagtgctgttcgacaggaagactctctactagttggacggaggaagatgtaaacgataacacactttttaaatggatgattttcaatggaggcgctcctaactgtattccatgcaaggagacgtgcgaaaacgttgactgcggcccaggtaagaagtgtaggatgaataaaaaaaacaaacctcgctgtgtctgtgcaccagattgcagcaatattacttggaagggccccgtctgcggactcgatggtaagacttatagaaatgaatgcgctcttcttaaagctagatgcaaagaacaaccagagctggaagtgcaatatcaaggtagatgcaaaaaaacctgcagggatgtgttttgccctgggtccagcacctgtgttgttgatcaaacaaacaacgcttattgcgtcacgtgtaatcggatctgccctgagcccgcatcgtctgagcaatacctatgcggtaatgatggagtgacgtactcttccgcttgtcacttaagaaaggctacatgcctgttggggcgttccatcgggttggcctatgaaggaaagtgcattaaagccaaaagctgtgaggatattcagtgtacgggtgggaaaaaatgtctgtgggactttaaggtaggtagggggcgttgttctctttgcgatgagctttgcccggattccaagagcgacgagcctgtatgcgcatcggataatgccacctacgcttccgagtgtgcgatgaaagaagccgcctgttcctcaggggtattattggaggttaaacattctggctcctgcaacagcatatctgaggatactgaagaagaagaagaggatgaagatcaagattactcttttccaatttcaagcatattggaatgg

SEQ ID NO: 250078 - DNA, 1032 bp, synthetic construct
  misc_feature 1..1032: note = Description of Artificial Sequence: Synthetic coding sequence
  source 1..1032: mol_type = other DNA
atggtgcgggcgcggcatcagcctggtggactctgtctgctcctccttctcctgtgtcagttcatggaggatcgatctgctcaagcggggaattgctggcttagacaggccaaaaatggccgctgccaggtgctgtataagacggaattgagcaaagaagaatgttgctcaactggacggctgagcacatcttggacggaggaagatgtgaatgataataccctctttaagtggatgatctttaacggaggcgccccgaactgcataccttgcaaagaaacttgtgaaaacgtggattgtggacccggaaaaaaatgtcgtatgaacaagaaaaacaagcccaggtgtgtgtgtgcgcccgactgcagcaacattacttggaagggccccgtgtgtggcctggatggtaagacgtaccgcaacgagtgtgcgttattgaaagcgcgctgtaaagaacagccagagttagaagtccagtaccaggggcggtgtaagaagacatgtagagatgtattctgcccaggtagctctacatgcgtggtcgatcaaactaataatgcatactgcgtaacgtgtaaccggatctgtcctgaaccggcttcctctgaacagtatctctgcgggaacgacggagtgacctacagttctgcatgtcatctgaggaaggcgacttgtctgctgggtaggtctatcggtcttgcttacgaaggtaaatgcataaaagctaaatcctgtgaggatattcagtgcaccggaggaaaaaagtgcttgtgggatttcaaagtggggagagggagatgttctttgtgcgacgagttgtgcccagattcgaaatctgacgagcccgtctgtgcctccgataatgcaacatacgcttccgaatgtgcaatgaaagaagctgcttgctcatcgggcgtgctcctggaggtcaagcactccgggtcatgcaacagcatctccgaggataccgaggaggaagaagaggatgaagaccaagattattccttccctatctcttctatcttagaatgg

SEQ ID NO: 250079 - DNA, 1032 bp, synthetic construct
  misc_feature 1..1032: note = Description of Artificial Sequence: Synthetic coding sequence
  source 1..1032: mol_type = other DNA
atggtgagggccaggcatcagccaggaggactctgcctgctgttgttgctgctgtgtcagttcatggaggatagatccgcgcaggctggcaattgttggcttcgccaggctaaaaacgggaggtgccaggtactttataagaccgaactctccaaggaggagtgttgttccacgggccgactcagcacaagttggaccgaagaggatgtcaacgacaatactctcttcaagtggatgatctttaacgggggggccccaaactgcataccatgtaaagagacttgtgagaacgtagactgcggtccgggcaagaagtgcaggatgaacaaaaagaacaaaccccggtgcgtgtgcgcccctgactgttctaacatcacttggaaaggacccgtgtgtggattggacggtaaaacgtatagaaatgagtgcgccttgctgaaagctcgatgcaaggaacagccggaactcgaggtacagtatcaaggccgatgtaagaagacttgtcgggatgtgttttgccccggaagttctacttgcgtggtcgatcaaactaacaatgcatattgcgtcacctgcaatcgcatttgccccgagccggccagtagcgaacagtacctttgtggaaatgacggagtgacctattcctctgcatgccacttgagaaaagcgacatgtcttctcggccggagtattggactggcctacgaggggaagtgcattaaggcaaaaagttgtgaggacatccagtgtacaggaggcaagaagtgtctttgggatttcaaagtagggcggggacggtgcagtttgtgtgatgagctgtgtcctgattctaagagtgacgaacccgtgtgcgcttctgataatgccacttatgcttcagagtgtgccatgaaggaagccgcatgcagcagtggcgtgctgctcgaggtgaaacatagcggcagctgcaactcaatatccgaggatacagaagaggaggaggaggatgaggaccaggactactcttttcctatctcaagcatattggagtgg

SEQ ID NO: 250080 - DNA, 1032 bp, synthetic construct
  misc_feature 1..1032: note = Description of Artificial Sequence: Synthetic coding sequence
  source 1..1032: mol_type = other DNA
atggtgagagctcgacaccagcctggcggactgtgcctgttgcttctccttctgtgccagtttatggaggatcgctccgcgcaggccggaaattgttggctcaggcaggcaaaaaacggtcgctgccaagtgctttacaagactgagctctcgaaggaggagtgttgctcgaccgggcggctgtcgacttcttggactgaggaggacgtgaacgataacaccctgtttaagtggatgatcttcaacggtggcgcaccaaattgcattccatgcaaggaaacttgtgaaaatgttgattgcggtccagggaagaagtgtcgcatgaacaagaagaacaagcccaggtgtgtctgtgcaccggattgctctaacattacctggaaaggtcctgtgtgtggcctggacggaaagacttaccggaatgaatgcgcactgctcaaagcacgctgtaaggaacaaccggagcttgaagtgcagtatcagggaagatgtaaaaagacctgtcgcgatgttttttgtccaggtagcagcacttgtgtggtggaccagactaacaacgcatactgcgtcacttgcaatcggatatgcccagaacccgcgagctccgagcaatacctctgtggtaacgatggagtgacttactcatcggcctgtcacctgaggaaggcaacttgccttctggggaggtcgatcggacttgcatatgaaggaaagtgcattaaagccaaatcctgcgaggatattcaatgtaccggcggaaaaaagtgtctgtgggatttcaaagtgggacgcggaagatgctcgctttgcgacgagctttgtcctgattcgaagtcagacgaaccggtctgtgcgtcagacaacgcaacgtacgcgagcgaatgcgctatgaaggaagcagcttgctcgagcggggtgctcctggaagtgaagcattccggatcgtgcaattctatttcggaggacaccgaggaagaagaggaagatgaagatcaagactactcatttcccatatcaagcattcttgagtgg

SEQ ID NO: 250081 - DNA, 1032 bp, synthetic construct
  misc_feature 1..1032: note = Description of Artificial Sequence: Synthetic coding sequence
  source 1..1032: mol_type = other DNA
atggtgcgtgcgcgtcatcaaccggggggactttgtctgttgctgctgctcctgtgtcagtttatggaagataggagcgcgcaagcgggtaattgctggctgcgccaggcgaagaacggtagatgccaagtcttgtacaaaactgagctttccaaggaggagtgctgctccaccggacgtctctccacctcgtggactgaagaggacgtcaacgataacaccctgtttaagtggatgatctttaatggaggggcaccaaattgcattccatgtaaggaaacttgtgaaaacgtcgattgtggtccagggaagaaatgtagaatgaataagaaaaacaaaccacgatgcgtctgcgcacccgactgtagcaacatcacctggaaaggtccggtgtgtggcctcgatggaaagacctacaggaatgaatgcgcacttttgaaggcccggtgtaaagaacaaccagaactggaagtccagtaccaaggccggtgtaagaaaacttgtagggacgtgttttgccctggatcgtccacctgcgtggtggatcagactaacaacgcatactgtgtgacgtgcaatcgcatttgccctgaacctgcatcatctgagcaatacctctgtggcaacgatggcgtaacttactcgtcggcatgccaccttcggaaggcaacctgtcttttgggacgctcgatcggcctggcttacgaagggaagtgcatcaaggcgaaatcatgcgaagatatccagtgcaccggaggaaagaagtgtctctgggatttcaaggtggggagaggacggtgttcactgtgcgatgagctgtgtccggatagcaagtcagacgaaccagtgtgtgcatcggacaacgcaacctacgcgtctgagtgtgcaatgaaggaagcagcgtgctcctcaggggttcttctggaagtgaaacattcaggcagctgtaattcgatttcggaagatactgaagaagaggaggaagatgaagatcaggactattcgtttccaatatcctcgattcttgaatgg

SEQ ID NO: 250082 - DNA, 1032 bp, synthetic construct
  misc_feature 1..1032: note = Description of Artificial Sequence: Synthetic coding sequence
  source 1..1032: mol_type = other DNA
atggtgagagcaagacatcagcctggcggactttgcctgctgttgctgctattgtgccagtttatggaagacagatccgcccaggccgggaactgctggctgcgccaggccaaaaatggccggtgccaggttctgtacaagacggagttgtccaaggaggaatgctgttctaccggtcggttatccaccagctggacggaggaggacgtgaacgataataccctattcaagtggatgatatttaacggtggggctccgaactgtatcccttgcaaagagacctgcgagaatgtggattgtgggcccgggaaaaaatgccgcatgaacaaaaagaataagccccgttgtgtgtgcgccccggactgtagtaacataacttggaaaggtccagtgtgtgggctggatgggaagacctatcggaatgagtgcgctctgctgaaggcccgctgtaaggagcagcccgaacttgaggtgcaatatcaggggcgatgcaagaagacctgtcgggatgtgttctgccccggatccagtacctgtgtggtggaccagacaaataacgcatactgcgttacttgcaaccgaatctgccctgaacccgcatcctctgagcagtatctgtgtgggaacgacggcgtcacctatagctcggcctgccatctcaggaaagccacatgcctgctgggcagatcaattggattagcttacgagggcaagtgtatcaaggccaaaagttgcgaagacatacagtgtaccgggggtaagaaatgcctctgggatttcaaggtgggtcgagggcgttgcagcctgtgcgatgagctatgccccgacagcaaatctgatgaacccgtctgtgcatcagataacgctacttacgcatcagaatgtgctatgaaggaagccgcttgttcttctggagtattgctagaggttaagcactccggctcatgcaactctattagcgaggataccgaggaggaagaggaagatgaggaccaggactactctttccctatatcatcgatactggaatgg

SEQ ID NO: 250083 - DNA, 1032 bp, synthetic construct
  misc_feature 1..1032: note = Description of Artificial Sequence: Synthetic coding sequence
  source 1..1032: mol_type = other DNA
atggtccgagcccggcaccagccaggtgggctgtgtctgcttctcctcttgctttgtcagttcatggaggaccgcagcgcacaggcgggcaattgttggctgagacaagccaagaacggaagatgccaagtcctctacaaaactgaactcagcaaggaggagtgttgcagcactggccggctgtcgacgtcatggactgaggaggacgtgaatgataacactcttttcaagtggatgatcttcaacggaggtgctcccaattgtatcccatgcaaggaaacctgtgagaacgtcgattgcggtccgggtaaaaagtgccgaatgaacaagaagaataaaccgcgctgcgtgtgcgccccagactgttctaatatcacttggaaggggcctgtctgcggattggacggcaagacgtacaggaacgagtgtgcgttgctcaaagcacgctgcaaggaacagccggagctggaggttcagtatcaaggccggtgcaaaaagacctgcagagacgtcttttgcccaggatcatccacctgtgtcgtggaccagaccaacaatgcgtactgcgtgacttgcaatcgcatctgtccggaacccgcgtcctccgaacagtacctgtgtggtaacgatggagtgacttactcgtcggcttgtcacctcaggaaggcgacctgcctcctgggcagatctatcggtctggcgtacgagggaaagtgcatcaaggccaagtcctgtgaagatatccagtgcacggggggaaagaaatgtctctgggactttaaggtcggacgcggacgatgcagcctttgtgatgaactctgcccggactccaagagcgatgaaccggtgtgcgcctctgataacgcaacttacgcctccgaatgcgcaatgaaggaagctgcctgctccagcggagtccttttggaagtgaaacattcaggatcctgcaactccatttccgaggacactgaggaggaagaagaggatgaggatcaggactactcgttcccaattagctccatcctggaatgg

SEQ ID NO: 250084 - DNA, 1032 bp, synthetic construct
  misc_feature 1..1032: note = Description of Artificial Sequence: Synthetic coding sequence
  source 1..1032: mol_type = other DNA
atggtgcgcgccagacatcagcctggtgggctgtgcctcctcctactgttgctctgccaattcatggaggacaggagcgcacaagcaggaaactgctggcttaggcaggccaagaatgggcgatgtcaggtgttgtataaaaccgagctgagcaaggaggaatgctgtagtaccgggaggctgtcaacaagctggaccgaggaagacgtgaacgataacacccttttcaagtggatgatttttaacggcggcgctccaaactgcataccttgcaaggaaacttgcgagaacgtggactgtgggcccggcaagaagtgtagaatgaacaagaaaaacaagcctaggtgtgtgtgcgcccctgactgcagtaacatcacatggaaaggtcccgtgtgcggcctcgatgggaaaacctacagaaatgagtgcgctcttctgaaggccagatgtaaggagcagcccgagctcgaggttcagtaccaagggcgctgcaagaaaacgtgtagggacgtattctgcccgggttcgagtacctgtgtggtcgaccagacaaataatgcatactgtgtaacttgtaaccggatctgtcctgagccagccagcagtgagcaatatctctgcgggaatgatggagtgacctattcaagtgcatgccacctccgcaaggccacctgcctgctaggcaggagcattggactggcttatgagggaaaatgcataaaagccaagtcatgcgaagacatacagtgtacaggaggaaagaaatgcctctgggactttaaggtgggtcggggtagatgttccttatgcgacgaactgtgtccagatagcaagtctgacgagcctgtctgtgcaagtgacaacgccacctacgcgagcgagtgcgctatgaaggaggctgcctgcagttctggggtcctcctggaggtcaagcactcaggtagttgcaattccatcagtgaggataccgaagaggaggaggaagatgaagatcaggattattccttcccaatctcgtcaatcctggaatgg

SEQ ID NO: 250085 - DNA, 1032 bp, synthetic construct
  misc_feature 1..1032: note = Description of Artificial Sequence: Synthetic coding sequence
  source 1..1032: mol_type = other DNA
atggtgcgagcacgtcaccaacctggaggtctttgcttgttgctgctcttgctttgtcaattcatggaagatagatcggctcaagcggggaactgttggctgcgccaagcgaaaaatggccggtgtcaggtgctgtacaaaaccgaactgtccaaggaagaatgctgttcgaccggacgtctgtctacctcttggactgaagaggacgtcaacgacaataccctctttaagtggatgatcttcaacggaggagctccaaactgcattccatgcaaggaaacctgtgagaacgtggattgcgggccaggaaaaaagtgtagaatgaacaaaaagaataagcccagatgtgtctgcgcgccggactgctccaatatcacttggaagggacctgtgtgtggcctcgatgggaaaacttaccgtaacgaatgtgctctgctcaaggcccggtgtaaagaacagcctgaactggaagtgcaatatcaaggtcggtgcaagaaaacttgtagagacgtgttttgtcccggatcgagcacctgcgttgtcgatcagaccaacaatgcatactgtgtgacttgcaaccgtatatgcccagagcctgcatcctcagagcaatacctttgcggtaacgatggtgtgacttattccagcgcatgccaccttcgaaaagcaacttgtctgctcggacgatccattggtcttgcctacgaaggaaaatgtataaaggcaaaatcatgtgaggatatccagtgtaccggtggaaagaagtgtttgtgggactttaaggtcggacgggggagatgctctctttgtgacgaactgtgtccagatagcaagagcgatgaacccgtctgtgcaagcgacaatgccacgtacgcatccgaatgtgcaatgaaagaggcagcctgctcctcaggtgtgttgcttgaggtgaaacactcgggatcctgtaactcgatttcggaagataccgaggaagaagaagaggacgaagatcaggattactccttcccgataagctcgatcctggaatgg

SEQ ID NO: 250086 - DNA, 1032 bp, synthetic construct
  misc_feature 1..1032: note = Description of Artificial Sequence: Synthetic coding sequence
  source 1..1032: mol_type = other DNA
atggttcgagctcgacaccagccaggtggcctgtgcctgctccttctgctgttgtgtcagtttatggaggataggtcggcccaggcggggaactgctggctccggcaggccaagaatggtcgatgccaagtcttgtataagaccgaactgagtaaggaagaatgctgctcaaccggacgactgtctacatcatggactgaggaagacgtgaacgacaacaccttgtttaagtggatgatcttcaatggtggggcccccaactgtatcccttgtaaggaaacctgcgaaaatgttgattgtgggccaggtaaaaagtgcagaatgaacaagaaaaataagcctcgctgtgtctgtgccccagattgcagtaatattacatggaaaggacccgtgtgtggcttagacggcaagacataccggaacgagtgtgccctgttgaaagccaggtgcaaagagcagcccgagctagaggtacagtaccaggggaggtgtaagaagacgtgtagggacgtcttctgccctgggtcctctacatgtgtcgttgatcagacaaacaatgcttattgtgtgacatgcaaccggatttgtcctgaaccggcctccagcgagcagtatctttgcggaaacgatggcgttacttattcgtctgcttgccatctgcgaaaggcaacatgcctgctcgggaggagcatcgggctggcttatgaaggcaagtgcatcaaggctaaaagctgtgaagatatacagtgcacgggagggaagaagtgcctatgggacttcaaagttggcagggggcgatgttctctgtgtgacgagctctgtccagattcaaaatcagatgagccagtctgcgcgagtgataatgcaacctatgcctccgaatgcgccatgaaagaggcggcctgtagcagtggcgttttgctggaagtgaaacactccggatcttgcaattccatatcggaagacacagaagaagaagaagaggatgaggaccaagattatagctttcccatatctagcattttggagtgg

SEQ ID NO: 250087 - DNA, 1032 bp, synthetic construct
  misc_feature 1..1032: note = Description of Artificial Sequence: Synthetic coding sequence
  source 1..1032: mol_type = other DNA
atggtgcgggcgagacatcagccgggtggactctgcctcttgctgctgctgctctgtcaattcatggaagacaggtcggcccaggccggaaactgctggctgcgccaagcaaagaacggccgctgccaggtgctgtacaagactgagctgtctaaggaggaatgttgtagcacgggaagactctcaacctcatggactgaggaggatgtcaatgacaacactctcttcaagtggatgatcttcaacggaggggccccaaactgcatcccatgtaaagaaacctgtgaaaatgtcgactgcggaccgggcaagaaatgtcgcatgaacaagaagaacaaaccgcgctgcgtgtgtgcccctgactgctcgaacatcacgtggaagggaccggtgtgcgggttggatggtaagacctaccggaacgagtgcgcgctgctgaaagcccgctgcaaggagcaacctgaactggaagttcagtaccagggccggtgcaagaaaacttgccgggacgtgttctgcccgggctcgtccacgtgcgtggtggaccagaccaacaatgcctactgtgtgacttgcaatcggatctgcccagagccggcgtcgtcggagcaatatttgtgtggaaacgacggagtgacctactcatcggcgtgccacttgcggaaagccacgtgtctcctgggacggtccatcggccttgcgtacgagggaaagtgtatcaaggcaaaatcgtgtgaggacattcagtgcactggaggaaaaaagtgcctgtgggatttcaaggtgggcagaggaagatgttccctgtgcgatgagctgtgtccggatagcaagagtgatgagcctgtgtgcgcgtcagataatgccacctacgcttcggaatgcgctatgaaggaggcggcctgctcgtccggggtcctcctggaggtgaagcactccggctcgtgcaattcgatctcagaagatactgaagaagaggaggaagacgaagatcaggactacagcttcccgatctcctccattctcgagtgg

SEQ ID NO: 250088 - DNA, 1032 bp, synthetic construct
  misc_feature 1..1032: note = Description of Artificial Sequence: Synthetic coding sequence
  source 1..1032: mol_type = other DNA
atggtgagagccaggcatcagccgggaggcctctgtcttctgctcctgcttctctgtcaatttatggaggaccgctccgctcaagctgggaactgttggctgcgccaagcaaagaatgggagatgtcaggtgctctataaaactgagcttagtaaggaggaatgttgtagcaccggaaggctgtccacctcttggacagaggaggacgtgaatgacaatactttgtttaaatggatgatcttcaatgggggtgctcccaattgtataccatgtaaggaaacatgtgaaaacgtggattgcggcccgggcaaaaaatgtcggatgaacaagaaaaataaacctaggtgcgtttgtgcccccgattgctctaacattacttggaaagggccagtgtgtgggcttgatggtaaaacctaccgaaacgagtgcgcattgctgaaggctaggtgcaaagagcagccggaactcgaagtgcagtaccagggacgctgcaaaaagacttgtcgggacgtcttctgccccggaagctccacctgcgtggttgatcagactaataatgcctactgcgtgacttgcaaccggatctgtcctgagcctgctagttccgagcagtacctctgcggaaatgacggagtgacctattcttccgcctgtcacctgcgaaaggccacctgcctgctggggcggagcatcggtctcgcctacgagggcaagtgcatcaaggccaagtcctgtgaggatatccagtgcactggaggcaagaagtgcctctgggacttcaaggtaggccgcggtaggtgttctttgtgcgacgagctgtgcccggatagtaaatctgatgagccagtttgcgccagtgataatgccacctacgcgagtgagtgcgctatgaaggaggctgcctgtagttcaggagtgctcctggaggttaagcattcaggtagctgtaactccatctctgaagataccgaagaggaggaagaggacgaggaccaggactattcttttcccattagctctatcctcgagtgg

SEQ ID NO: 250089 - DNA, 1032 bp, synthetic construct
  misc_feature 1..1032: note = Description of Artificial Sequence: Synthetic coding sequence
  source 1..1032: mol_type = other DNA
atggtgcgcgccagacaccagccgggcggcttatgtttactcctgctattgctgtgtcagttcatggaagatcgttccgcacaggctggcaactgttggctcaggcaggcaaagaacggcaggtgccaagtgttatataagactgagctgagtaaagaagagtgttgctccacggggcggctgtcaacttcctggacagaagaggacgtgaatgataacacactcttcaagtggatgatatttaatggcggggccccaaattgcattccatgtaaagaaacctgtgagaatgttgactgcgggcctgggaaaaagtgtaggatgaacaaaaaaaacaagcctcgttgcgtctgcgcacctgattgttccaatatcacatggaagggccctgtgtgcggcctcgatgggaagacataccgcaacgaatgtgcgttactgaaggccaggtgtaaagagcaacccgagttggaggtacagtaccagggacggtgtaagaagacctgtcgggacgtcttttgccccggcagcagtacatgtgtagttgatcagaccaacaacgcttactgtgttacctgcaaccgcatctgccccgaacctgctagctctgagcagtacctatgtgggaacgatggcgttacctactcctccgcctgccaccttaggaaagcaacatgcctcctgggtaggtccatcggcctcgcttatgagggaaaatgtataaaagccaagagctgcgaggacattcagtgcaccgggggaaagaagtgtctgtgggattttaaggtcgggcggggtcgctgcagcctctgtgacgagctatgccccgattcaaagtcagacgaacccgtgtgcgcgtcagacaacgcaacctacgcctccgagtgcgccatgaaggaggctgcctgtagttcaggcgttctccttgaggtcaaacacagcgggtcctgcaattcaattagcgaagacaccgaagaggaggaggaggacgaagaccaggattattcatttccaatatcttcaattctcgaatgg

SEQ ID NO: 250090 - DNA, 1032 bp, synthetic construct
  misc_feature 1..1032: note = Description of Artificial Sequence: Synthetic coding sequence
  source 1..1032: mol_type = other DNA
atggtgcgcgctaggcatcaaccaggaggactctgtctccttctcttgcttctgtgtcagtttatggaggataggagcgcacaggcaggcaactgttggttaaggcaggctaagaatgggaggtgtcaagtcctttacaaaacagaactttccaaggaggaatgctgtagcaccggtagactcagcacgtcttggacagaggaggacgtgaacgacaacactctttttaagtggatgatctttaacggaggagcccctaactgtattccctgcaaggaaacttgcgaaaacgtcgactgtggcccgggtaaaaagtgccgtatgaataagaaaaataagcctaggtgtgtttgcgctcccgactgtagtaacatcacatggaaggggccagtgtgcggactggatgggaaaacatataggaacgaatgcgcccttcttaaagcaagatgcaaggaacagcctgagttggaagtgcaatatcagggcagatgcaaaaagacatgcagggatgttttctgccctggcagctccacctgcgtggttgaccagactaacaatgcgtattgcgtgacctgcaatcgaatctgtcctgaacctgcttctagcgaacagtacctgtgcggcaatgacggagtgacctatagtagtgcctgtcacttgcgcaaagcaacctgcctgctgggccgatctattgggctcgcttacgagggaaaatgtatcaaggccaaatcatgcgaggacatccaatgcaccggaggaaagaagtgcctttgggactttaaagtgggccggggcagatgctcactttgtgacgagttgtgcccagattctaagagtgatgagccagtgtgtgcaagtgataatgctacatacgcctccgaatgtgcaatgaaggaggcagcctgctccagcggcgtcctgctcgaggttaagcactctgggagctgtaactcaatctctgaggacaccgaagaagaggaggaggatgaggaccaagactattctttccctatctcctccattctggaatgg

SEQ ID NO: 250091 - DNA, 1032 bp, synthetic construct
  misc_feature 1..1032: note = Description of Artificial Sequence: Synthetic coding sequence
  source 1..1032: mol_type = other DNA
atggttcgcgctcggcaccaacctggaggcctctgtctgcttctcctcctgctgtgccagtttatggaagatagaagcgcgcaggcaggtaattgctggctccgacaggcgaaaaatggacggtgccaagttctgtataaaacggagctgagcaaagaagaatgctgttcaactggacggctctccacctcttggacggaagaggacgttaacgacaacaccctattcaaatggatgatcttcaacgggggcgccccaaactgcattccttgtaaagagacttgtgaaaacgtggactgtgggcctggtaaaaagtgccggatgaacaagaaaaacaaaccgcgctgcgtatgtgctcctgattgttccaatatcacatggaaaggcccggtgtgtgggctggacggaaaaacatacagaaacgagtgtgctcttctgaaagcccgctgcaaagagcaacctgaactggaggtgcagtatcagggaagatgcaagaaaacgtgcagggatgtgttctgcccgggtagtagcacctgcgtggtagaccagactaataatgcctactgcgtgacctgtaacagaatctgccccgagcctgcctcatctgagcagtacctctgtgggaacgatggagtcacctactcttctgcctgccacctgcggaaagccacatgcttgttgggccgtagcattggcctcgcctatgagggcaaatgcatcaaagctaagagttgcgaggatattcagtgtacgggaggaaagaagtgcctgtgggattttaaagtcgggcgggggcggtgtagcttgtgcgacgaactgtgccccgatagcaagtctgatgaacccgtgtgtgcctcagacaacgcgacatacgcctcggagtgtgctatgaaggaggcagcttgcagttctggcgtgctgttggaggtaaagcattccgggtcatgtaactctatcagtgaagataccgaagaggaggaggaggacgaagatcaggattactcatttcctattagctctattcttgaatgg

SEQ ID NO: 250092 - DNA, 1032 bp, synthetic construct
  misc_feature 1..1032: note = Description of Artificial Sequence: Synthetic coding sequence
  source 1..1032: mol_type = other DNA
atggtgcgggccaggcaccaacccggcggcctgtgcctgctcttgttgttgctctgtcagtttatggaggatcgcagtgcccaggctggaaactgctggctgcgccaggctaaaaatggccgatgccaggttctgtataagaccgaactcagtaaggaagagtgctgctcaacggggcgcttgtctacatcttggaccgaggaggatgttaacgataacaccctgtttaaatggatgatcttcaacggcggcgcgcccaactgtataccttgcaaggaaacatgcgaaaacgtcgactgtggtcccggtaaaaaatgtcggatgaataagaaaaacaagccccggtgcgtgtgcgcgcctgattgctctaacatcacatggaaagggcccgtgtgcggactagatggcaagacctaccgtaacgagtgcgcgttgcttaaggcacgctgcaaggagcagcctgagctcgaggtccagtaccaagggcggtgcaaaaaaacatgccgggacgttttttgccccggctctagcacctgtgtcgtcgaccaaaccaacaacgcatattgcgtaacttgtaacaggatctgtccggaacctgcaagttctgaacaatacctgtgcgggaacgacggagtgacctacagctcagcatgtcatctccggaaagcaacctgtctgctggggcgtagtatcggattagcgtatgagggcaaatgcatcaaggcaaagagctgcgaggacattcaatgtaccggaggcaagaagtgtctatgggacttcaaggttggcaggggtcgatgctccttgtgtgacgagctctgccctgactccaaatccgatgagccagtctgtgccagcgataacgcgacctacgcctccgaatgcgccatgaaggaagctgcctgctcgtccggggtactcctcgaggtcaagcacagtggcagttgcaattcaatctccgaagatacagaggaagaggaagaggacgaggatcaggattactccttccctatctcctcaatcctggagtgg

SEQ ID NO: 250093 - DNA, 1032 bp, synthetic construct
  misc_feature 1..1032: note = Description of Artificial Sequence: Synthetic coding sequence
  source 1..1032: mol_type = other DNA
atggtccgggcgaggcaccaaccaggcggactctgcctgctccttctgctcctgtgtcagttcatggaggacagatccgctcaggccgggaactgttggctgcggcaggcaaaaaacggccgctgccaggtgctgtataagaccgaactttcaaaggaagagtgctgctcgaccgggcggctatctaccagttggaccgaggaggatgttaacgacaatacactgttcaagtggatgatctttaatgggggggcgcctaattgtataccatgcaaagaaacatgcgagaatgtggactgtggtcccggcaagaaatgcaggatgaacaaaaagaacaagccgaggtgcgtgtgtgcccctgactgcagtaacataacctggaaaggtcctgtgtgcggactcgatggaaagacgtaccgcaacgaatgcgcactgttaaaagctaggtgtaaggaacagccagaattagaggttcaataccaagggaggtgcaaaaagacatgtagggatgtgttttgccctggctcgtcaacatgcgtagtagaccagacaaataacgcctattgtgtcacctgtaataggatttgtccggaacccgcttcttcagagcaatacctttgcggcaacgacggggttacatactccagtgcatgtcatttgaggaaggccacatgtctgttggggagatccatcgggttagcttacgagggcaaatgcatcaaggccaaaagttgtgaagatatccagtgtacagggggtaagaagtgtctttgggatttcaaggttggtagaggtcggtgctccctgtgcgacgagttgtgccctgactccaaatccgatgagccagtgtgcgcatcagataatgcgacctacgccagcgaatgtgccatgaaggaggcggcatgtagttcaggcgttcttcttgaagtcaaacatagtggttcgtgtaatagcatcagtgaagacaccgaagaagaggaggaggacgaagaccaggattactcctttcctatcagcagtatcctagagtgg

SEQ ID NO: 250094 - DNA, 1032 bp, synthetic construct; identical to SEQ ID NO: 250012
  misc_feature 1..1032: note = Description of Artificial Sequence: Synthetic coding sequence
  source 1..1032: mol_type = other DNA

SEQ ID NO: 250095 - DNA, 1032 bp, synthetic construct
  misc_feature 1..1032: note = Description of Artificial Sequence: Synthetic coding sequence
  source 1..1032: mol_type = other DNA
atggtgagggcgcgacatcagccaggtggactttgcctgctgcttcttttgctgtgtcagtttatggaggaccgtagcgctcaggctgggaactgttggttgcgccaggcaaaaaacggccgttgtcaggtgctgtacaagaccgaactttccaaagaagagtgttgttccactggtcgactttcgactagctggactgaagaagatgtcaacgataacacgctgtttaagtggatgattttcaacggaggtgcaccaaattgtattccatgtaaagaaacctgcgagaacgtggattgcggtccgggaaagaagtgtagaatgaataagaagaacaagcctcgctgtgtgtgtgcgccagattgttcgaacataacctggaagggtccggtgtgcgggctggacggcaagacgtaccgcaatgaatgcgccctcctcaaggcaagatgtaaggaacaaccagaactggaggtgcaatatcagggaagatgtaaaaagacttgtagggacgtgttttgtcccgggagctccacctgcgtggtggaccaaaccaataatgcctactgcgtcacctgtaatcgcatttgtccagagcctgcatcgtcagagcagtacctgtgcggtaatgacggtgtgacctactcgagcgcgtgccacttgagaaaggccacttgtctgctcggccggagcattggcctcgcttacgaaggaaagtgtatcaaggccaagtcgtgtgaggatatacaatgtaccggcggcaagaagtgtctctgggatttcaaggtggggagaggaagatgctccctgtgtgacgaactctgtccggatagcaaaagcgacgaacctgtctgtgcatccgacaacgcaacttacgcatcagaatgtgcaatgaaggaagccgcttgttcctccggcgtgcttctcgaagtgaagcattcaggatcctgtaattcgatttcggaagatactgaggaagaagaagaggacgaggatcaagactacagcttcccaatttcgtcgattctcgaatgg

SEQ ID NO: 250096 - DNA, 1032 bp, synthetic construct
  misc_feature 1..1032: note = Description of Artificial Sequence: Synthetic coding sequence
  source 1..1032: mol_type = other DNA
atggtaagggctcggcatcagccgggtggactctgtctcctgctgctactcttgtgccagttcatggaagaccgatctgcgcaggcgggcaactgctggctccgacaggccaagaacggtcgctgccaagtcctatacaagaccgaactgtccaaggaagaatgctgcagcacaggtaggctttcgactagctggactgaagaggacgtcaatgacaacacgttgttcaagtggatgatctttaacgggggtgcccctaactgtataccctgcaaggaaacgtgcgagaacgtcgattgcggtccaggcaagaagtgtagaatgaataaaaagaataagcctcgttgcgtttgtgcccccgattgttctaacatcacctggaaaggcccggtctgcggtttggacggtaagacctatcgaaatgagtgtgccctactcaaagcgcgctgtaaggagcaaccagagcttgaagtccagtaccaggggagatgcaagaaaacatgccgcgacgtgttctgcccaggaagtagcacatgcgtggttgatcaaactaacaacgcctactgtgtcacctgcaatcgtatctgtccagagcctgcctcctccgagcagtacttgtgcggcaacgacggtgtaacgtattctagcgcctgccacctgcggaaagccacctgcttgttgggccgctctatcgggttggcttatgagggaaagtgcatcaaggccaagagctgcgaggatatccagtgcaccggcggaaagaaatgcttgtgggatttcaaggttggccgtggacgctgtagcctatgcgacgagctctgcccggactccaagtctgacgagccggtatgcgcaagtgacaacgcgacctatgcctcagagtgcgccatgaaggaggctgcgtgttcctccggtgttctgctggaggtcaagcactctggaagttgtaattctatcagtgaggatacagaggaggaggaggaggatgaggaccaggattactccttccccatttcttccatccttgagtgg

SEQ ID NO: 250097 - DNA, 1032 bp, synthetic construct
  misc_feature 1..1032: note = Description of Artificial Sequence: Synthetic coding sequence
  source 1..1032: mol_type = other DNA
atggtacgagcacggcaccagcctggcggtctttgccttctcctgctgctgttatgccaatttatggaagatcggtcagcacaagccggcaactgttggctgcggcaagctaaaaacggccggtgccaagtgctgtataagactgagctgtcgaaggaagagtgctgttctaccggccgactgagcacgtcttggacagaagaggacgtgaacgataacacactattcaaatggatgatttttaacggaggtgcgcccaattgcattccttgtaaggagacctgcgagaacgtggattgcggtccgggtaagaagtgcagaatgaacaagaagaataaacccaggtgcgtatgcgctccagattgcagtaatattacatggaagggacccgtatgtggcttagacggtaagacatatcggaacgagtgcgcattactcaaggcaaggtgcaaagaacagccagaactggaagtccaataccagggcagatgcaagaagacttgcagggacgtgttctgccccgggtcgtccacatgtgtagtggaccagactaacaacgcttactgtgttacttgtaatcgcatttgtcctgaacctgccagctcagaacagtatctttgtgggaatgacggagtcacatactcgagcgcttgccatctcaggaaagcaacctgcctgttggggaggtcaatcgggcttgcctacgaaggtaagtgtatcaaagcgaaatcctgcgaggatatccagtgcacaggagggaagaagtgtctgtgggattttaaagtagggcgggggagatgcagtctgtgcgacgaattgtgtccagactcgaaatcagatgagccagtatgcgctagcgataacgccacgtatgcttctgagtgtgcaatgaaagaagcggcctgcagcagtggggttctgctggaggtcaagcactcgggatcatgcaattcgatcagtgaggatactgaagaagaagaagaggatgaggatcaagactactcctttcccatttcatctatcctggaatgg

SEQ ID NO: 250098 - DNA, 1032 bp, synthetic construct
  misc_feature 1..1032: note = Description of Artificial Sequence: Synthetic coding sequence
  source 1..1032: mol_type = other DNA
atggtgcgggcccgccaccagccaggtggactgtgcctcctgctgctgctactgtgccagttcatggaggatcgcagcgcacaggcgggcaactgttggctgcgccaagccaaaaatggccgatgtcaagtcctgtacaagaccgagctgtctaaggaggagtgttgttcgacaggacggctgagcacgtcctggaccgaggaggatgtcaatgataataccttgttcaaatggatgatcttcaatggtggtgcgccaaattgtattccatgcaaagagacctgcgaaaacgtggactgcggtccaggcaagaagtgccgtatgaataagaagaacaagccacgttgtgtgtgtgccccggattgcagcaatatcacttggaaaggtcctgtgtgtggcctggatgggaagacttaccgcaatgagtgtgcgctgttgaaagcacgctgcaaggaacagccggagctggaggttcaatatcaaggtcgttgtaaaaagacctgccgggacgttttttgcccgggttctagtacctgtgtagtggaccagaccaataacgcgtactgcgtgacgtgcaatcgcatttgcccggaaccggcctcctcagaacaatatctgtgcggtaatgacggtgtcacttattcttccgcgtgccatctgaggaaagcgacgtgcctgctgggcaggagcattggtctggcctatgaaggcaagtgcatcaaggccaagtcttgcgaagatatccaatgtaccggtggtaagaagtgcctgtgggattttaaggttggtcgggggcgttgtagcctgtgcgacgagctgtgcccggatagcaagtcggacgagcccgtctgcgcctctgacaatgcgacctatgcaagtgagtgcgctatgaaggaggctgcatgttcctctggagtgcttctggaggtgaaacacagcggcagctgcaacagcatcagcgaagacaccgaggaggaggaagaagacgaggatcaggattatagcttcccgatcagcagcatactagagtgg

SEQ ID NO: 250099 - DNA, 1032 bp, synthetic construct
  misc_feature 1..1032: note = Description of Artificial Sequence: Synthetic coding sequence
  source 1..1032: mol_type = other DNA
atggtgcgagcaaggcatcagcccggagggttgtgccttctgctcctgttgctgtgtcagttcatggaagacaggtcagctcaggcaggtaattgttggttacgacaagccaagaatggccgctgccaagttctctacaaaacagaattgtccaaagaggaatgctgcagcacaggtaggctttccacctcttggaccgaagaggatgtaaacgacaacactcttttcaagtggatgatttttaacggtggggctccaaactgcattccctgcaaggagacatgtgagaatgtggactgcggcccggggaagaaatgccgcatgaacaaaaaaaacaaaccacgctgtgtgtgcgccccagattgctccaacataacctggaagggaccagtgtgtggcctggacggaaagacataccggaacgaatgcgctctcctgaaggccaggtgcaaagaacaacccgaattggaagtgcaatatcaggggcgttgcaaaaaaacttgcagggatgttttctgtccaggcagctccacttgcgtagtggatcagacgaacaatgcatattgcgtcacctgcaaccgcatctgccccgagcccgcttcctccgaacagtatctctgtggcaacgacggggttacctactctagcgcatgccacctgagaaaagccacgtgtttgctgggccggtccattggcctagcatatgagggtaagtgcatcaaggctaagtcctgcgaagacatccagtgtaccggcggaaagaagtgcctgtgggacttcaaggttgggagaggacgttgcagcctttgtgacgagctgtgtcctgatagcaagtctgacgaacccgtctgcgctagcgacaacgctacatacgcgtctgaatgcgcgatgaaggaggccgcatgtagttctggcgtgctgctcgaggtgaaacacagtggatcttgcaactccattagcgaagatactgaagaagaagaggaagatgaggaccaggactactccttccctatctcatctatcctcgagtgg

SEQ ID NO: 250100 - DNA, 1032 bp, synthetic construct
  misc_feature 1..1032: note = Description of Artificial Sequence: Synthetic coding sequence
  source 1..1032: mol_type = other DNA
atggtgagggctcggcatcagccgggcggcctgtgcttactgttgctgcttctttgtcaattcatggaggacagaagcgctcaagccggcaactgctggctgaggcaagccaaaaacggtcggtgtcaagtgttgtacaaaactgagctgagcaaagaggaatgttgttctaccggccgactttctacctcctggaccgaggaagacgtcaacgacaacactctgttcaaatggatgattttcaatggcggagccccaaactgtatcccatgcaaagagacttgtgaaaacgtcgattgcggcccaggaaagaaatgtcggatgaacaaaaaaaacaagcctagatgcgtttgtgcccccgactgttctaacataacatggaaaggaccggtgtgtgggcttgatgggaagacctacagaaacgagtgtgcacttctgaaggcccgctgcaaggagcagccagagctcgaagtgcagtatcagggacgctgcaagaaaacatgccgggatgtcttctgccctggcagcagcacatgcgttgttgaccagacaaacaacgcctattgcgttacctgcaacaggatctgccccgagccagcttcctcggagcagtatttgtgtggcaatgatggggtgacctacagctccgcctgccatctccgtaaagctacctgcctgctcggcaggtctattgggctcgcatatgaaggaaagtgtataaaagccaagtcatgtgaagatatacagtgcaccggaggaaagaagtgtttgtgggatttcaaagtgggaagagggcgatgcagcttgtgcgacgagctgtgccccgattcaaaatcggacgagcccgtttgtgctagtgataacgccacctacgcgagcgagtgtgcaatgaaagaggccgcttgcagctctggcgtgctgttggaggtgaaacactccggatcttgtaactccatctctgaagacactgaggaggaggaagaagatgaggatcaggactactcatttcctatctcaagcattctcgagtgg

SEQ ID NO: 250101 - DNA, 1032 bp, synthetic construct
  misc_feature 1..1032: note = Description of Artificial Sequence: Synthetic coding sequence
  source 1..1032: mol_type = other DNA
atggtgcgcgcaagacaccaaccaggaggtctctgtctgctgctactcctcctttgtcagtttatggaggacaggtccgcccaggcaggaaactgctggctccgccaggccaaaaacggccggtgccaagtcctttataagaccgagttgtcaaaggaagaatgttgcagtactggaaggctttctaccagctggacagaagaagacgtgaacgacaacactctgtttaagtggatgatcttcaacggaggcgcccctaattgtatcccttgcaaagaaacctgcgagaacgttgattgtggtcctggcaagaagtgtcgtatgaacaagaaaaacaaaccgcgctgcgtgtgcgctcctgactgttctaacattacgtggaaaggaccagtgtgcggactggacggaaaaacttaccggaatgaatgcgcactgctgaaggctaggtgcaaggagcagcctgaactagaggtccagtaccaaggaagatgcaagaaaacatgcagggatgttttttgtccaggctcttccacctgtgtagtggaccagacaaacaatgcttactgtgtcacatgcaaccgtatctgccccgagcctgctagcagcgagcaatatctatgcggcaacgatggggtaacttacagtagcgcttgtcacttgcggaaggcaacctgtctacttggccggagcattggcttagcatatgaaggcaaatgcattaaagcaaagagctgcgaagacatccaatgtaccggggggaaaaagtgtctttgggactttaaagtgggtaggggcagatgttccctgtgtgatgaattgtgtccagatagcaagtctgatgagccagtgtgtgcctctgacaacgctacttacgcctctgaatgtgctatgaaagaagctgcttgcagtagtggcgttctgctcgaagtgaaacattccggtagctgtaactccatcagcgaagatacggaggaagaagaagaagacgaggaccaggactactcctttccaatctcatcaatcctggagtgg

SEQ ID NO: 250102 - DNA, 1032 bp, synthetic construct
  misc_feature 1..1032: note = Description of Artificial Sequence: Synthetic coding sequence
  source 1..1032: mol_type = other DNA
atggtacgagccagacatcaacccggcggcctgtgtctcctgctcctcctgctgtgccagttcatggaagaccgatctgcccaggcggggaactgctggttgcgtcaagctaaaaacggccggtgtcaggtcttgtataagaccgagctgtcaaaagaggagtgttgctcaaccgggcggctgtccacatcctggaccgaggaggatgtgaacgataacacactctttaagtggatgatctttaatggtggcgccccaaattgcatcccctgtaaggagacatgcgagaatgtcgattgtggacctggaaagaagtgcaggatgaataagaaaaacaagccccggtgcgtttgtgctcccgattgctccaacattacatggaagggccccgtctgcggcctggatggaaagacctataggaatgaatgtgcccttttgaaggcgcgttgtaaagaacagcccgagcttgaggtgcagtaccaagggagatgtaagaagacatgtcgcgacgttttctgcccgggctcttctacctgtgtggtggatcagaccaataatgcatactgtgtgacctgtaaccgcatctgcccagagcccgcatcttcagaacagtacctgtgtggcaatgacggtgtgacgtattctagcgcctgccaccttagaaaggccacttgtctgctgggcagatccatcggcttggcctatgagggaaagtgcattaaggctaagtcatgcgaagacatccagtgcacgggtggcaaaaagtgcctgtgggacttcaaggtgggtaggggacgatgttccttatgcgacgaactgtgccccgacagtaaatccgacgaaccagtatgtgccagtgataacgcgacatacgcttctgagtgtgcaatgaaagaggctgcatgtagctcaggcgtgcttcttgaggtgaagcattcgggtagctgcaattccatcagtgaggacacggaggaggaggaagaggatgaagaccaagactactcgtttcctatctcaagtatactggagtgg

SEQ ID NO: 250103 - DNA, 1032 bp, synthetic construct
  misc_feature 1..1032: note = Description of Artificial Sequence: Synthetic coding sequence
  source 1..1032: mol_type = other DNA
atggtgagagcccgccatcagcccggcggcctgtgcttgctcctcttgctgctttgtcagtttatggaggatagaagtgcccaggctgggaactgttggctgcggcaggccaagaatggtcggtgccaggtcctgtataagacagaactttccaaagaagagtgctgcagcacaggtaggctcagcactagctggactgaagaggatgtcaatgacaatacactcttcaaatggatgattttcaacgggggcgcccctaattgtattccatgtaaggagacttgcgagaacgtagactgcgggcctggaaagaaatgccggatgaataagaagaataaacctaggtgtgtctgtgcgcccgattgctcaaacataacgtggaagggccccgtctgcggcctcgatgggaagacttacaggaatgaatgcgctctgctcaaagcaaggtgcaaggaacaaccggagcttgaagtacagtatcaaggtcgatgcaagaaaacttgtagggacgttttttgccccggcagcagcacctgcgttgttgaccagactaacaacgcgtactgcgttacctgcaatcgaatctgtccggaaccggccagcagcgagcagtacctgtgcggcaacgacggcgtgacctacagcagcgcttgccatcttaggaaggcgacttgccttctcggacgctcaataggcctcgcgtacgagggaaagtgtataaaggcaaaatcctgtgaggatatccagtgcaccgggggtaagaaatgtctgtgggatttcaaggtgggccggggccggtgcagtctttgtgacgagctttgtcctgattccaaaagcgacgagcctgtctgcgctagtgacaacgctacctacgcgtccgagtgcgcaatgaaagaggcagcatgcagttccggtgtgctgctcgaggtcaaacattcagggagctgtaactctattagcgaggatacagaggaagaagaggaggatgaagaccaggactacagctttcctatctcatcaattctggagtgg

SEQ ID NO: 250104 - DNA, 1032 bp, synthetic construct
  misc_feature 1..1032: note = Description of Artificial Sequence: Synthetic coding sequence
  source 1..1032: mol_type = other DNA
atggttagagccaggcatcagcccggaggactgtgtctgctgctgctcctgctatgccaattcatggaagataggtctgctcaggccgggaactgttggctaagacaggctaaaaacggccgctgccaggtgctatataagaccgaactgtctaaagaggagtgttgctcaaccggcagattgtctactagttggactgaagaagatgtcaatgataacacattgttcaaatggatgatcttcaacggaggagctccgaattgcataccttgcaaagagacatgtgaaaacgttgattgtggccccggtaagaagtgccggatgaacaagaaaaacaagccgcgatgcgtgtgcgcacccgactgttccaacatcacatggaaaggacctgtgtgtggtctggatggaaaaacctacagaaacgaatgcgcattgcttaaggccaggtgcaaggaacagccggagctggaggttcagtatcagggaaggtgtaagaaaacttgtcgtgacgtgttctgcccaggttcgagcacatgtgtggtggatcagacaaacaatgcgtactgcgtaacatgtaatcgtatttgccctgagccggcaagttccgagcagtacttatgtggaaacgacggggtgacctactcctccgcatgccatctgaggaaggcaacatgcctgttgggacgcagcattggacttgcgtacgaggggaaatgcatcaaagcaaaatcctgcgaggatatccagtgcaccggaggaaagaagtgcttgtgggacttcaaagttggcaggggccgctgttcactctgcgatgaattgtgtcctgattctaagtccgacgagccggtgtgcgcctccgataatgccacttatgcctccgaatgtgctatgaaggaggcggcatgctcctctggagtccttctggaagtaaagcatagtggttcctgcaattccatctcagaagatacagaagaggaagaggaggacgaggatcaagattactcctttccaatctcgtccatactggaatgg

SEQ ID NO: 250105 - DNA, 1032 bp, synthetic construct
  misc_feature 1..1032: note = Description of Artificial Sequence: Synthetic coding sequence
  source 1..1032: mol_type = other DNA
atggtccgcgcacggcaccagcctggtggtctttgtttgttgctgttgcttctctgccagtttatggaggaccgctcggcccaggcggggaattgttggctgagacaggcaaaaaacggcagatgccaggtgctgtacaaaaccgaactgtcaaaagaagaatgttgttccaccggacgactgtccacctcctggactgaagaggacgttaatgataacaccttgtttaagtggatgatctttaatggtggtgccccaaactgtatcccttgcaaggagacgtgtgagaacgtggattgcggaccgggtaaaaagtgtcgaatgaacaagaaaaacaagccccgctgtgtgtgtgccccggattgctcgaatatcacctggaagggacccgtctgtgggcttgacggtaagacgtacaggaacgaatgtgcgctgctgaaggcaagatgcaaggaacaacctgaacttgaagtccagtaccaagggcggtgtaaaaagacttgcagagatgtgttttgtcctggctcctcaacctgtgtggtggaccaaaccaataacgcctactgcgtcacgtgtaaccggatttgccctgagccagcgtccagcgagcaatacctgtgcggtaacgacggtgtgacttactcgtcggcgtgtcatttgcgaaaggcaacttgtctgctcgggcgatccattggtcttgcatacgagggaaagtgtatcaaagccaaaagctgtgaagatattcaatgcaccggcggcaaaaagtgtctgtgggatttcaaggtgggaagaggtagatgctcgctttgcgatgaactgtgccccgattctaagagcgatgagccagtttgtgcaagcgataacgcgacctacgcatcggaatgtgcaatgaaagaagcagcatgctcaagcggtgtgctgctggaggtgaagcatagcggatcatgtaacagcattagcgaggacacggaagaagaagaggaggatgaagatcaggattactcgttccctatctcgtccatattggaatgg

SEQ ID NO: 250106 - DNA, 1032 bp, synthetic construct
  misc_feature 1..1032: note = Description of Artificial Sequence: Synthetic coding sequence
  source 1..1032: mol_type = other DNA
atggtgcgagccaggcatcagccaggtggcttgtgcctgctgctcctgttactctgtcaattcatggaggataggagcgcacaggccggcaactgctggctgaggcaggccaaaaacggcaggtgccaagtcttgtataagacagaactctctaaagaagagtgctgtagcacaggcaggctctctactagctggaccgaggaagatgtcaacgataacaccctcttcaagtggatgatattcaatggtggagcccccaactgtatcccttgtaaagagacatgcgaaaacgtagattgcggcccaggcaaaaaatgtcgtatgaataagaaaaacaagccacggtgcgtgtgcgctcccgattgctctaatatcacttggaaaggaccggtgtgtgggcttgacggcaaaacctataggaacgagtgtgccctgctgaaggccagatgtaaggagcaaccagaactggaggttcagtatcaggggagatgcaagaaaacttgtcgtgatgtcttctgtcctgggagttcaacctgcgttgtggaccaaacaaacaatgcatactgtgtgacctgcaaccggatatgtccagagccagcctcctctgagcaatacctctgtggtaacgatggcgtcacatactcgtccgcctgtcatctaaggaaggctacttgtctgttagggagaagtataggcttggcgtatgaggggaagtgtatcaaagctaaatcttgtgaggacattcaatgcacaggcgggaagaaatgtctatgggatttcaaagtggggagaggacgatgtagtctctgcgacgaactgtgtccggactcgaaatctgacgagcccgtgtgtgcctcagacaacgccacttatgcctccgagtgcgcgatgaaagaggcggcctgcagttctggagtgctcctcgaagtaaaacactctggttcctgcaactcgatctcagaagacaccgaggaggaagaagaggatgaagaccaggactattctttccccatctcgtcgatcctggaatgg

SEQ ID NO: 250107 - DNA, 1032 bp, synthetic construct; identical to SEQ ID NO: 250082
  misc_feature 1..1032: note = Description of Artificial Sequence: Synthetic coding sequence
  source 1..1032: mol_type = other DNA

SEQ ID NO: 250108 - DNA, 1032 bp, synthetic construct
  misc_feature 1..1032: note = Description of Artificial Sequence: Synthetic coding sequence
  source 1..1032: mol_type = other DNA
atggtgcgcgctcggcaccagccgggcggcctgtgtctgctgctcttgctcctgtgccaattcatggaggaccggtcggcacaagcagggaactgttggctgcggcaggccaaaaacggacgatgccaggtgctgtacaagactgaactgtccaaagaagaatgctgcagcaccggtcggctctctacctcctggaccgaggaagatgtgaacgacaataccctgtttaagtggatgattttcaatggaggggccccaaactgcatcccttgcaaggaaacgtgcgaaaacgtcgactgcggaccgggaaagaagtgcaggatgaacaagaagaataagccgcgctgtgtgtgcgcgcccgactgctccaatatcacttggaagggaccggtctgcgggctcgacggaaagacctaccgaaatgagtgcgccctgctgaaggcccgctgcaaggagcaacctgaattggaggtccaataccagggacggtgcaagaaaacttgtagagatgtgttctgtccaggctcatcgacttgcgtggtggatcagactaacaacgcatactgcgtgacttgcaacagaatctgcccggaaccagcttcatccgaacagtacctgtgcggcaacgacggagtgacctattcatcggcctgtcatcttcgcaaggccacttgcttgctgggacggtccatcggactggcctacgaaggcaagtgcatcaaagccaagtcgtgcgaagatatccagtgcaccggaggcaagaagtgcctgtgggatttcaaagtggggcgcggcagatgctccctctgtgacgaactttgcccagattccaaaagcgacgagccggtctgcgcgtcggacaatgctacttacgcctccgaatgtgcgatgaaggaggccgcatgttcgagcggggtgctgctggaagtgaagcacagcggctcatgcaattccatctcggaagataccgaagaggaggaagaggatgaagatcaggattactcattcccgatttcgtccatcctcgaatgg

SEQ ID NO: 250109 - DNA, 1032 bp, synthetic construct
  misc_feature 1..1032: note = Description of Artificial Sequence: Synthetic coding sequence
  source 1..1032: mol_type = other DNA
atggtgagagctcgacaccagcccgggggactttgccttttgctcctcctgctctgtcagttcatggaagaccggtctgcccaggcagggaattgctggctgagacaggctaaaaatggaaggtgtcaggttctctataaaactgaactgtcaaaagaagaatgctgctccactggaaggctttcaacttcctggacagaggaagatgtgaacgacaacacattatttaagtggatgatcttcaatggaggggctcccaactgcataccctgcaaagagacatgcgagaacgtggattgtggacctggaaaaaaatgccggatgaataaaaaaaataaaccccgatgcgtatgtgctcccgattgctcgaatattacttggaaagggcccgtttgcgggctcgatgggaaaacttatagaaatgaatgtgccctattgaaggccagatgcaaggaacagcccgaactggaggtccagtatcaggggcgatgtaaaaaaacttgtcgggatgtgttttgtcccgggtcttctacatgcgtagtggatcagactaacaatgcttactgtgttacatgtaaccgcatctgccccgagccagccagtagtgaacagtatctgtgtgggaacgatggagttacttactcttctgcctgtcaccttcgaaaggctacttgtctcctggggcggtctataggactagcctatgaggggaaatgtataaaagctaaatcttgtgaggatattcagtgcacaggggggaaaaaatgcctttgggactttaaagtaggaagaggacggtgttcattgtgcgacgagctatgccccgatagtaaatctgatgagcccgtctgtgcatcggataacgcaacatatgcctcagaatgtgctatgaaagaagctgcatgcagtagtggagtccttttagaagtgaaacattctggatcctgcaattccatctctgaagatacagaagaagaggaagaagatgaagatcaggactattcttttcctataagttcaatactagagtgg

SEQ ID NO: 250110 - DNA, 1032 bp, synthetic construct
  misc_feature 1..1032: note = Description of Artificial Sequence: Synthetic coding sequence
  source 1..1032: mol_type = other DNA
atggtgcgggctaggcatcaacccggagggctctgcctcttgcttctgttactgtgccagttcatggaagaccggagcgctcaggcggggaactgttggctgagacaggcaaaaaatggaagatgccaagtgctgtacaaaaccgagctttctaaggaggagtgctgcagtaccgggagattgagcactagctggactgaggaggacgtcaatgacaacactctgttcaaatggatgatcttcaatgggggtgcaccaaattgtattccatgcaaagagacttgtgagaatgtagattgtggacctggtaagaagtgtcggatgaacaagaagaacaaacctagatgcgtctgcgcccctgattgttctaatatcacatggaaagggccagtctgtgggctcgatgggaaaacctataggaacgagtgtgccttgctgaaagcgcgctgcaaagagcaaccggaactggaagttcagtaccaggggaggtgcaaaaagacctgccgggacgtgttttgtccagggagctccacatgtgtggtggatcagacgaataacgcgtactgtgtaacatgtaatcgaatatgccccgagcctgcttcctcggaacagtacctctgtgggaacgacggcgtcacatatagctccgcatgccatctgcggaaggcaacatgtctcttaggtagatctattggactggcctatgaaggcaaatgtattaaggccaaaagctgtgaagatatccagtgcactggtggcaagaagtgtctgtgggacttcaaggtgggccgcgggcggtgcagcctgtgtgacgagctgtgtcccgactcaaagtcggacgaaccggtctgtgcgtcagacaatgcgacgtacgctagtgaatgtgctatgaaagaagctgcttgctcgtctggggttttgctagaggtgaaacattctggatcctgtaattcaatctcggaagataccgaggaggaggaggaggacgaggatcaagattactcgtttccaatctcaagcattctggagtgg

SEQ ID NO: 250111 - DNA, 1032 bp, synthetic construct
  misc_feature 1..1032: note = Description of Artificial Sequence: Synthetic coding sequence
  source 1..1032: mol_type = other DNA
atggtgcgtgccaggcatcagccaggcggcttgtgtctccttctgctcctgctctgtcaattcatggaagatcgatcggcgcaagctggtaactgttggctcagacaggcgaagaacggacgctgtcaggtcctctacaagactgaactgtcgaaggaggaatgttgtagcaccggacgcctttccacctcctggaccgaagaggatgtgaatgataatacccttttcaagtggatgatctttaacggcggagcacctaactgtattccttgcaaagaaacttgcgaaaacgtggactgtggaccaggtaagaagtgtcgcatgaacaagaagaataagccacgatgtgtgtgcgcacctgactgctccaacattacctggaagggtcctgtgtgtggattggatggcaagacgtacagaaatgaatgtgcacttctgaaagcacgttgtaaggaacagccggaactggaagtgcaatatcaagggagatgtaaaaagacctgcagagatgtgttctgccctggttcatcgacttgtgtcgtcgaccagacgaataacgcatactgcgtgacttgcaaccggatctgcccagagccagcatcgagcgagcaatatctgtgtggaaacgacggagtcacttactcctcagcttgtcatctgcgaaaggccacttgtctcttgggccggtcgatcggcttggcgtacgaggggaaatgcatcaaagccaagagctgtgaggatatccagtgcaccggaggaaagaagtgtctgtgggatttcaaggtgggtagaggacgctgttctctgtgcgacgaactttgtcctgacagcaagtcggatgaacccgtgtgtgcgtcggacaatgcgacttacgccagcgaatgtgccatgaaagaggccgcttgcagctccggcgtgcttctcgaagtcaagcattcggggtcgtgcaattccatctccgaagataccgaagaagaggaggaggatgaagatcaagactactcattcccaatctcatccatcttggagtgg

SEQ ID NO: 250112 - DNA, 1032 bp, synthetic construct
  misc_feature 1..1032: note = Description of Artificial Sequence: Synthetic coding sequence
  source 1..1032: mol_type = other DNA
atggtgcgagcaaggcaccagcccggcggtctctgcctgttactgctgctgctgtgccagtttatggaagaccggagcgcccaggccggaaattgctggctgaggcaggccaaaaacggacggtgccaggtgctgtacaagacagagctgtctaaggaagagtgttgcagtaccggacgcctgtctacaagctggaccgaggaagacgtcaatgataatactctgttcaagtggatgatcttcaacggcggcgctccaaactgcatcccatgtaaggagacatgcgagaacgtggactgtggtccaggcaagaagtgcaggatgaacaagaaaaacaaacctaggtgcgtgtgtgctccagattgctctaatatcacttggaagggcccagtgtgtggcctggatggtaaaacatatcgcaacgaatgcgcattgttgaaggctcgttgcaaggagcagcccgagctggaggtgcagtatcagggccggtgcaagaagacctgtcgcgatgtgttctgcccagggtcctccacttgcgttgtcgaccaaacaaacaatgcctactgcgtgacttgtaatagaatctgccctgaaccagctagctctgagcaatacttatgcggtaacgacggcgtgacttatagcagtgcctgtcatctgaggaaggcaacttgcctgctcggtaggtctattgggctcgcttatgaaggcaaatgtatcaaggctaagtcttgcgaagacattcagtgcaccggcggtaaaaagtgtctgtgggattttaaagtcggcagaggacgatgctcactttgtgatgaattgtgtcccgacagtaaatctgacgagcccgtatgcgctagcgacaacgctacatatgcaagcgagtgtgccatgaaggaagctgcatgcagtagcggggtcttgctggaggtgaagcattctggttcctgtaactccatctccgaagatacagaggaggaagaagaggatgaggatcaagattactcatttccaatttcaagtattctggaatgg

SEQ ID NO: 250113 - DNA, 1032 bp, synthetic construct
  misc_feature 1..1032: note = Description of Artificial Sequence: Synthetic coding sequence
  source 1..1032: mol_type = other DNA
atggttagggcaagacaccaaccaggtggtttatgtcttttacttttacttttatgccaattcatggaagatagatcagctcaggcaggtaattgttggcttagacaagcaaaaaacggacgttgtcaagtgctttacaaaacagaattgtcaaaggaagaatgttgtagtactggtagactttcaactagttggactgaagaagatgttaatgataatactttgtttaaatggatgattttcaatggaggagcaccaaattgtattccatgtaaggaaacatgtgagaatgttgattgtggtccaggtaaaaaatgtagaatgaataagaaaaataaaccacgatgtgtatgtgcaccagattgttcaaatattacttggaaaggaccagtatgtggattagatggaaaaacatatagaaatgagtgtgcattattaaaggctagatgcaaagaacaaccagaattagaagtccaatatcaaggaagatgtaagaaaacttgtagagatgttttttgtccaggatcatctacatgtgttgttgatcaaaccaataatgcttattgtgtaacatgtaatagaatttgtccagaacctgcttcatctgaacaatatttatgtggaaatgatggagttacatattcatctgcttgtcaccttagaaaagctacttgtttacttggtagatcaattggacttgcatatgaaggtaagtgtataaaagctaaatcttgtgaagatattcaatgtacaggtggaaagaaatgtttatgggattttaaggttgggagaggaagatgctcactttgtgatgaattatgtccagattctaagtcagatgaaccagtttgtgcttctgataatgctacatatgcctcagaatgtgcaatgaaagaagcagcatgttcttcaggagttttattagaggttaaacattcaggttcttgtaattcaatttctgaagatacagaagaagaagaagaagatgaagatcaagattattcatttccaatatcttctattttagagtgg

SEQ ID NO: 250114 - DNA, 1032 bp, synthetic construct
  misc_feature 1..1032: note = Description of Artificial Sequence: Synthetic coding sequence
  source 1..1032: mol_type = other DNA
atggttcgcgcacgtcaccaaccgggggggctttgtctgcttttacttctcctgtgccagttcatggaggacaggtctgctcaggcaggaaattgctggctcaggcaggccaagaatggacgttgtcaggtcctgtacaaaacagagctgagcaaggaagaatgctgctctacaggtcggctgagcacgtcgtggaccgaggaggacgtcaatgataacacactatttaaatggatgatcttcaatggtggggcccccaattgtattccatgtaaggaaacttgcgagaatgtggactgtggcccaggaaaaaagtgccgcatgaacaaaaaaaataagcctcgctgcgtgtgcgctcctgattgttccaacatcacatggaaaggaccagtgtgtggactggacggcaagacctatcgcaacgaatgcgcactcctcaaagcccgttgtaaggaacagcccgagttggaagttcagtaccaggggcgatgcaagaagacctgccgggatgtgttttgtccagggagctccacttgtgtggtggatcagacaaataatgcatactgcgtgacttgcaatcggatctgccccgaacctgcctcctccgagcagtatctatgtgggaatgatggagttacctattcctcggcatgtcatctgcgaaaagcgacctgtctccttggacggtccataggcttggcttatgagggaaaatgcataaaggcaaaatcttgtgaggacatacaatgcacgggtggaaaaaaatgcttatgggacttcaaggtcggtcgcggccgatgcagcctctgcgatgagctctgtccagattccaagtccgatgaacctgtatgcgccagcgataacgcaacctacgcttccgaatgcgccatgaaagaggcagcatgtagttctggcgtgctgttagaggttaaacattcaggttcctgcaatagcatatccgaagataccgaggaggaagaagaggatgaagatcaggactattccttcccaatcagctctattttagaatgg

SEQ ID NO: 250115 - DNA, 1032 bp, synthetic construct
  misc_feature 1..1032: note = Description of Artificial Sequence: Synthetic coding sequence
  source 1..1032: mol_type = other DNA
atggtgagagcacgccatcaaccgggtggtctttgccttctgttgcttctgctgtgccagtttatggaagatagatcagcacaagccggcaactgctggctgcgccaagcgaaaaacggcagatgccaagtgctgtataagaccgagctttccaaagaggaatgctgctcaaccggacggctctccaccagctggactgaagaagatgtgaacgacaataccctctttaagtggatgattttcaatggcggggcacctaactgtatcccttgtaaagaaacctgtgaaaatgtggattgtgggccagggaagaagtgtcgcatgaataagaaaaacaagccacgatgtgtgtgcgcgcctgattgttcgaacattacgtggaagggaccagtgtgcggactggatggaaaaacttacaggaacgagtgtgctcttctgaaagcaagatgtaaggagcaacctgaactcgaagtccagtaccagggaagatgtaaaaagacttgtcgtgatgtgttctgtcccggctcctcgacgtgtgtggtggaccagaccaacaatgcctactgtgtgacttgtaacaggatatgcccggaacccgccagcagcgagcagtacctgtgtgggaatgatggcgttacctactcatcagcatgtcatctgaggaaggctacttgtctgcttgggaggtccatcggacttgcgtacgaagggaaatgtatcaaagcaaagtcatgcgaggatattcagtgtaccgggggcaaaaagtgtctttgggactttaaggtgggtagaggaagatgttccctgtgtgacgaactttgccctgatagcaaatccgacgagcctgtgtgtgcatcagacaatgccacctacgcatccgaatgtgcgatgaaggaagcagcatgctcctcaggcgtgcttctggaagtcaagcactcaggttcatgcaactcaatctcagaggatacggaagaggaagaagaggacgaagatcaagattacagctttcccatctcgtccatcctcgaatgg

SEQ ID NO: 250116 - DNA, 1032 bp, synthetic construct
  misc_feature 1..1032: note = Description of Artificial Sequence: Synthetic coding sequence
  source 1..1032: mol_type = other DNA
atggtacgcgcgcggcaccagccggggggcttgtgcctgttgttgctcctcctgtgccagttcatggaggaccgaagcgcgcaggccggcaactgctggcttagacaagcgaagaacggacgctgtcaagtgctgtacaagaccgaactgtcaaaggaagagtgctgctccactggacggctttctacttcctggaccgaagaagatgtcaacgacaacactctcttcaagtggatgatctttaatgggggagcaccgaattgcatcccttgcaaggagacgtgtgagaacgtggactgcggccctggtaagaagtgtcgcatgaacaagaaaaacaagccgcggtgtgtgtgcgcaccggattgtagcaacattacgtggaagggcccggtctgcggcctggacgggaaaacctaccgcaacgaatgtgcccttcttaaagctcgctgtaaggaacagcctgaactcgaagtgcaataccagggacgatgtaaaaagacctgccgggacgtgttctgccccggctccagcacgtgtgtggtggaccagaccaataatgcctactgtgtaacttgtaacagaatctgccctgagccggcatcctccgagcagtatctctgtggtaatgatggggtcacttactcatcggcctgccatctgagaaaggctacctgcttgctcggaaggtcgattggactggcttacgaaggaaagtgcatcaaagccaaatcgtgcgaggatatccagtgcaccggaggtaagaaatgcctctgggacttcaaggttggacgcggaaggtgctctctgtgcgacgagctgtgccctgattcaaaatcggatgagccagtctgcgcatcggacaacgccacttacgcctcagaatgtgccatgaaagaagcggcgtgttcctcgggtgtcctcctcgaggtgaaacacagcggctcatgtaactcgatcagcgaagatactgaagaggaagaagaggacgaggatcaagactacagctttcccatatcatccatcctggagtgg

SEQ ID NO: 250117 - DNA, 1032 bp, synthetic construct
  misc_feature 1..1032: note = Description of Artificial Sequence: Synthetic coding sequence
  source 1..1032: mol_type = other DNA
atggtgcgggctagacatcaaccaggtgggctatgtctcctgctgctgctattgtgccagtttatggaagaccgatctgctcaagcagggaactgttggctaaggcaggccaagaacggcagatgccaagtgctttacaaaacagagctatccaaagaagagtgttgttctactggccgcctgagtacttcctggactgaagaagacgttaacgataacacactctttaagtggatgatctttaacgggggcgctcccaattgtatcccttgtaaagagacctgcgagaatgtagactgcgggccaggtaaaaagtgccgcatgaacaagaagaacaaacccaggtgcgtatgtgctcccgattgtagtaacattacctggaaaggtcccgtgtgcggtctggacggtaagacctatagaaatgaatgtgctctgctgaaggctcgatgcaaagagcaaccagagttagaagtccagtaccaagggaggtgcaagaagacctgtagagatgttttttgtcccggttcatctacatgtgtggtcgaccagaccaacaatgcctattgcgtaacttgtaatcgcatttgcccagagcccgccagcagcgagcaatatctgtgtgggaacgatggcgtcacctactctagcgcttgccatctgaggaaagccacctgtctgctggggcgatctattggcttggcctatgagggaaagtgcattaaggcaaaatcttgcgaggacatccagtgcactggaggcaagaaatgtctgtgggatttcaaggtggggagagggcgatgttcattatgcgacgagctgtgtcctgatagtaagtctgacgaacctgtgtgtgccagcgataacgccacctacgcctctgagtgcgcaatgaaagaagctgcctgctcctctggggtattactcgaggttaagcattccggctcatgcaactccattagtgaagacaccgaagaggaggaggaggatgaggaccaggattactcctttccaatctcttcaattctggaatgg

SEQ ID NO: 250118 - DNA, 1032 bp, synthetic construct
  misc_feature 1..1032: note = Description of Artificial Sequence: Synthetic coding sequence
  source 1..1032: mol_type = other DNA
atggttcgcgcgagacatcagccaggtggactgtgtctgctcttgctacttctttgtcagttcatggaggatagatccgctcaggccggtaattgctggctgcgccaagcaaaaaacggtaggtgccaggttctgtataaaactgaactatctaaagaggaatgttgtagtacaggtagacttagcacctcctggactgaggaggacgttaatgacaataccttatttaagtggatgattttcaatggaggtgccccaaactgcatcccttgcaaggaaacttgtgagaatgtggattgcggccccgggaagaaatgtagaatgaacaagaaaaataaacctaggtgcgtgtgtgcgcctgattgctcgaacattacatggaaggggccagtctgcggtttagatgggaaaacttatagaaacgagtgtgcactgctgaaggcccggtgcaaggagcagccagaattggaggtgcagtatcaggggcgctgtaagaagacctgtcgggacgtcttctgcccaggcagctctacctgcgtggttgatcaaaccaataatgcctattgtgtgacctgcaatcgaatttgccccgaacctgcaagcagtgaacagtacctctgcggcaatgacggcgtgacttatagttctgcctgccacctcagaaaggctacctgtctgctgggtagatcgatcggccttgcttatgagggtaagtgtattaaagctaagagctgtgaggacattcagtgtacaggagggaagaaatgtctgtgggactttaaagtcggacgcggcagatgttcactgtgcgatgagctttgccctgactctaagtctgatgagccggtatgtgcatctgataacgccacgtacgcttcggagtgcgccatgaaggaggccgcttgctccagcggtgtcctgctggaggtgaaacactcaggtagttgcaatagtattagcgaggacacagaagaagaggaggaggacgaggaccaggattactcttttcctatctcctccatactcgagtgg

SEQ ID NO: 250119 - DNA, 1032 bp, synthetic construct
  misc_feature 1..1032: note = Description of Artificial Sequence: Synthetic coding sequence
  source 1..1032: mol_type = other DNA
atggtgcgcgcgcgccatcagccaggcggcttgtgcctgctccttctcctgttgtgccagttcatggaagataggagcgcccaagccggaaactgctggctccgccaggcaaaaaacggaagatgccaggtgctctacaagactgagttgagcaaggaagagtgctgttccaccggacggctctcgacgtcctggaccgaggaagatgtaaacgacaacactctgttcaagtggatgatctttaacggaggtgcaccgaactgcatcccgtgcaaggaaacctgcgagaatgtcgattgcggtccaggcaagaaatgccggatgaataagaagaataagccgcgctgcgtctgcgcccccgattgcagcaacatcacgtggaaaggccctgtttgtggcctcgacggaaagacttaccggaacgagtgcgcactgctgaaagcgcggtgcaaggagcaacccgagttggaagtccaataccagggacggtgcaaaaagacctgccgcgacgtcttttgccctgggtcgagcacctgcgtggtggaccagacgaacaatgcttattgtgtcacctgcaatagaatatgtccagagccagcttcctcagaacagtacctgtgcggcaacgacggggtgacttactcttccgcctgtcacctgagaaaggctacgtgtctgcttggacgctcgatcggtcttgcctacgaagggaaatgtatcaaggccaagtcatgcgaggacatccaatgcactggagggaaaaagtgtctgtgggacttcaaagtgggaagaggccggtgcagcctgtgcgacgagctgtgccctgactctaagagcgatgagccggtatgtgcgtcagataatgctacttacgcatcggaatgtgcgatgaaggaggccgcctgtagctcgggcgtgctgctcgaagtgaaacactcgggcagttgtaattccatctcagaagataccgaggaagaagaggaagatgaagatcaggactactcattcccgatctcgtcgattctggaatgg

SEQ ID NO: 250120 - DNA, 1032 bp, synthetic construct
  misc_feature 1..1032: note = Description of Artificial Sequence: Synthetic coding sequence
  source 1..1032: mol_type = other DNA
atggtccgagcgcgccaccagcctggtggcctttgccttcttcttctcctcctttgtcaattcatggaggacagatccgcacaagcaggaaattgctggctgaggcaagcaaagaatggacggtgtcaagtgttgtacaagaccgaactttcgaaggaagaatgctgttcgactggaaggctgtctacttcgtggaccgaagaggatgttaatgacaatacgctctttaagtggatgatctttaatggtggtgcacccaattgtattccttgtaaggaaacctgtgagaacgtcgattgtggacctgggaagaaatgcagaatgaacaagaaaaacaagccacgttgtgtctgcgcacccgattgtagcaacattacctggaagggtcctgtgtgtggactggatggcaagacttaccgcaacgaatgcgccctgctgaaggcccgctgtaaagaacaacccgagcttgaagtccaataccagggaagatgcaagaaaacttgcagagacgtgttttgtcccggatcatcaacctgcgttgtggatcagaccaataacgcgtactgtgtgacctgcaacaggatttgtccagaaccggcaagttcggaacagtacctgtgtggtaacgacggggttacctattcatctgcctgtcatctccggaaggctacttgcttgcttggacggagcattgggctcgcatacgagggaaaatgtatcaaggcaaaatcctgtgaagatattcagtgcaccggtggaaaaaagtgcctttgggatttcaaggtcggccgaggcagatgttcgctgtgtgatgaactgtgtcctgattctaagagcgacgagccggtttgcgcctccgacaacgcgacttacgcatcagaatgtgctatgaaagaagccgcttgttcgtccggagtgctcttggaggttaagcattcaggttcatgcaactccatctcagaagataccgaggaggaagaggaggacgaagatcaggattactcttttccgatctcctcaatactggaatgg

SEQ ID NO: 250121 - DNA, 1032 bp, synthetic construct
  misc_feature 1..1032: note = Description of Artificial Sequence: Synthetic coding sequence
  source 1..1032: mol_type = other DNA
atggtgcgcgcgaggcaccaaccaggtggcttatgcctgctgctgctgctgctctgtcagttcatggaggatcggagtgctcaggctggaaattgttggctgcgccaggctaaaaacgggcgatgccaggtgctgtataaaaccgaactgagcaaggaggaatgctgtagcacggggcgtttatctacctcctggaccgaggaggatgtgaacgacaacaccctgtttaagtggatgatttttaatgggggtgccccaaactgtatcccatgtaaagaaacatgcgagaacgtggattgcggtccgggtaaaaaatgccgaatgaacaagaaaaacaagccacgctgcgtttgcgctcccgattgcagtaacatcacgtggaagggtccagtttgcggcctggatggcaaaacgtaccgcaatgagtgcgcgttgttaaaagcccgatgtaaggaacaaccggaactggaagttcagtaccaaggacgctgcaaaaagacctgccgcgacgttttctgtccaggtagctctacgtgtgtggttgaccaaaccaataatgcatattgcgtcacgtgcaatcgaatttgccccgagccggcgtcgagcgagcaatacctttgcgggaatgatggcgtgacgtactctagtgcttgccacttaaggaaagcgacgtgcctcctgggtagaagcatcggcctggcctacgagggtaaatgtatcaaggccaagagctgtgaagacatccaatgcactggtggtaagaagtgcctgtgggattttaaagtcggtcgcggccgttgttccttgtgtgatgagctttgcccagattcgaagagcgatgagccggtatgcgcttccgataatgcgacgtatgcatctgagtgcgcgatgaaggaggctgcctgtagctcaggcgttctgctagaagtcaaacacagcggatcctgtaatagcattagcgaagatacggaggaggaggaagaagatgaggaccaagactacagcttccctatttccagcatcctagagtgg

SEQ ID NO: 250122 - DNA, 1032 bp, synthetic construct
  misc_feature 1..1032: note = Description of Artificial Sequence: Synthetic coding sequence
  source 1..1032: mol_type = other DNA
atggtgcgtgcccgccaccagccaggtggactgtgcctgctcctccttctcctctgccagttcatggaggatcgctcggcccaggcaggtaactgttggctccgtcaggctaagaacggccgctgccaggtcctctacaaaactgagctctccaaagaggagtgctgttcgaccggtcgattgagtaccagctggacggaggaggacgtgaacgataacaccctcttcaagtggatgatcttcaacggtggcgcgcccaattgtattccctgcaaggagacttgcgagaacgtggactgtggccctgggaagaagtgccgaatgaataagaagaacaagccacgctgcgtgtgcgctcctgattgcagcaatatcacatggaaggggcccgtctgtggactcgacgggaagacctatcgaaatgagtgtgcccttctaaaagcccgctgcaaggagcaaccggagttggaggtgcagtaccagggtcgatgtaaaaagacctgtcgtgatgtgttctgccccggatcctcgacctgtgttgtcgatcagaccaacaacgcctattgcgtcacttgcaaccgcatctgccctgagcctgcctcctctgagcagtacctgtgtggtaacgatggagtcacatacagtagcgcctgccatttgcgcaaggccacatgcctcctgggacgctccattggtctcgcatatgaaggcaagtgcattaaggccaagtcttgcgaagatatacagtgcaccggtggcaaaaagtgcctctgggatttcaaggttgggcgtggccgctgctctttgtgcgatgaactctgcccggattccaagagtgacgaacccgtatgtgcttctgacaacgctacgtacgcgtccgagtgtgccatgaaagaggctgcttgcagtagcggcgtccttctcgaggtgaagcactcgggttcgtgtaacagcatcagtgaggacacagaggaggaggaggaggatgaggaccaggactactctttccccatcagttccatcctcgagtgg

SEQ ID NO: 250123 - DNA, 1032 bp, synthetic construct
  misc_feature 1..1032: note = Description of Artificial Sequence: Synthetic coding sequence
  source 1..1032: mol_type = other DNA
atggtaagagctcgtcatcaaccaggtggactttgtcttctgcttctccttttatgccaatttatggaagaccgaagtgcacaggcaggaaactgctggctacggcaagctaaaaacggacgttgtcaggtgctctataagactgaattatctaaagaagaatgttgcagcacgggacggttgtcaacctcctggacagaagaagatgttaatgataatactcttttcaagtggatgattttcaatggaggggctccaaactgcataccatgtaaagaaacgtgtgaaaatgtcgattgcggtcccgggaaaaaatgccgtatgaataaaaaaaacaaaccccgatgtgtgtgtgcaccggattgctcaaatattacttggaaaggacccgtctgcggacttgatgggaagacatatagaaatgaatgtgcattactgaaggctaggtgcaaggaacaaccagagctcgaagtacaataccaaggaagatgtaaaaaaacatgtcgagatgttttctgcccaggatcctctacgtgtgtcgtcgatcaaacaaacaatgcttattgcgtgacttgtaaccgtatatgcccagaaccagcatcaagcgagcaatatttatgtggaaatgatggagtgacatattcttctgcttgtcatctccggaaggcaacttgtttattgggtagatctatcggactcgcatacgaaggaaagtgtattaaggctaaatcatgtgaagatatccaatgtacaggaggaaaaaaatgcttgtgggacttcaaggttgggagaggacggtgttcattgtgcgatgagctgtgtccagattcgaagagtgacgaacctgtttgtgcctcggataatgcaacatacgcatcggaatgtgctatgaaagaagctgcgtgctcaagtggcgtactcctagaggttaagcactccggatcctgcaactccatctcagaagatactgaagaggaggaagaagatgaggatcaagattactcatttcctattagtagcatcttagaatgg

SEQ ID NO: 250124 - DNA, 1032 bp, synthetic construct
  misc_feature 1..1032: note = Description of Artificial Sequence: Synthetic coding sequence
  source 1..1032: mol_type = other DNA
atggttcgggcgagacaccagcccgggggtctgtgcttactgcttcttctcttgtgccagttcatggaggacagatctgcacaggcaggaaattgttggctgcgccaagctaaaaatgggcgatgccaggtgctctacaagaccgaacttagtaaggaggagtgttgctccaccggaaggctgtccacgagttggaccgaagaagatgtgaacgataacacactgtttaagtggatgatcttcaatggaggcgccccaaactgcattccttgtaaggagacctgcgaaaacgtggattgtggacccggcaaaaagtgccgaatgaacaagaaaaataagccgagatgtgtgtgtgctcctgattgtagtaatattacctggaaggggcctgtgtgcggactcgacggtaagacctaccggaatgagtgcgccctgcttaaggctagatgtaaggaacagcctgaacttgaagtgcagtaccagggccgctgcaaaaagacctgtcgagatgtgttctgtccaggatcatcaacttgtgtggtggatcagactaataacgcatattgcgtcacttgcaatagaatttgccctgagcctgcctccagcgagcagtacttgtgtggtaatgatggcgtaacttatagctcagcctgtcacctgcgcaaagccacatgcctgttaggccggtccataggactcgcatatgaagggaaatgtataaaggccaagtcgtgcgaagacatccagtgcacaggaggtaaaaaatgcctttgggatttcaaggtcggtcgaggccggtgttccttatgcgatgagctctgccctgattcaaagagtgacgaacctgtgtgcgcttccgacaatgccacctatgcaagcgagtgtgcaatgaaagaagccgcttgctcatcgggggtgctgctcgaggtcaagcactcaggttcctgtaacagcatatccgaggacaccgaggaagaagaggaagatgaagatcaggattatagtttcccaatttcctccattttggaatgg

SEQ ID NO: 250125 - DNA, 1032 bp, synthetic construct
  misc_feature 1..1032: note = Description of Artificial Sequence: Synthetic coding sequence
  source 1..1032: mol_type = other DNA
atggtgcgtgcccggcaccagccgggtggcctgtgccttctgttgctgctcctgtgtcaattcatggaggaccgaagcgcacaagcggggaattgttggcttagacaggctaaaaacggaaggtgtcaggtgctttacaagaccgaactgtcaaaagaggagtgctgtagcaccggaaggttgtctacttcatggacagaggaggatgtgaacgacaatacgctgttcaaatggatgatcttcaacgggggagctcctaactgtatcccatgtaaggaaacatgcgagaatgttgactgcggacccggcaagaagtgtaggatgaacaagaagaataagcctcggtgcgtttgcgccccagactgctcaaacatcacttggaaaggccctgtatgcggtttagatgggaaaacatacaggaacgaatgcgccctcctcaaagcacgctgcaaagagcagcctgagctcgaagtgcagtatcagggtcgctgcaagaagacatgccgcgatgtgttctgccccggttcttccacctgcgtggtggaccaaaccaataatgcttactgcgtgacatgcaatcgaatttgccctgaacccgctagctctgagcagtacctttgcgggaacgacggagttacctacagcagcgcctgccacttgaggaaggcaacctgtctgctggggaggagtatcgggctggcatacgaaggaaagtgtatcaaagcaaagtcttgtgaggacatccagtgcacgggcggtaaaaaatgtctctgggatttcaaagtcggacgcgggagatgttccttgtgcgacgagctgtgtccagactcgaagtcagacgaacctgtttgcgcaagcgacaacgccacttatgcttccgagtgcgccatgaaagaggccgcatgctcatccggcgtattgcttgaggtcaagcattctggctcgtgtaattctattagtgaagataccgaggaggaagaggaggatgaggaccaggattactccttcccaatctcatctatcctagagtgg

SEQ ID NO: 250126 - DNA, 1032 bp, synthetic construct
  misc_feature 1..1032: note = Description of Artificial Sequence: Synthetic coding sequence
  source 1..1032: mol_type = other DNA
atggtgagagccaggcaccaacccggaggtctctgtctgctgctccttctcctttgccagtttatggaggatcgctctgcccaggccgggaactgctggctccggcaggcaaaaaatggcagatgtcaggtcctgtacaaaacggagctctctaaggaggaatgttgtagcacagggagattatctaccagctggactgaggaggacgtcaacgataatactctcttcaaatggatgattttcaacggcggagcacctaattgcataccttgtaaggagacatgcgagaatgtagattgtggtccaggtaaaaaatgtaggatgaataagaaaaacaagcccagatgtgtgtgcgcaccagattgcagtaatattacctggaaaggtcctgtgtgtgggctggatggaaagacatacaggaatgagtgcgccctgttgaaggcacgctgtaaagagcagcctgaacttgaggtgcagtaccaggggaggtgcaagaaaacctgtcgagatgtcttctgtccaggcagtagcacttgcgtggtggatcagacaaacaatgcctactgcgtgacctgtaatcggatctgcccggagcccgcaagttccgagcagtatttatgtgggaatgatggagtgacttacagctctgcctgccatctgcgcaaagcaacctgcctcctcggtcgaagtatcgggttggcctatgagggcaaatgcattaaagccaagagctgcgaggatatacagtgcactggagggaaaaagtgcctgtgggactttaaggtgggacgcggacgctgctctctgtgcgatgagctttgtcctgactctaagtcagatgaacctgtgtgtgcatccgacaatgcaacttacgccagtgagtgtgcaatgaaggaggccgcctgctcatcaggcgttctgctcgaggtcaagcattcaggatcctgtaacagtatctccgaggacaccgaggaagaggaggaagacgaggaccaggactactctttccccatctctagtattctagagtgg

SEQ ID NO: 250127 - DNA, 1032 bp, synthetic construct
  misc_feature 1..1032: note = Description of Artificial Sequence: Synthetic coding sequence
  source 1..1032: mol_type = other DNA
atggtgcgggcacggcatcaaccaggaggactatgcctcctgcttttacttttatgtcagtttatggaagatcgatcagctcaagctggaaactgctggttgcggcaagctaaaaacggtcgatgtcaagttctttataagaccgaattgagtaaagaggagtgttgcagcactggacgactttcgacttcttggactgaagaggatgtcaatgacaacacgttattcaagtggatgatttttaatggtggagctcctaactgcatcccgtgtaaagaaacttgtgagaatgtagattgcggaccgggaaaaaaatgtagaatgaacaaaaaaaataaaccaaggtgcgtctgcgcacctgattgctcaaatatcacttggaaaggcccagtctgcggattggatggtaaaacctaccgaaacgagtgcgctctcttgaaggcaagatgcaaagaacaacctgaattggaggttcagtatcagggccgatgcaagaaaacatgcagagacgtcttctgcccaggttcgtcaacatgcgttgtggaccagacaaataatgcttattgtgtgacttgtaaccgtatctgtccagagccagcctcaagtgagcagtacctatgtggaaatgacggagtgacttattcttcggcttgccaccttcgaaaggccacttgcctgctagggcgaagtataggccttgcatacgagggaaaatgcattaaagcgaaatcgtgtgaggatattcagtgtacgggcggaaagaaatgtctatgggattttaaggttggtagggggagatgttccttgtgtgacgaactgtgtccagactccaaaagtgatgaaccagtctgcgcatctgataatgccacctacgctagcgaatgtgctatgaaagaagcagcttgttcgagtggagtactactggaagtgaaacattcaggatcgtgtaacagtatatctgaagataccgaagaagaagaagaagatgaagatcaagattacagtttccccatttcttcgatactggagtgg

SEQ ID NO: 250128 - DNA, 1032 bp, synthetic construct
  misc_feature 1..1032: note = Description of Artificial Sequence: Synthetic coding sequence
  source 1..1032: mol_type = other DNA
atggtacgtgctcgccatcagccaggtgggctgtgcctgcttctcctactgttatgccaattcatggaggaccgctcagcccaggcgggtaattgttggctgcgacaggccaagaatggacgctgccaggtactgtacaagaccgaactcagcaaggaggaatgctgcagcaccggaagactcagcacaagttggacagaagaagatgtaaacgataatactttgtttaagtggatgatctttaatggcggcgctccgaactgtatcccttgcaaggaaacctgtgagaacgtggactgtgggcccggcaaaaagtgcaggatgaataaaaaaaataagcccaggtgcgtgtgcgctcctgactgctctaatatcacctggaaaggccccgtgtgtggcttggatggaaagacgtataggaacgagtgcgccctcctcaaagcacgctgcaaagagcagcccgagttggaggtgcagtatcagggcagatgcaaaaaaacctgtcgcgacgtcttttgtccagggagctcaacttgtgtggtggaccagactaataacgcttactgcgtaacatgcaacagaatatgcccggagccggcaagctctgagcagtacctttgtggaaacgatggcgtgacatatagttccgcttgccatttgcgaaaagcaacttgcctgttggggcggagcattggtctggcatatgaggggaagtgtattaaggctaagtcctgcgaagatatccaatgtactggaggaaagaaatgtttgtgggatttcaaagtgggcagaggacgctgtagcttgtgcgacgagctgtgcccagactctaaaagtgacgagccggtctgcgccagcgataatgctacctacgcctctgagtgtgccatgaaggaagccgcgtgctcgtctggagttcttttggaggtgaagcactccggaagctgcaactccattagtgaggacacagaggaggaggaggaagatgaggatcaagactatagctttcccatttcctccatactcgagtgg

SEQ ID NO: 250129 - DNA, 1032 bp, synthetic construct
  misc_feature 1..1032: note = Description of Artificial Sequence: Synthetic coding sequence
  source 1..1032: mol_type = other DNA
atggtgagggcgcgccaccaaccgggcggactgtgcctcctgctgctgttgctctgtcagtttatggaagataggtcagcacaggcagggaattgttggcttcggcaggcgaaaaacggacgctgtcaagttctgtacaagaccgaattgtccaaagaggaatgttgtagcacgggacgactcagcacgtcatggactgaagaagatgtgaacgacaacaccctgttcaaatggatgatcttcaacggtggagcgccgaactgcatcccctgcaaggaaacttgcgaaaatgtggactgcgggccgggcaagaagtgccgcatgaacaagaagaacaaaccacgctgcgtctgtgctccggactgctccaacatcacttggaagggacctgtgtgcggcctggacggaaagacctaccgcaatgaatgcgctctgctcaaggcacggtgtaaggagcagccggagttggaggtccagtaccaaggacgctgtaagaaaacctgccgtgacgtcttttgcccgggcagctcaacctgcgtcgtggatcagaccaacaatgcttactgtgtcacttgcaacagaatctgtcccgagcccgctagctcggaacagtacctgtgtggcaacgacggagtcacctatagctcggcctgccacctgcggaaagccacctgcctgcttggaagaagcatcggacttgcctacgagggtaagtgcatcaaggccaaatcatgcgaggacatccagtgcaccggcggcaagaaatgcctgtgggatttcaaggtcggacgtgggcgctgcagtctgtgcgatgaactctgccccgatagcaagagcgatgaaccagtctgcgcctcggacaatgcaacttacgcgtccgaatgtgccatgaaagaggccgcatgctcgtctggcgttctgcttgaggtgaaacacagcggatcatgtaattcgattagcgaggatactgaagaagaagaggaggatgaggaccaggattactcgttccccattagctccatcctcgaatgg

SEQ ID NO: 250130 - DNA, 1032 bp, synthetic construct
  misc_feature 1..1032: note = Description of Artificial Sequence: Synthetic coding sequence
  source 1..1032: mol_type = other DNA
atggtgcgcgcccgacatcagcccggaggcctgtgtttgctgttgctgctcctctgtcaatttatggaagatagaagcgcccaggccggcaactgctggctccggcaggccaaaaacgggagatgccaggtgctgtacaaaacagagctgtctaaggaggaatgctgctcaaccggcaggttatctactagctggacagaggaagacgtgaacgacaacaccctgttcaaatggatgatcttcaacggaggcgcccccaactgcattccctgcaaggaaacgtgcgagaatgtggattgcggtccagggaagaagtgccggatgaacaaaaagaacaagccgcggtgcgtgtgcgcacctgactgttccaatattacgtggaagggtcctgtgtgcggtttggatgggaaaacctacaggaatgagtgcgctctgcttaaggcacgatgcaaagagcagccggaactggaagttcagtatcaaggcagatgcaaaaagacctgccgcgacgttttttgcccaggatcctcaacctgtgtggtggatcaaactaataacgcctattgcgtgacttgcaatcggatatgccctgagcccgctagctccgagcagtacctgtgcgggaacgacggcgtgacctattcatccgcttgccacttgcgcaaggcgacatgtttgttgggccgctccatcggactggcttacgagggtaaatgcatcaaagccaagtcttgcgaagacatccagtgcacgggtgggaaaaagtgcctgtgggacttcaaggtggggcgcgggagatgctcactctgtgacgagctctgccctgacagcaagagcgacgagccggtatgcgctagtgacaacgcaacgtatgcaagcgagtgtgccatgaaggaggctgcctgcagttccggcgtgctgctcgaagtgaagcacagtgggagttgtaatagtattagcgaggacactgaggaggaggaggaggatgaagatcaggactacagcttcccaatcagctcaatcctggagtgg

SEQ ID NO: 250131 - DNA, 1032 bp, synthetic construct
  misc_feature 1..1032: note = Description of Artificial Sequence: Synthetic coding sequence
  source 1..1032: mol_type = other DNA
atggtccgcgccagacaccaaccgggaggcttgtgcctgttgctcctgctgttgtgtcagtttatggaagatcggtccgctcaggcgggaaattgttggttgaggcaggcaaagaatgggagatgccaagtcctgtacaaaactgaactgtcgaaggaggaatgttgctcgactggaaggctgagcacctcctggactgaggaggacgtgaatgataacaccctgtttaagtggatgatcttcaacggaggcgctccgaactgcatcccttgcaaggaaacttgcgaaaacgtggactgcgggcctggcaagaagtgccggatgaacaagaaaaacaagccgcgctgcgtctgcgccccggattgttcaaacatcacttggaagggtcccgtgtgtggattggatggaaagacgtacagaaacgagtgtgctctgctgaaggcacggtgcaaggaacagccagaacttgaggtgcaataccagggacggtgcaaaaagacctgccgcgacgtcttttgcccgggcagctcaacttgtgtggttgatcagacgaataatgcgtattgcgtcacttgcaaccggatctgtccagagccagcttcctcagagcagtacttgtgcggaaatgacggagtgacctactcctccgcatgccacctccgcaaggccacctgcctgctggggaggtcgatagggctcgcatatgagggaaagtgtatcaaagcgaagagctgcgaggacatccaatgtactggaggaaaaaagtgcctttgggatttcaaggtgggacgaggtcgctgctcgctttgtgacgagctctgcccagactctaagtccgacgaaccggtttgcgccagcgacaacgcgacttatgccagcgagtgcgcgatgaaggaggctgcctgcagctcgggcgtgctgctggaagtgaaacattctggttcctgcaattcgatctcggaggacaccgaggaagaagaagaagatgaagatcaggactactcgttccctatcagctctatcctggaatgg

SEQ ID NO: 250132 - DNA, 1032 bp, synthetic construct
  misc_feature 1..1032: note = Description of Artificial Sequence: Synthetic coding sequence
  source 1..1032: mol_type = other DNA
atggtgagggccaggcatcagccaggggggctgtgcctgctgctgttattactctgtcaattcatggaggatcggtcagctcaggccggcaactgctggctccggcaggcaaagaatggcagatgccaagtcttgtataagacagagttgtccaaggaggagtgctgtagtactggtcgcctgagtacttcctggactgaggaggacgttaatgataataccctttttaagtggatgattttcaatgggggcgcccccaactgtatcccttgcaaagaaacttgcgagaacgtggattgtggacccgggaagaaatgtcggatgaataagaagaataagccacggtgcgtgtgcgctcccgactgctcaaacattacatggaagggcccagtctgcggactggacgggaagacctaccgcaacgagtgcgcattacttaaagcacgttgcaaagagcagcctgagctagaggtgcaataccagggtaggtgcaagaagacctgcagagatgtcttttgccctggctctagtacgtgtgtcgtagatcagacaaataatgcctattgtgtcacatgtaaccgcatttgccctgagcctgcgtcttctgagcaatacttatgcggaaacgacggcgtaacttactcttcggcatgccatctgagaaaggccacatgcctgctgggtcggagtatcggtcttgcgtacgaggggaaatgtataaaggccaagagctgcgaagatatacagtgcacagggggcaagaagtgcttatgggatttcaaggtgggtcgcggccgatgttccctctgcgatgagctgtgccctgatagcaagtctgacgagccggtctgcgcctcagataatgcaacatacgcctccgagtgtgctatgaaggaggcggcttgctcatccggcgtactgctcgaagtcaagcacagtggaagctgcaacagtatatccgaagacacagaagaggaggaggaggacgaagatcaggactacagttttccgatttcctctatcctcgagtgg

SEQ ID NO: 250133 - DNA, 1032 bp, synthetic construct
  misc_feature 1..1032: note = Description of Artificial Sequence: Synthetic coding sequence
  source 1..1032: mol_type = other DNA
atggtgcgcgctcgccaccaaccaggcgggctttgcctgttgttgctcttgctgtgccagttcatggaggacagatcggcacaagctggaaattgctggctgcgacaagccaagaacggtcgctgtcaagtgctgtacaagactgagttgagcaaagaggaatgttgctccactggaaggctgtcgacgagctggaccgaagaggatgtgaacgacaacacgctgttcaagtggatgattttcaacggtggggcacccaactgcatcccatgtaaggagacgtgcgagaatgtggattgcggaccgggaaagaagtgccgtatgaacaagaagaataagccgaggtgcgtgtgcgccccagactgctccaacattacctggaaaggtcccgtgtgcggactggacgggaaaacctaccgcaatgaatgcgcgctcctcaaagcacgctgtaaggaacagccggaattggaagtgcagtatcaggggcggtgtaaaaagacctgtcgggacgtgttctgcccaggatcgtcgacctgtgtggtggaccaaactaacaacgcctactgcgtgacctgcaacagaatctgccccgagcctgccagctcggagcagtacttgtgcggaaatgatggagtgacgtattcctcggcttgccatctgcggaaggccacttgtctcctggggcggtccatcgggctggcctacgagggtaagtgcattaaagcgaaatcatgtgaagatattcagtgcacgggcgggaagaagtgcctctgggacttcaaggtgggacggggccggtgttcactctgcgacgagttgtgcccggattcgaagtctgatgaacctgtgtgcgcgtccgataacgccacttacgccagcgaatgtgcgatgaaggaggcagcctgcagctcaggcgtgctcctcgaagtcaagcacagcggctcatgtaactccatctcggaggacactgaagaagaagaagaggatgaggaccaggattacagctttccgatctcatccatcctcgaatgg

SEQ ID NO: 250134 - DNA, 1032 bp, synthetic construct
  misc_feature 1..1032: note = Description of Artificial Sequence: Synthetic coding sequence
  source 1..1032: mol_type = other DNA
atggtccgggcaaggcaccaacccgggggcctctgcctgctactgctgttactttgtcagttcatggaagacagatccgcgcaagcggggaactgttggctgcggcaagccaaaaacgggaggtgccaggtgctctacaagaccgaactatctaaagaggaatgctgctccacgggtcgactatccacatcttggaccgaggaagatgtgaacgacaacaccctgtttaaatggatgatattcaatggcggtgccccgaactgtataccatgtaaagagacctgcgagaacgtagattgtggcccaggaaagaaatgccgcatgaataagaaaaacaagccccgctgcgtgtgcgccccagactgtagtaatattacgtggaagggacccgtgtgcggactggacgggaaaacttacagaaatgaatgtgccttactaaaagctaggtgtaaagagcaaccagaactggaagttcaataccagggtcggtgtaaaaagacatgcagagacgttttctgccctggctcgagcacgtgtgtggtcgatcagactaacaatgcctactgcgtcacatgcaatcggatttgccccgagcccgcctcgagtgagcagtacctgtgtggaaacgatggtgtgacttacagcagcgcgtgtcatcttagaaaagcaacatgcttattgggtcgcagtatcggactcgcctatgaggggaaatgcattaaggccaaatcctgtgaggacatacaatgcaccggtgggaagaagtgtctgtgggacttcaaggttggtaggggcagatgctccctgtgcgacgagttatgccctgatagcaagtctgacgagcccgtctgcgccagtgataatgccacctatgcctccgaatgcgcgatgaaagaggcagcctgcagttctggggtgctactcgaggtgaaacatagcgggagctgcaactctatctctgaggacacagaggaagaagaggaagatgaggatcaggactactccttccccatctcctccatcctcgagtgg

SEQ ID NO: 250135 - DNA, 1032 bp, synthetic construct
  misc_feature 1..1032: note = Description of Artificial Sequence: Synthetic coding sequence
  source 1..1032: mol_type = other DNA
atggttcgcgcaagacatcaaccgggcggattgtgcttattattgctgcttctgtgtcaatttatggaagaccgctcagcacaagccggcaattgttggctccgccaggctaaaaacggccggtgccaggttttgtacaaaactgaattaagcaaagaagaatgttgcagcactgggcggttatctacgtcttggacggaagaagacgtgaacgacaataccctgttcaagtggatgatctttaacggcggcgcgccaaactgtattccatgcaaggaaacgtgcgaaaacgttgattgcggcccgggcaaaaagtgccggatgaataaaaagaataagcctcgctgcgtttgtgcaccggactgcagcaacattacgtggaaggggcccgtgtgcggtctggatggtaaaacataccgcaacgagtgcgccctccttaaggccaggtgtaaagagcagccggaactggaagtacaatatcagggtcgctgcaaaaagacatgccgggatgtgttttgcccaggaagctcgacatgtgtcgtggatcaaacaaataatgcctactgtgtcacctgtaaccggatttgtccggaaccggcatcatctgagcagtacctgtgtggtaatgatggggttacttactcttcagcgtgtcatctccggaaagccacatgtcttctgggaaggagcataggactggcctatgaaggcaaatgcatcaaagcaaaatcatgcgaagatatccagtgcacaggtggcaaaaaatgcttatgggactttaaagtggggagaggcagatgttccctgtgcgatgaactatgcccggattcaaaaagtgatgaacctgtctgtgcttccgataatgctacatatgcctccgaatgtgctatgaaagaggcagcttgttcaagcggggttttgctggaggttaaacattcaggaagctgtaactcaatttctgaagacacagaggaagaagaagaagatgaagatcaggattattcctttcctatttcaagtattctggagtgg

SEQ ID NO: 250136 - DNA, 1032 bp, synthetic construct
  misc_feature 1..1032: note = Description of Artificial Sequence: Synthetic coding sequence
  source 1..1032: mol_type = other DNA
atggtgagagctagacatcaaccaggggggctttgtttattattacttttattatgtcaattcatggaagatagatcagctcaagcaggaaattgttggcttagacaagcaaaaaatggacgatgccaagtattatataaaacagaactttctaaggaagaatgttgtagtactggtagattatctacatcatggactgaagaagatgttaatgataatactttgtttaaatggatgatctttaatggaggagctccaaattgtattccatgtaaagaaacctgtgaaaatgttgattgtggacctggaaagaaatgtagaatgaataagaaaaataaaccaagatgtgtgtgtgctccagattgttcaaatattacttggaaaggaccagtatgtggattagatggaaagacttatagaaatgaatgtgctttgttaaaagcacgttgtaaggaacaaccagaattagaagttcaatatcaaggaagatgtaagaaaacatgtagagatgttttttgtcctggatcttcaacatgtgttgtagatcaaacaaataatgcatattgtgtaacttgtaatcgtatttgtccagagccagcatcttcagagcaatatttatgtggaaatgatggagttacctattctagtgcttgtcatcttagaaaagcaacttgtcttttaggtagatcaattggtttagcttatgaaggaaaatgtattaaagcaaaatcttgtgaagatattcaatgtacgggtggtaaaaagtgtctttgggatttcaaagttggaagaggaagatgttcattatgtgatgaattatgtccagattctaaatctgatgaaccagtttgtgcaagtgataatgctacttatgcaagtgaatgtgctatgaaggaagcagcatgttctagtggtgttttacttgaagtcaagcattccggttcatgtaacagtatttcagaagacactgaagaagaggaagaagatgaagatcaagattatagttttccaattagtagtatcctcgaatgg

SEQ ID NO: 250137 - DNA, 1032 bp, synthetic construct
  misc_feature 1..1032: note = Description of Artificial Sequence: Synthetic coding sequence
  source 1..1032: mol_type = other DNA
atggtcagggctcgtcaccaaccgggcggcctgtgtctgctcctgctgctcctgtgtcagtttatggaagacaggtctgcccaggccggaaactgttggctccgacaggccaagaacgggaggtgccaggtcctttacaagactgagttatccaaggaggagtgttgctccacaggaaggttgtcgaccagttggaccgaagaagatgtgaatgataacaccctgttcaagtggatgatatttaatggcggcgcacctaactgtatcccctgtaaggaaacatgcgagaacgtcgactgtgggcccggtaagaagtgtagaatgaacaaaaagaacaagcccagatgtgtttgcgctcctgattgctctaacattacatggaagggacccgtgtgtggactggacgggaagacataccgtaatgaatgcgccctgctgaaagcacgttgcaaagaacagccggaattggaagtgcagtaccaaggcaggtgcaaaaagacgtgtagggatgtgttctgtcctggctcgtcaacgtgtgtggtggatcagactaataacgcttattgtgtcacatgtaatcggatctgcccagaacctgctagcagtgaacagtatttgtgcggcaatgatggggttacgtacagctccgcctgtcacctgcgaaaggctacctgccttttgggacgtagtatcggcctcgcttacgaggggaaatgtattaaagcaaaaagttgtgaagatattcaatgtaccggcgggaagaagtgtctctgggactttaaggttggacgtggacgatgtagtctgtgcgacgaattatgccccgattctaaaagcgatgagccagtctgcgcgagtgacaatgccacctacgcctctgagtgtgcgatgaaggaagcggcctgcagcagcggagtgctcctagaggtcaagcattcaggaagttgtaatagcatatccgaggatacggaggaggaagaagaagacgaagaccaggattactccttcccaatttcatccattctggagtgg

SEQ ID NO: 250138 - DNA, 1032 bp, synthetic construct
  misc_feature 1..1032: note = Description of Artificial Sequence: Synthetic coding sequence
  source 1..1032: mol_type = other DNA
atggtccgagcaaggcatcaacccggcgggctatgtcttctactgctgctcctttgccagtttatggaggaccggtctgcacaggcaggcaactgctggctacgccaagctaagaacggacgctgccaggtactgtataaaacagagctgagcaaggaagagtgttgtagtaccggtagactgtctacttcctggaccgaggaggatgtcaacgacaacacactgttcaagtggatgattttcaacgggggggcacccaattgcattccctgcaaggagacttgcgagaatgttgactgtggacccggcaagaaatgtagaatgaataagaaaaacaaaccaaggtgtgtgtgcgcacccgactgttctaacattacctggaagggtccagtctgtggattggatggcaaaacctatcggaatgaatgtgccctgctgaaagcacgctgcaaggagcagcccgaattagaagtgcaataccaaggtcgctgcaaaaagacttgtcgggatgtcttttgccccggctcttctacctgtgtggttgatcagacgaacaacgcgtattgtgtcacatgcaatcgcatctgccctgaaccagccagttcggaacagtatctctgcggcaatgatggtgtgacatacagctccgcatgccacctgaggaaggccacttgtctcctagggagaagcatcgggcttgcatatgaggggaagtgtatcaaggcaaagtcatgcgaggacattcaatgtacaggcgggaaaaagtgtctgtgggacttcaaggtgggcagaggccgttgttctctgtgtgacgaactgtgcccagactcaaagtccgacgaacctgtatgtgcatcggataatgcaacctatgcatcggagtgcgctatgaaggaagccgcctgtagctcaggggtcttacttgaagtaaagcactcaggaagctgtaactctatctccgaagatactgaggaagaggaggaggacgaggaccaggactacagcttccctatctctagcatcctcgagtgg

SEQ ID NO: 250139 - DNA, 1032 bp, synthetic construct
  misc_feature 1..1032: note = Description of Artificial Sequence: Synthetic coding sequence
  source 1..1032: mol_type = other DNA
atggtcagagcacgccaccagccagggggtctttgcctgttgctgttgttgctctgccagttcatggaggataggtcggcccaggccggaaattgctggctcagacaagccaagaacggcaggtgccaggtcctctacaagaccgaactgtccaaagaagagtgttgcagcacgggacggctgtccacttcatggactgaagaggacgtgaatgacaatactctgttcaagtggatgatcttcaacggaggagccccgaactgtattccgtgtaaagaaacgtgcgagaacgtggattgcgggccaggcaagaagtgcaggatgaacaagaagaacaaacccagatgcgtgtgcgccccggactgttcgaacatcacctggaaagggcccgtgtgcggccttgacggaaagacctatcgcaatgagtgtgcactgctcaaggcacgatgtaaggagcaaccggaactcgaagttcagtaccagggtcgctgtaaaaagacctgcagagatgtgttttgcccggggtcgtccacgtgcgtggttgaccaaaccaataatgcgtactgcgtgacctgcaacaggatctgtcccgaaccggcctcaagcgagcagtacttgtgcggtaacgatggggtgacctactcgtcggcatgccatctccggaaggccacctgcctgctcgggcgcagcatcggcctggcgtacgaaggcaaatgtatcaaggccaagtcctgcgaggacatccagtgtactggcggaaagaagtgcctctgggactttaaagttgggagaggcagatgcagcctgtgcgatgaactgtgcccagactcgaaaagcgacgagccagtgtgcgcctcggacaacgctacttacgcctcggaatgcgcaatgaaagaggcggcctgcagctcgggtgtgctgttggaggtcaagcactccggtagctgcaatagcatttccgaggacaccgaggaggaagaggaagatgaagatcaagattactcgttcccaatctcttcgatcctggaatgg

SEQ ID NO: 250140 - DNA, 1032 bp, synthetic construct
  misc_feature 1..1032: note = Description of Artificial Sequence: Synthetic coding sequence
  source 1..1032: mol_type = other DNA
atggtccgcgctcgccaccaacctggagggctttgtctactcctcctgctcctatgtcagttcatggaagatcgctcagcgcaggccggaaattgttggcttagacaagcaaaaaacggaaggtgccaggtgctatataaaactgaactgagtaaggaagaatgttgctccacagggagactatctacatcctggactgaagaagatgtgaatgataacacactgttcaagtggatgatatttaatgggggggctcccaactgtattccctgcaaagaaacatgtgagaatgtcgattgtggacccggaaaaaaatgtagaatgaacaaaaaaaataaacctagatgcgtttgcgcacccgattgttcaaatataacgtggaaaggacccgtttgtgggcttgatggaaaaacttatcggaacgaatgtgccctgctaaaagcccgctgcaaagaacagcccgaactagaagtccagtaccaggggaggtgcaaaaaaacatgtcgcgatgtattctgcccaggatctagtacatgtgtggtcgaccagactaataatgcatattgcgtcacatgtaatcgcatctgcccagaacccgctagttctgaacagtatctatgtgggaacgacggagttacgtatagttccgcatgccatcttcggaaggccacttgtctccttggacgctctatagggctagcttatgaaggaaagtgcataaaagctaaatcctgcgaggatattcagtgtacaggggggaaaaaatgcctctgggatttcaaagtagggcgcggacggtgtagtctatgtgatgaactgtgccccgattcaaaatccgatgagcccgtgtgtgcatccgataatgcgacttacgcgagtgaatgtgccatgaaagaagccgcctgttcctctggggtcctcttagaggtaaaacactctggaagttgtaacagtatctctgaagacacagaagaagaagaagaagacgaagaccaggattattccttcccaatcagttctatattggaatgg

SEQ ID NO: 250141 - DNA, 1032 bp, synthetic construct
  misc_feature 1..1032: note = Description of Artificial Sequence: Synthetic coding sequence
  source 1..1032: mol_type = other DNA
atggtgcgcgcaaggcaccaacctggtggattatgtctactgctgctgctcctgtgccagtttatggaagaccggtcagcacaggccggaaactgttggttacgacaggctaaaaatggaagatgccaggtgctctacaaaacagagctctctaaagaggagtgttgtagcacaggaaggttgtccacctcgtggacggaggaagatgtgaatgataacactctgttcaagtggatgattttcaacggcggtgctcctaactgcataccgtgcaaggagacctgtgaaaacgtggactgtggtccaggcaagaagtgtaggatgaataagaagaacaagcccagatgcgtgtgtgcccctgattgctccaatattacgtggaaaggccctgtgtgcgggctggacggcaagacctacaggaacgagtgtgcattacttaaggcaaggtgcaaggaacagcccgaactcgaagtgcagtaccagggaaggtgcaaaaagacatgccgagacgtgttctgccctggatcgtccacttgcgtcgtcgaccaaaccaataatgcctactgtgtgacgtgcaataggatttgtcccgagccagcctcatcagaacagtacctgtgcggtaacgatggcgtcacctattcgagcgcttgccacctcagaaaggccacttgcctgcttggccgctccattggccttgcctatgaagggaagtgcatcaaggccaagagctgcgaggacatacagtgcacgggcggaaagaaatgtctgtgggatttcaaggtgggcagggggcggtgttctctgtgcgatgagctctgtcctgacagcaaatctgacgagcccgtgtgcgcctcagacaatgctacttatgctagtgaatgtgctatgaaggaggccgcttgctcctccggagtgctcctggaggtcaagcactctggcagttgcaattccatctcggaagataccgaagaggaggaagaggacgaagaccaggactactcttttcctatctctagcattctcgaatgg

SEQ ID NO: 250142 - DNA, 1032 bp, synthetic construct
  misc_feature 1..1032: note = Description of Artificial Sequence: Synthetic coding sequence
  source 1..1032: mol_type = other DNA
atggtcagagcaaggcatcagcccggggggctctgcctgctccttttgctcctctgccagtttatggaggaccgatctgctcaggcaggcaactgttggctacgacaggctaaaaatggacggtgtcaggttctgtataaaactgagttgtctaaagaagaatgctgctccactgggcgcctgagtaccagctggaccgaggaagatgtgaacgataacaccctatttaagtggatgatctttaacggaggcgctcccaactgcatcccctgtaaagaaacctgcgaaaacgtcgattgcgggccaggaaagaaatgcagaatgaacaagaagaataaaccccggtgtgtgtgtgctccagactgttctaatatcacttggaagggccctgtgtgtggtttggacggcaaaacctatagaaacgagtgcgcgctactgaaggcccggtgcaaggaacaaccagaactagaagtgcagtatcaggggcgctgtaagaaaacctgccgtgatgtgttctgccctgggagctccacctgcgtggtcgaccagaccaacaacgcctactgtgtgacctgtaaccggatctgtccagaacccgcctcgtcagagcaatatctttgtggcaacgatggcgtcacctattcatcagcatgccatctgaggaaggcaacatgccttctgggaagaagcattgggctggcttatgaaggaaagtgtatcaaggcaaaatcatgcgaggatattcaatgtaccggtggtaagaagtgcctctgggacttcaaagtgggaagaggacggtgcagtctgtgtgatgaattgtgccccgactccaaatccgatgaaccggtgtgtgcctcagataacgctacctacgcatctgagtgtgcaatgaaagaggcggcatgcagctccggtgtgctgcttgaggtgaagcactcaggaagttgtaattccattagtgaggacaccgaggaagaagaagaagacgaagatcaggactatagttttcccataagttccatcctcgagtgg

SEQ ID NO: 250143 - DNA, 1032 bp, synthetic construct
  misc_feature 1..1032: note = Description of Artificial Sequence: Synthetic coding sequence
  source 1..1032: mol_type = other DNA
atggtccgcgcacgccatcagccaggcggattgtgtctgctgctgcttctgctctgccaattcatggaggatcgctctgcacaagcgggaaactgttggctcaggcaagccaagaacggacgttgccaagtgttgtacaaaaccgagctctcaaaggaagagtgttgctcaaccggccggctgtcgactagctggaccgaggaagatgtgaatgataacactctctttaagtggatgattttcaacggcggagctccgaactgcatcccatgtaaagaaacctgcgaaaatgtcgactgtggcccgggtaagaaatgccggatgaacaagaagaataagccgcgctgtgtctgcgccccggactgttccaatatcacttggaaaggcccagtgtgcgggcttgacggaaagacctatcggaacgagtgtgccctgctcaaggcccgctgtaaagaacaaccggaactcgaagtgcagtaccaagggcgctgtaaaaagacgtgccgcgatgtgttttgccctggcagctcaacctgcgtggtcgaccagaccaataacgcatactgcgtgacctgcaacagaatctgcccagaacctgcttcaagcgagcagtacctgtgcggcaacgacggagtaacctattcgtcggcatgtcacctccgcaaagcgacgtgcctcctgggacgctcaatcggtctggcatacgagggaaagtgcatcaaggcaaaatcctgcgaagatattcagtgtactggaggtaagaagtgcctgtgggacttcaaggtgggacgcgggcgctgctcgctgtgcgacgagctttgcccagactcgaagtcagacgaaccagtttgcgcaagcgataatgcgacttacgcctctgagtgcgcgatgaaggaggccgcctgcagctcaggcgtgcttttggaggtgaagcactcgggatcgtgcaactcgatctcggaggataccgaggaggaagaagaagatgaggaccaggactactccttcccgatctcgtctatcctcgaatgg

SEQ ID NO: 250144 - DNA, 1032 bp, synthetic construct
  misc_feature 1..1032: note = Description of Artificial Sequence: Synthetic coding sequence
  source 1..1032: mol_type = other DNA
atggtacgtgcgcgtcatcaaccgggtggtctatgtctactactactactactatgtcaatttatggaagatcgttcggcgcaagcgggtaattgttggttacgtcaagcgaaaaatggtcgttgtcaagtactatataaaacggaattatcgaaagaagaatgttgttcgacgggtcgactatcgacgtcgtggacggaagaagatgttaatgataatacgctatttaaatggatgatatttaatggtggtgcgccgaattgtataccgtgtaaagaaacgtgtgaaaatgttgattgtggtccgggtaaaaaatgtcgaatgaataaaaaaaataaaccgcgatgtgtatgtgcgccggattgttcgaatataacgtggaaaggtccggtatgtggtctagatggtaaaacgtatcgaaatgaatgtgcgctattaaaagcgcgttgtaaagaacaaccggaattagaagttcaatatcaaggtcgatgtaaaaaaacgtgtcgtgatgttttttgtccgggttcgtcgacgtgtgtagtagatcaaacgaataatgcgtattgtgttacgtgtaatcgaatatgtccggaaccggcgtcgtcggaacaatatctatgtggtaatgatggtgtaacgtattcgtcggcgtgtcatttacgaaaagcgacgtgtttattaggtcgatcgataggtctagcgtatgaaggtaaatgtataaaagcgaaatcgtgtgaagatatacaatgtacgggtggtaaaaaatgtttatgggattttaaagttggtcgtggtcgttgttcgttatgtgatgaattatgtccggattcgaaatcggatgaaccggtatgtgcgtcggataatgcgacgtatgcgtcggaatgtgcgatgaaagaagcggcgtgttcgtcgggtgtattactagaagtaaaacattcgggttcgtgtaattcgatatcggaagatacggaagaagaagaagaagatgaagatcaagattattcgtttccgatatcgtcgatattagaatgg

SEQ ID NO: 250145 - DNA, 1032 bp, synthetic construct
  misc_feature 1..1032: note = Description of Artificial Sequence: Synthetic coding sequence
  source 1..1032: mol_type = other DNA
atggtgagagccagacatcagcccggaggtctttgcctcctgttgctcctgctttgccaattcatggaagatcgctccgcacaggctggcaactgttggctgcgccaagcaaaaaacggtcgctgccaggtcttgtataagactgaactttccaaagaagaatgttgcagcaccggtaggctctcaacctcctggaccgaggaagatgtgaatgataacactctgtttaagtggatgatattcaatggaggagcaccaaattgcatcccgtgcaaggaaacttgtgaaaatgtcgattgcggtccagggaagaagtgcagaatgaataagaagaacaagccccgctgtgtctgtgcacctgactgcagcaacattacctggaaaggtcccgtgtgtggactcgatggaaagacctatagaaatgaatgtgcacttctcaaggcgcggtgtaaggaacaacctgagcttgaagtccagtatcaaggcagatgcaagaaaacttgtcgggatgtgttttgtcccggttcttcgacctgcgtcgtggatcaaactaataacgcatattgtgtgacttgtaacagaatttgtccagaacccgccagctcggagcagtacctgtgcggcaacgatggagtgacttacagctccgcatgccacctgcggaaggcaacgtgcctgcttggtcgtagcatcggcctcgcatacgagggtaaatgcattaaggccaagtcatgtgaggacattcagtgtaccggggggaagaaatgcctttgggatttcaaagtcggcaggggtcggtgttcattgtgtgacgaactgtgtcccgatagcaagtcggatgagccagtgtgtgcgagcgacaacgctacgtacgcgtccgagtgtgccatgaaagaggcggcgtgcagctccggagttctgctggaagtgaagcattcgggaagctgtaactccatttcagaagatactgaagaagaagaggaggacgaggatcaagattactcgtttccaatatctagcattcttgaatgg

SEQ ID NO: 250146 - DNA, 1032 bp, synthetic construct
  misc_feature 1..1032: note = Description of Artificial Sequence: Synthetic coding sequence
  source 1..1032: mol_type = other DNA
atggtgcgggccaggcaccagccgggaggactgtgcctcctgcttctccttctgtgccagtttatggaagatagatcggcgcaggctggcaactgttggctgcgccaggccaagaatggacggtgtcaagtcctgtacaaaaccgaactgtcgaaagaagaatgctgctccaccggaaggctgtcaaccagctggacggaagaggacgtgaacgacaatactctgttcaaatggatgatcttcaacggaggagccccaaactgcatcccgtgcaaagaaacttgcgaaaacgtggattgcggtccgggaaagaagtgccgaatgaataagaagaacaaacctcggtgcgtgtgcgcgcccgactgtagcaatatcacctggaaggggccagtttgcggccttgatggaaagacttatcgcaacgaatgtgcgctcttgaaggctcggtgtaaggagcaaccagaactcgaggtccagtaccagggccgttgcaaaaagacttgcagagatgtgttttgccccggatcgtcaacctgcgtggtggatcagactaataacgcctactgcgtgacttgtaacagaatctgccctgaaccggcgagctcggagcaatacctgtgcggcaatgacggagtgacctactcctctgcatgccacctgcgcaaggcaacctgtttgctcggtcgctccatcgggctggcatacgaaggcaagtgtattaaggcgaagagctgcgaggacattcaatgtacgggaggaaagaaatgcctgtgggacttcaaggtcggtcgggggcgctgctcgctctgcgacgaactctgcccagactcgaagtcggacgagccggtctgcgcctcagacaacgcaacttacgccagcgaatgtgccatgaaagaagccgcttgttcgtccggcgtgttgctggaagtcaagcattccggtagctgcaactccatctcagaggacaccgaggaagaggaggaggatgaggatcaggattactccttcccgatcagttcaatcctggagtgg

SEQ ID NO: 250147 - DNA, 1032 bp, synthetic construct
  misc_feature 1..1032: note = Description of Artificial Sequence: Synthetic coding sequence
  source 1..1032: mol_type = other DNA
atggtgagggcacgacaccagcctgggggcctctgcctcctgctgctgttattgtgccagtttatggaagaccgcagcgctcaagctggcaactgctggctcagacaggcaaagaacggacgttgccaggtgctttacaaaacggaactgtctaaggaggagtgctgctcaactgggcggctgtccacgagctggaccgaggaagatgtaaatgataacacgttgtttaagtggatgatttttaatggaggagcccctaattgtatcccctgcaaggaaacgtgtgaaaacgtcgattgtggcccgggcaagaagtgtaggatgaacaagaagaacaagcctagatgcgtgtgcgcaccggactgtagcaacatcacctggaaaggcccggtttgcggactcgacggaaagacatatcggaacgagtgtgccctattaaaggcccgctgtaaagaacagcctgaacttgaagtccaatatcagggacgatgcaaaaaaacttgccgggatgtgttttgccccggaagcagcacgtgcgtcgtggaccagaccaataacgcctattgcgttacatgcaatcggatatgccccgagcccgccagttctgaacagtacctgtgcggtaatgacggagtgacctacagttcagcttgccacctcagaaaggccacttgtttactaggccgctccataggcctggcatacgaaggaaagtgcatcaaagccaagtcttgtgaggatatacagtgtacaggtgggaagaagtgcctgtgggacttcaaagtcggtcggggcaggtgtagcctctgtgacgaactctgtcctgactctaaatcggacgagcccgtatgtgcctctgacaacgcgacctacgccagcgagtgcgcgatgaaggaggccgcttgttcgtcgggcgtgctgttagaggtcaagcattccgggtcctgcaattcaatttctgaagacacagaggaagaggaggaggacgaggaccaagattatagtttcccgatctccagcatactggagtgg

SEQ ID NO: 250148 - DNA, 1032 bp, synthetic construct
  misc_feature 1..1032: note = Description of Artificial Sequence: Synthetic coding sequence
  source 1..1032: mol_type = other DNA
atggtccgcgcgcgccaccagccagggggcctgtgtctactgctccttctgctctgccagtttatggaagaccgtagtgcacaggcaggcaattgctggctgcgccaggcaaaaaacggaaggtgtcaggtgctctataagaccgagctgagtaaggaggagtgctgttccacgggtaggctcagtaccagctggactgaagaagacgtgaatgataacaccctcttcaagtggatgatcttcaatggcggtgcaccaaactgcattccttgcaaagagacatgtgagaacgtggattgtgggcccggaaagaaatgccgcatgaataaaaagaacaagcctcggtgcgtgtgtgcaccagactgtagtaatatcacatggaaggggcccgtatgcggacttgatgggaagacctaccggaatgagtgcgctctattgaaggctcggtgcaaggaacagcccgagctggaggtccagtatcaaggacgctgcaagaagacttgcagggatgttttttgcccagggtcatctacttgcgtcgtagaccagaccaacaatgcatattgcgtcacttgtaacaggatctgccccgagcctgcttcttcagaacaatatctctgcggcaacgatggagtgacctatagctctgcttgtcatctccgcaaagcaacatgtcttctcggcagaagtattggactggcttatgagggaaagtgtatcaaggccaaatcatgcgaagatatccagtgcaccggaggcaagaaatgtctctgggatttcaaggtgggtcgtggccgctgtagcctttgcgacgagctttgcccagattcgaagtcagacgagcctgtctgtgcctctgataacgccacctatgcatcggagtgtgccatgaaggaggccgcttgttccagcggcgtacttctggaggtaaagcacagcggcagttgtaattctatctccgaggatacggaggaggaggaggaggatgaggaccaggattattcgtttcccattagttctattctggaatgg

SEQ ID NO: 250149 - DNA, 348 bp, synthetic construct
  misc_feature 1..348: note = Description of Artificial Sequence: Synthetic coding sequence
  source 1..348: mol_type = other DNA
atgccagctccctggactatctgttccctcctgcttctgtcagtgctctgtatggaccttgccatggccggctcctcattcctgagcccagagcaccagaagttgcagcgtaaggaggccaagaaacctagcggaagactgaagccccgaacattggaggggcagtttgaccccgaggtgggatcccaggctgagggcgccgaggatgagctggagatccgctttaatgccccctttaacattgggattaagctggccggcgctcaatccttacaacacggccaaactctcggcaagtttctgcaagatattctgtgggaagaagcagaagagacccttgcaaatgag

SEQ ID NO: 250150 - DNA, 348 bp, synthetic construct
  misc_feature 1..348: note = Description of Artificial Sequence: Synthetic coding sequence
  source 1..348: mol_type = other DNA
atgcccgcaccatggacgatttgctcgcttttgcttctgtcggtcctgtgcatggacctggcaatggccggctccagcttcctttccccagagcaccaaaaactgcagaggaaggaggccaagaaaccctctggccggttaaagccacgcacactagaggggcagttcgatcccgaggtgggatcacaggccgaaggtgcagaggatgagcttgaaatacggttcaatgcccccttcaatataggaatcaaactcgcaggggcccagtcgctccagcacggacaaaccctagggaaattcctgcaggacattctttgggaagaagcggaagaaaccctggcaaatgag

SEQ ID NO: 250151 - DNA, 348 bp, synthetic construct
  misc_feature 1..348: note = Description of Artificial Sequence: Synthetic coding sequence
  source 1..348: mol_type = other DNA
atgcctgcgccctggacgatctgctcgttgctgctcctgtcggtgctgtgtatggatctcgcaatggccggttcatctttcctctcccccgagcaccagaaacttcaaagaaaagaagcgaagaagccttcgggccgcctgaagccgaggaccttggagggccaatttgacccagaggtcgggtcacaggcggaaggcgccgaggacgaactcgaaattcggttcaacgccccgttcaatatcggtatcaagctggctggagcacaatcccttcagcatggacaaacgcttgggaagtttctgcaagatattctctgggaagaagcagaggaaaccctggctaacgag

SEQ ID NO: 250152 - DNA, 348 bp, synthetic construct
  misc_feature 1..348: note = Description of Artificial Sequence: Synthetic coding sequence
  source 1..348: mol_type = other DNA
atgccagctccatggactatttgttcattgttgttacttagtgttttatgtatggatcttgctatggcaggatcttcttttttatcaccagaacatcaaaaattacaaagaaaagaagctaaaaagccatcaggacgacttaagcctagaactttagaaggacaatttgatcctgaagttggttctcaagctgaaggagctgaagatgaacttgaaattagattcaatgcacctttcaatattggaatcaagcttgcaggagctcaatcattacaacatggacagactttaggaaaatttcttcaagatattctttgggaagaagctgaagaaacattagcaaatgaa

SEQ ID NO: 250153 - DNA, 348 bp, synthetic construct
  misc_feature 1..348: note = Description of Artificial Sequence: Synthetic coding sequence
  source 1..348: mol_type = other DNA
atgcctgcgccatggactatctgttcccttctgttgctttcagtgctctgcatggatctcgctatggcggggtcatcctttctaagccccgaacaccagaagctgcagcgaaaagaggcaaagaagccttccgggagactcaagccgagaacgctggaggggcaattcgacccggaggtcggtagccaagcagagggcgcagaggacgagctggagatcaggtttaacgcaccctttaacatcggtataaaactggcaggagcacagagcttgcagcatgggcagactctagggaagttcctgcaggacattctctgggaagaggcagaggaaacactggctaatgaa

SEQ ID NO: 250154 - DNA, 348 bp, synthetic construct
  misc_feature 1..348: note = Description of Artificial Sequence: Synthetic coding sequence
  source 1..348: mol_type = other DNA
atgcccgcgccttggactatttgttcactgctgttgctctcggttctttgcatggatctggcaatggccgggtcgtcatttctctccccagaacatcaaaagctccaacgtaaagaagcaaaaaagccaagcggccggctgaagccgcgcaccctggaaggccagttcgatcctgaagtgggaagccaagccgaaggtgcggaggacgaactggagattagattcaacgcaccctttaacataggcattaagctcgcaggggcgcagtccttgcagcacggtcaaactttggggaaatttctgcaagatatcctgtgggaggaggcagaagaaacgctggctaatgaa

SEQ ID NO: 250155 - DNA, 348 bp, synthetic construct
  misc_feature 1..348: note = Description of Artificial Sequence: Synthetic coding sequence
  source 1..348: mol_type = other DNA
atgccggctccgtggaccatctgctcgcttctcctgctttccgtgctctgtatggacctggcaatggccggatcgtcgttcctgtcccctgagcatcagaagctgcagcgcaaagaagctaagaagccatcaggccggctgaaaccccggaccctggaaggacaatttgatcctgaagtgggaagccaggctgaaggcgctgaggacgaactggaaatcaggtttaatgcaccgttcaacatcggaattaagctggccggcgcacagagcttgcagcacgggcagaccctgggaaagttcctgcaagacatcctctgggaggaggcagaggaaaccctcgctaatgaa

SEQ ID NO: 250156 - DNA, 348 bp, synthetic construct
  misc_feature 1..348: note = Description of Artificial Sequence: Synthetic coding sequence
  source 1..348: mol_type = other DNA
atgcctgcaccctggactatttgcagcctcttgttgctgtcggtgttgtgtatggatctcgcaatggctggttcctcatttctttcaccagagcatcaaaaacttcagcggaaggaagcgaaaaagccctcgggacgacttaaaccaagaaccctcgaagggcagtttgatccggaagtgggatcccaggcagagggagctgaagatgaactcgaaattaggttcaatgccccctttaacattggaatcaagttggcaggagcccaatccctccagcatgggcagacccttgggaaatttctgcaagacattctttgggaggaggccgaagaaaccctggccaacgaa

SEQ ID NO: 250157 - DNA, 348 bp, synthetic construct
  misc_feature 1..348: note = Description of Artificial Sequence: Synthetic coding sequence
  source 1..348: mol_type = other DNA
atgccagctccgtggacgatatgctcactgctcttgctcagcgtcctctgtatggacctcgccatggctggctcctcatttctgtctcccgagcaccaaaagctccagagaaaggaagcgaagaaaccgagtggccgactgaagcctcgcactctggagggccagttcgatccggaagtgggcagccaagcggagggagcagaagatgagctggagatccggttcaacgctccgttcaacatcggaattaagctcgccggtgcccaatcgcttcagcatgggcagaccttggggaaattcctgcaggacatcctttgggaggaagccgaagaaaccctggcgaatgaa

SEQ ID NO: 250158 - DNA, 348 bp, synthetic construct
  misc_feature 1..348: note = Description of Artificial Sequence: Synthetic coding sequence
  source 1..348: mol_type = other DNA
atgccagcgccgtggaccatttgctcccttctgcttctctccgttttgtgtatggatttagccatggccgggtcaagttttttatcccctgaacatcaaaaacttcagcgaaaggaggctaagaagccatcagggagactcaaaccaagaacgcttgaaggacaattcgatcctgaagtaggatcccaagcagagggtgccgaagatgagcttgagatcaggttcaacgcaccattcaatattggcattaaactcgccggtgctcaatcgctacaacatggacaaactcttggaaaattcttgcaagatattttgtgggaagaggctgaagaaactttagctaacgag

SEQ ID NO: 250159 - DNA, 348 bp, synthetic construct
  misc_feature 1..348: note = Description of Artificial Sequence: Synthetic coding sequence
  source 1..348: mol_type = other DNA
atgcccgccccgtggaccatctgttccctgttgctgctgtccgtcttgtgcatggatctggccatggccggctcgtcatttctcagcccggagcatcagaagctccaacggaaggaggcaaagaagccatcaggccgccttaagccacgcaccctggagggccagttcgacccagaggtgggatcccaggcagaaggagcggaagatgagctcgaaatccgcttcaatgcgccattcaacattggaatcaaactggcgggtgcccaatcgctgcagcacggacagacgctgggcaaattcctgcaggacatactgtgggaggaggcagaggaaaccctggcaaatgag

SEQ ID NO: 250160 - DNA, 348 bp, synthetic construct
  misc_feature 1..348: note = Description of Artificial Sequence: Synthetic coding sequence
  source 1..348: mol_type = other DNA
atgcctgctccttggactatttgttcgctgcttctcctttcagtgctctgcatggatctggcaatggcaggttcctcgtttttgtcaccggagcatcaaaaactccagagaaaggaggcaaagaagccatccgggagactcaagccccggaccctggagggacaatttgaccctgaagtcggaagccaagcagagggcgccgaagatgaactcgaaatccgattcaacgcaccattcaacattggaatcaaacttgcaggggcccaaagcctgcagcacgggcaaactcttggcaagtttctgcaggacatcctgtgggaagaagcggaagaaaccctcgcaaatgaa

SEQ ID NO: 250161 - DNA, 348 bp, synthetic construct
  misc_feature 1..348: note = Description of Artificial Sequence: Synthetic coding sequence
  source 1..348: mol_type = other DNA
atgcctgctccatggaccatctgcagtctgttgctgcttagcgtcctgtgtatggatctggctatggccggctcgtctttcctatcgcctgagcatcaaaagctccagcgtaaggaggccaagaaaccctctggaaggcttaaacctcgcactctcgagggccaattcgatcccgaagttggatcacaggcagaaggcgccgaagatgaacttgaaattcggtttaatgctcccttcaacataggtattaaattagccggcgcccagagtctgcaacacgggcaaacactgggaaaatttctgcaagacatcctctgggaagaggccgaagagaccttggctaatgaa

SEQ ID NO: 250162 - DNA, 348 bp, synthetic construct
  misc_feature 1..348: note = Description of Artificial Sequence: Synthetic coding sequence
  source 1..348: mol_type = other DNA
atgcctgccccctggaccatttgcagcttactgcttctctcagtactctgcatggaccttgctatggccggttcctcttttctatcccctgagcatcagaaactccaaagaaaggaggccaagaagccgtccggtcgactgaaaccccgaaccttggagggccaatttgatcctgaggtgggatcgcaggccgagggcgccgaggacgaactggaaatcagatttaacgcaccttttaacattggtattaaattggctggcgcccagtcactacaacacggacaaacccttggtaagttcttacaagacatcctttgggaggaggccgaggagacattggccaatgag

SEQ ID NO: 250163 - DNA, 348 bp, synthetic construct
  misc_feature 1..348: note = Description of Artificial Sequence: Synthetic coding sequence
  source 1..348: mol_type = other DNA
atgcccgccccttggaccatctgctcattgctcctgcttagcgtcctgtgtatggacctggcaatggcaggaagctccttcctgtcaccagaacatcagaagctccaacggaaagaggctaagaaaccgtcgggccgcctcaagccaaggactctggagggacaattcgacccggaagtggggtcccaagccgagggagctgaagatgaactggaaatcagattcaacgcgccgttcaatatcggcatcaagctggcgggggcccagtcgctccagcacggacagactctgggtaagtttttgcaggatattctttgggaagaggccgaggaaaccctcgcgaacgag

SEQ ID NO: 250164 - DNA, 348 bp, synthetic construct
  misc_feature 1..348: note = Description of Artificial Sequence: Synthetic coding sequence
  source 1..348: mol_type = other DNA
atgccagccccctggacaatctgctccctgcttctactgagtgttttatgtatggacctcgctatggccggatcctcgttcctgagtccagagcaccagaaattacagcgaaaagaagcgaaaaaacccagcggcaggctgaaacctcgaactctggaggggcaattcgatcctgaggtgggctcacaggccgaaggggccgaggatgagctcgaaatcagatttaacgcccccttcaatatcggcattaaacttgcaggagcacagtcgttgcagcacgggcagaccctgggaaaattcctccaggacatactgtgggaagaggcagaggaaactcttgctaatgaa

SEQ ID NO: 250165 - DNA, 348 bp, synthetic construct
  misc_feature 1..348: note = Description of Artificial Sequence: Synthetic coding sequence
  source 1..348: mol_type = other DNA
atgccggcaccgtggaccatctgcagtctgctcctgttgagtgttctgtgcatggacttggcaatggccggttcaagctttctctctcctgaacaccaaaagctgcagagaaaggaagcaaagaagcctagcggtcgactgaagccccgcacgctggagggccagttcgaccctgaggttggttcgcaagcagagggtgccgaggatgagctggaaatccgtttcaatgcccctttcaatatagggattaaacttgccggggcgcagagtctccagcatgggcagaccctgggaaagttcctgcaggatatcctgtgggaagaggctgaagagaccctggccaacgaa

SEQ ID NO: 250166 - DNA, 348 bp, synthetic construct
  misc_feature 1..348: note = Description of Artificial Sequence: Synthetic coding sequence
  source 1..348: mol_type = other DNA
atgcccgccccttggaccatatgttccctccttctcctgagcgtactttgcatggatctagctatggccggaagctcattcctcagccctgagcatcagaaattgcagcgaaaggaggccaagaagcctagcggccgcctgaagccacggaccctggagggtcagtttgatccggaagtgggctctcaagccgaaggcgccgaggatgagctggaaattaggttcaatgctcccttcaacattgggattaagcttgctggcgcacagagccttcagcatggacaaacattaggaaagttcctccaggacatattgtgggaggaggcagaggaaaccctcgcgaacgag

SEQ ID NO: 250167 - DNA, 348 bp, synthetic construct
  misc_feature 1..348: note = Description of Artificial Sequence: Synthetic coding sequence
  source 1..348: mol_type = other DNA
atgcccgcaccttggacgatatgttcgcttctccttctctcggtcctgtgcatggatcttgccatggcgggtagctcatttctgtcgcccgagcaccaaaagttgcagagaaaggaagctaagaagcccagcggtaggctgaaacctcgaaccctggagggacagttcgatccggaggtcggatcccaggccgaaggcgccgaagatgagctggaaattcgttttaacgctccatttaacatcgggattaaacttgcaggtgcgcagtccctgcagcatggacaaaccctcggtaagtttcttcaagacatactctgggaggaggctgaagagactctcgcgaacgaa

SEQ ID NO: 250168 - DNA, 348 bp, synthetic construct
  misc_feature 1..348: note = Description of Artificial Sequence: Synthetic coding sequence
  source 1..348: mol_type = other DNA
atgccagctccctggactatttgctccttactgctattatctgtcttgtgcatggatttggctatggccggttccagcttcctcagcccggaacatcagaagcttcaaagaaaggaggccaaaaaacccagcggtcgactgaaaccaaggacactagaagggcagtttgatcctgaagttggatcgcaggccgaaggggctgaggatgaactcgagattcgttttaacgcccctttcaatattggaataaagctcgctggcgctcagagtctgcagcacggccagaccctcggcaagtttcttcaagacattctgtgggaggaggctgaggagactctggcgaatgag

SEQ ID NO: 250169 - DNA, 348 bp, synthetic construct
  misc_feature 1..348: note = Description of Artificial Sequence: Synthetic coding sequence
  source 1..348: mol_type = other DNA
atgccagctccatggacaatatgctcactactcctcctctcggttctctgtatggacctagccatggccgggtcttcttttttatcacctgaacatcagaaactgcagcggaaagaggcaaaaaaacctagtggaaggttaaaacccagaacattagaaggacagttcgatccagaggtggggtctcaggcagaaggggcggaagatgaactggaaataaggttcaatgctccattcaatataggaattaagctggcaggggctcaatctcttcagcatgggcagactctgggaaaatttctccaagatattctctgggaagaggctgaagaaacactagcgaatgag

SEQ ID NO: 250170 - DNA, 348 bp, synthetic construct
  misc_feature 1..348: note = Description of Artificial Sequence: Synthetic coding sequence
  source 1..348: mol_type = other DNA
atgcctgccccttggacgatatgctccttattattgctctcggtactttgtatggacctggctatggcaggcagtagtttcctgagtccggaacatcagaagcttcagcgcaaggaggctaagaaaccgtctggccgactaaagcctcgtacgcttgagggtcagtttgacccagaggttgggagccaggcagaaggtgctgaggatgaattggagattagattcaatgctcctttcaacattgggataaagctcgcgggggcacagagtctgcagcatggccagactctcggcaaattcctgcaagacatcctttgggaggaagctgaagagacattggctaacgag

SEQ ID NO: 250171 - DNA, 348 bp, synthetic construct
  misc_feature 1..348: note = Description of Artificial Sequence: Synthetic coding sequence
  source 1..348: mol_type = other DNA
atgccagctccttggacaatttgttctctcctcctgctttctgtattgtgcatggatctggcaatggcaggatcatcctttctgagccccgagcatcaaaaacttcagagaaaggaggcaaagaagccatctggccgcctgaagcctcgcaccctggagggccagttcgatcctgaagtgggatcccaggccgaaggcgctgaggacgagctcgagatcagatttaatgcgcctttcaacatcggcataaagctggccggcgcccagtcactgcagcacggacaaactctcggtaagtttctgcaggatatcctgtgggaagaggcagaagaaaccctggcgaatgaa

SEQ ID NO: 250172 - DNA, 348 bp, synthetic construct
  misc_feature 1..348: note = Description of Artificial Sequence: Synthetic coding sequence
  source 1..348: mol_type = other DNA
atgcctgcgccctggaccatatgtagcctgctgctcctttctgtgctgtgcatggatctggccatggcaggatcatcctttctctcaccagaacaccagaagctgcagcggaaggaagctaagaagccctccggccggctgaagccacgaaccctggaagggcaattcgatcccgaggtcggcagccaggctgaaggcgcagaggacgaactagagattaggtttaatgccccttttaacatcgggatcaagctcgcgggggcccagtcattacaacacggtcaaacgcttggcaagttcctgcaggatatcttatgggaggaggccgaggaaaccctggctaacgag

SEQ ID NO: 250173 - DNA, 348 bp, synthetic construct
  misc_feature 1..348: note = Description of Artificial Sequence: Synthetic coding sequence
  source 1..348: mol_type = other DNA
atgcctgccccctggactatttgctctttgctcctgttgagcgtgttgtgtatggatctggctatggcagggtcctctttcttgtcaccagaacaccagaagttgcaaaggaaagaggctaagaagccatctggcaggctgaaacccagaactctggagggtcagtttgacccagaagtcggatcccaagcggagggtgcggaggacgaactcgagatccgattcaacgcacccttcaacatcggcattaaattggccggtgcacagagtttgcagcacggccaaaccctcggaaagttcctccaagatatcctttgggaggaagccgaagaaacgttggcaaatgaa

SEQ ID NO: 250174 - DNA, 348 bp, synthetic construct
  misc_feature 1..348: note = Description of Artificial Sequence: Synthetic coding sequence
  source 1..348: mol_type = other DNA
atgcctgccccatggactatttgttccctgcttcttctctccgtcctttgcatggacctcgcgatggccggctcctctttcttatcaccggagcaccagaagctgcaacgcaaagaggcaaagaagccgtccggaagactgaaaccccgcactctggaggggcagttcgaccccgaagtgggatcccaggccgaaggagctgaggacgaactggaaatccggttcaacgcaccgttcaatatcggcattaaactggctggagcacagagcctccagcatggacagactctgggtaaattcctccaggacatcctgtgggaggaagctgaagagaccctggccaatgag

SEQ ID NO: 250175 - DNA, 348 bp, synthetic construct
  misc_feature 1..348: note = Description of Artificial Sequence: Synthetic coding sequence
  source 1..348: mol_type = other DNA
atgccggcgccgtggacgatatgttcgttactactattatcggtattatgtatggatctagcgatggcgggttcgtcgtttttatcgccggaacatcaaaaattacaacgaaaagaagcgaaaaaaccgtcgggtcgtttaaaaccgcgaacgctagaaggtcaatttgatccggaagtaggttcgcaagcggaaggtgcggaagatgaattagaaatacgatttaatgcgccgtttaatataggtataaaattagcgggtgcgcaatcgctacaacatggtcaaacgctaggtaaatttctacaagatatattatgggaagaagcggaagaaacgttagcgaatgaa

SEQ ID NO: 250176 - DNA, 348 bp, synthetic construct
  misc_feature 1..348: note = Description of Artificial Sequence: Synthetic coding sequence
  source 1..348: mol_type = other DNA
atgcccgccccatggaccatctgttctcttctgttgctcagcgttctatgtatggatctcgcaatggctgggagttccttcctgtctcccgagcaccagaaactgcaacggaaggaggccaaaaagccatcaggacgcttgaaaccgaggaccttggagggccagtttgacccagaggtcgggtcacaggcagaaggagccgaggatgagctggaaatccgcttcaatgcacccttcaacattggcattaagcttgccggagctcagtccctgcagcatgggcagactctcggaaagtttctgcaggacatcctgtgggaagaggccgaagagactctcgctaacgaa

SEQ ID NO: 250177 - DNA, 348 bp, synthetic construct
  misc_feature 1..348: note = Description of Artificial Sequence: Synthetic coding sequence
  source 1..348: mol_type = other DNA
atgccggccccatggacaatttgcagcctgttgctcctctccgtgctgtgtatggacctcgcgatggctggctctagttttttaagtcccgaacaccaaaagctgcagagaaaggaggcaaaaaagccttctggcagactcaagcctagaaccctggagggccagttcgatcctgaagtgggaagccaagccgaaggtgctgaagacgagctcgaaatccggtttaacgccccattcaacataggtataaagctggcaggtgctcagtctttgcagcacgggcaaaccctcggaaaattcctccaggatattctttgggaagaagctgaggagaccctggcaaatgaa

SEQ ID NO: 250178 - DNA, 348 bp, synthetic construct
  misc_feature 1..348: note = Description of Artificial Sequence: Synthetic coding sequence
  source 1..348: mol_type = other DNA
atgcctgccccatggacgatctgctccctgctgctgttgtccgtgctctgcatggacctggcaatggcgggttcgtcgttcctgtctccagaacaccagaagctccaaaggaaggaggccaagaagccttcgggaaggctgaagccacgcaccctggagggccagtttgacccagaggtggggagccaggctgaaggagccgaggacgagcttgaaattcgcttcaacgcgccgttcaacatcggcatcaagctcgcgggagcccaaagcctccaacatggccagaccctgggaaagttcctgcaggacatcctctgggaagaggcagaagaaaccctcgcaaacgag

SEQ ID NO: 250179 - DNA, 348 bp, synthetic construct
  misc_feature 1..348: note = Description of Artificial Sequence: Synthetic coding sequence
  source 1..348: mol_type = other DNA
atgccggcgccttggactatatgctcgctcctcctgctgtcagtgctctgcatggatctggcgatggccggctcgagcttcctgtccccagaacatcaaaaactgcaaagaaaggaggcgaagaaaccatcgggccgcttgaagcctagaactctcgagggacagttcgacccggaggtcggtagccaagcggaaggcgccgaggacgaactggaaatccggttcaatgctccgtttaacatcggaatcaagctggcgggggcgcagtccttgcagcatggacagactctcggaaagttccttcaggacatcctctgggaggaggcagaggaaaccttggccaacgag

SEQ ID NO: 250180 - DNA, 348 bp, synthetic construct
  misc_feature 1..348: note = Description of Artificial Sequence: Synthetic coding sequence
  source 1..348: mol_type = other DNA
atgccggccccatggaccatatgtagtctgctcctcttgtctgtgctgtgcatggatttggccatggccggatcctcatttctgtcgcctgagcaccagaagctgcagagaaaggaagctaagaagccttccggacgtcttaagccgcgtacactggagggccaatttgaccccgaggtgggctcgcaggccgagggagcggaggatgagctagagattcgcttcaatgccccattcaatatcggcatcaaactggcgggagcgcagagccttcagcatggtcagaccctcggcaagtttctgcaggacattctgtgggaggaggctgaagagactttggcaaatgag

SEQ ID NO: 250181 - DNA, 348 bp, synthetic construct
  misc_feature 1..348: note = Description of Artificial Sequence: Synthetic coding sequence
  source 1..348: mol_type = other DNA
atgccggctccgtggactatttgttccctactcctgctcagtgtgctgtgcatggatctagcaatggctggttcttcatttctgagccctgagcatcagaagctgcagcgaaaggaagcaaaaaaaccatctggacggctgaagccccgaaccctcgaaggtcaattcgacccagaggttggatctcaggctgaaggcgccgaggatgagttggaaattcgcttcaatgccccgttcaacatcggaataaagctggctggagcacagtccctgcagcacggacagaccttggggaaattcttacaagatatactctgggaggaggccgaggaaacactggctaacgag

SEQ ID NO: 250182 - DNA, 348 bp, synthetic construct
  misc_feature 1..348: note = Description of Artificial Sequence: Synthetic coding sequence
  source 1..348: mol_type = other DNA
atgccagcgccctggactatttgttccctccttttgctgtccgtgctctgcatggatctggcgatggctggctctagtttcctatccccagagcatcagaaactgcaacgcaaggaagcaaaaaaacctagcggccgtctcaaacctaggaccctcgagggacaattcgatcccgaagtcggctctcaggcggaaggcgccgaggatgagctggaaatacgtttcaacgcacctttcaacattgggatcaaactagccggggcgcagagcttacagcacggccaaacccttgggaagtttctgcaggatattctctgggaggaggcagaggagaccctcgccaacgag

SEQ ID NO: 250183 - DNA, 348 bp, synthetic construct
  misc_feature 1..348: note = Description of Artificial Sequence: Synthetic coding sequence
  source 1..348: mol_type = other DNA
atgcctgcaccttggaccatatgttcgctgttgctgctctcagtgctttgcatggatcttgctatggcaggatcctcgtttctcagccctgagcatcagaagctgcagagaaaggaggccaaaaaaccctcgggtcgacttaagcctagaaccttggaaggtcaattcgacccggaagtgggatcgcaagccgagggtgccgaagatgaacttgaaattcggttcaatgcgccgtttaacattggcattaaacttgctggcgcccaatcactgcaacatggacagacgctcggaaagtttttgcaggacattctgtgggaagaagccgaagaaaccttggcaaatgaa

SEQ ID NO: 250184 - DNA, 348 bp, synthetic construct
  misc_feature 1..348: note = Description of Artificial Sequence: Synthetic coding sequence
  source 1..348: mol_type = other DNA
atgcctgcgccatggactatttgttcgctgttgctcttgagcgtgctgtgtatggatctggcaatggcgggatcgagctttctgtccccagaacaccaaaagctccaacggaaagaagcgaagaagccttcaggcagacttaaaccccgcactttggagggacaattcgatcccgaggtgggctcacaggcagaaggagcagaggatgaactggagatccgcttcaacgcgccatttaacataggcattaaactggcaggcgctcaatctctccagcatggacaaaccctcgggaagttcctgcaagatatcctctgggaggaggcagaagaaaccctggccaatgaa

SEQ ID NO: 250185 - DNA, 348 bp, synthetic construct
  misc_feature 1..348: note = Description of Artificial Sequence: Synthetic coding sequence
  source 1..348: mol_type = other DNA
atgcctgccccgtggaccatctgcagcctcctgctgctgagcgtgctttgtatggacctggcgatggcggggagctccttcctgagcccagagcaccagaaactgcagaggaaggaggctaagaagccatccggacggctgaagcctcgcactcttgaagggcagttcgacccagaagtcgggtcacaagccgaaggagccgaggatgaacttgaaattagattcaatgccccgttcaacataggcatcaagctggcaggggcccaatcgctgcagcatggccagacgctgggtaagttcctgcaggatatcttgtgggaggaggccgaagagactctcgcgaacgaa

SEQ ID NO: 250186 - DNA, 348 bp, synthetic construct
  misc_feature 1..348: note = Description of Artificial Sequence: Synthetic coding sequence
  source 1..348: mol_type = other DNA
atgcctgctccttggaccatctgcagcctcttgttgctctcagtcctttgcatggatctggccatggccggctccagcttcttaagcccagagcaccagaagctccaacgcaaggaagcgaagaaacccagtgggaggctgaagcctaggactctggagggccagtttgaccctgaggtgggcagccaagcagagggtgccgaggatgaattggagattcgctttaatgccccatttaacattggtataaaacttgccggcgctcagtctttgcagcacggacaaacactcggaaagtttctccaagatatcctgtgggaagaagctgaggagactcttgctaacgag

SEQ ID NO: 250187 - DNA, 348 bp, synthetic construct
  misc_feature 1..348: note = Description of Artificial Sequence: Synthetic coding sequence
  source 1..348: mol_type = other DNA
atgccagcaccttggaccatttgctcactgttgcttttgtccgttctctgtatggacctcgccatggccgggtcttcattcctgagtccggaacaccaaaagctccaacggaaggaagccaagaagccttctggacggctcaagcccaggacactggaggggcagtttgaccccgaggtgggaagtcaagccgaaggggcagaggacgagttggagatcaggttcaacgcgccattcaatatcggtattaagctggcgggggcccagtccctccaacatggtcagacgttaggcaagttccttcaagacattctttgggaggaggcagaagagaccttggctaacgag

SEQ ID NO: 250188 - DNA, 348 bp, synthetic construct
  misc_feature 1..348: note = Description of Artificial Sequence: Synthetic coding sequence
  source 1..348: mol_type = other DNA
atgcccgcaccttggacgatttgctcgctgctgctcctcagtgtgctctgcatggacttggccatggccggttcctccttcctgtcacccgagcatcagaaacttcagcgaaaagaagccaagaaaccatcggggagactaaaaccacgaactctagaaggacaatttgatccggaggtcggctcccaggcggaaggcgccgaagatgagctggagataaggtttaatgcccccttcaatatcggaataaaattggccggagcccagtcactacagcacggtcagactctgggtaaattcctgcaggatatcctgtgggaggaagccgaggaaactctggcaaacgaa

SEQ ID NO: 250189 - DNA, 348 bp, synthetic construct
  misc_feature 1..348: note = Description of Artificial Sequence: Synthetic coding sequence
  source 1..348: mol_type = other DNA
atgcctgccccctggactatctgctcactgctgctgctctcggttctgtgcatggatttggcaatggccggatcgtcgttcctctccccggagcatcaaaaactccaacgcaaggaagctaagaagccgtcgggaaggctcaagccacggacccttgaaggacagttcgacccggaggtgggctcccaggccgagggggccgaagatgagctggaaatcaggttcaatgcgcctttcaatattggcatcaaactggccggggcccagtcgctccagcatggtcagacccttggcaaattcctgcaagatatcctgtgggaggaagccgaggagactctcgcgaacgaa

SEQ ID NO: 250190 - DNA, 348 bp, synthetic construct
  misc_feature 1..348: note = Description of Artificial Sequence: Synthetic coding sequence
  source 1..348: mol_type = other DNA
atgcccgccccttggactatatgcagcctgctgctgctgtccgtgttgtgtatggatctcgcaatggcaggttcatcgttcctgtcacctgagcaccagaaattgcagcggaaggaggctaagaagccctccggtagactgaagccccgcacccttgagggtcagtttgacccagaagtgggtagtcaagccgaaggcgcggaagatgaactggaaatacgatttaacgcaccttttaacatcgggatcaagctggctggagcacaatccctgcaacatggtcagactctggggaaattcctgcaagatattctttgggaagaagcagaggaaacccttgcaaatgag

SEQ ID NO: 250191 - DNA, 348 bp, synthetic construct
  misc_feature 1..348: note = Description of Artificial Sequence: Synthetic coding sequence
  source 1..348: mol_type = other DNA
atgccagccccttggacgatctgtagcctcctcttactgtccgtgttgtgcatggatttagctatggccggctcctccttcctctcgcccgaacaccagaaactccagcggaaggaggctaagaaaccttccggccgcctaaaacctcgcacgctggagggccagttcgatcctgaggtgggttctcaggccgaaggcgccgaggacgaactcgaaatccggtttaacgcccctttcaacatcggcatcaaactggctggagcccaatccttgcagcatggacagacccttggcaaattcttgcaggatatactgtgggaggaggctgaagagactttggctaatgaa

SEQ ID NO: 250192 - DNA, 348 bp, synthetic construct
  misc_feature 1..348: note = Description of Artificial Sequence: Synthetic coding sequence
  source 1..348: mol_type = other DNA
atgccagctccatggacaatctgttcactcctgttgctttctgtactctgcatggatttagcgatggctggtagttcattcttgtcccctgaacatcagaaactacagcggaaggaggctaagaaaccaagtgggaggctgaaacctcgcactttggaagggcagttcgatccagaggtcggatcccaagcggagggcgcagaagacgagttagaaatcaggtttaacgcaccattcaacataggtattaagttggctggtgctcagagtctccaacatggccagacattaggtaagtttttgcaagatattttgtgggaggaggcagaagaaactttagctaatgaa

SEQ ID NO: 250193 - DNA, 348 bp, synthetic construct; identical to SEQ ID NO: 250164
  misc_feature 1..348: note = Description of Artificial Sequence: Synthetic coding sequence
  source 1..348: mol_type = other DNA

SEQ ID NO: 250194 - DNA, 348 bp, synthetic construct
  misc_feature 1..348: note = Description of Artificial Sequence: Synthetic coding sequence
  source 1..348: mol_type = other DNA
atgccagccccctggaccatttgctctctgctgctcttatctgtcctgtgtatggaccttgccatggctggttcgtcttttctctcccccgaacatcagaagctccagcgtaaagaggctaagaaaccttcgggccgactcaagccaaggacattggaaggccagtttgatcctgaggtgggttcacaggcagaaggggccgaggatgagcttgagatccgcttcaatgccccattcaacatcggtatcaagctggctggcgcgcagtcactccagcacggccagacgctgggtaagttcctgcaggatatcctatgggaagaggccgaggaaacgctggccaacgaa

SEQ ID NO: 250195 - DNA, 348 bp, synthetic construct
  misc_feature 1..348: note = Description of Artificial Sequence: Synthetic coding sequence
  source 1..348: mol_type = other DNA
atgcctgcaccctggactatctgctccttgctgctcctgtcggtgttgtgtatggatctggcaatggcgggaagcagcttcctctcaccagaacaccaaaagttgcagaggaaggaagcgaaaaagccgtcgggaaggctgaagccaagaaccctcgaagggcaattcgaccctgaggtggggtcgcaggccgaaggagccgaggatgaactggagatccggttcaacgccccgttcaatattggcatcaagctcgccggggcacaatccctgcagcatggccagactcttgggaaatttctgcaagacatcttgtgggaggaggcggaagaaacccttgccaacgag

SEQ ID NO: 250196 - DNA, 348 bp, synthetic construct
  misc_feature 1..348: note = Description of Artificial Sequence: Synthetic coding sequence
  source 1..348: mol_type = other DNA
atgcctgccccatggactatttgttcactgctcctgctcagcgtgctgtgtatggatcttgcaatggccggctcatcgttcctgtccccagaacatcagaaacttcaacggaaggaagccaagaagccaagcggacgccttaaacctcgcacgctggaaggacaatttgaccccgaggtgggtagccaagcagaaggggccgaagatgaactggaaatacggtttaacgcaccgtttaacattggaattaagctcgcaggtgcccaaagcctgcaacatggacagactctgggtaagtttctgcaggatattctttgggaggaagcggaagaaaccctcgccaacgag

SEQ ID NO: 250197 - DNA, 348 bp, synthetic construct
  misc_feature 1..348: note = Description of Artificial Sequence: Synthetic coding sequence
  source 1..348: mol_type = other DNA
atgcctgcgccttggaccatctgtagtctcctgctcctgtcggtgctctgtatggatctcgcaatggcaggctcgtccttcctttccccagaacaccaaaaacttcagagaaaagaagcaaagaagcctagcggtaggctcaagcctcgcaccctggaggggcaatttgacccagaagtgggttcacaggcggaaggtgccgaggacgaacttgagatacgatttaacgcacctttcaacatcgggattaaacttgccggggcacagtcgcttcagcacggtcagactctgggaaagtttctgcaggatattctgtgggaggaagcggaggaaactcttgctaatgag

SEQ ID NO: 250198 - DNA, 348 bp, synthetic construct
  misc_feature 1..348: note = Description of Artificial Sequence: Synthetic coding sequence
  source 1..348: mol_type = other DNA
atgcccgccccttggacaatttgttctctgctgctcctctctgtcctgtgcatggatcttgctatggccggatctagttttctgtcccccgagcaccagaagctgcagcggaaggaggccaagaaaccgtcgggacgcctgaagcctaggacccttgaaggccagtttgatcccgaggtgggatctcaggccgaaggagcagaagacgaactggaaatcagattcaacgcacctttcaacatcgggattaagctggcaggtgcccaatcgctgcaacacggtcaaacactgggaaagttcctacaggacattctttgggaggaggccgaggaaaccctggctaacgag

SEQ ID NO: 250199 - DNA, 348 bp, synthetic construct
  misc_feature 1..348: note = Description of Artificial Sequence: Synthetic coding sequence
  source 1..348: mol_type = other DNA
atgccggctccttggaccatctgctctctgctcctgctgagcgtgctgtgtatggacctggcaatggccggatcttctttcctttcgcccgaacaccaaaaattgcagagaaaagaggccaaaaagcccagcggaagacttaaacctaggactctggagggtcagtttgacccagaagtgggttctcaagccgaaggtgctgaagacgaacttgaaattcggtttaatgctccattcaacatcggtatcaaactggccggggctcagagtcttcagcacggtcagactctgggaaagtttcttcaggacatcctctgggaggaggctgaggaaacactcgccaatgaa

SEQ ID NO: 250200 - DNA, 348 bp, synthetic construct
  misc_feature 1..348: note = Description of Artificial Sequence: Synthetic coding sequence
  source 1..348: mol_type = other DNA
atgccggccccctggaccatctgctccctgctgctgcttagcgtgctgtgcatggatctcgcaatggcaggttcgtccttcctttcgcctgaacatcaaaagttgcaacgcaaggaagccaagaaaccatcgggtcgccttaagccacggactctggagggacaattcgatcccgaggttgggtcccaggcggaaggcgcggaggacgagcttgaaatccgatttaacgcacctttcaacattgggattaagttggcaggtgcgcaaagcctccagcacggccagactcttggcaagtttttgcaagatatcctttgggaggaagcagaggagacgcttgccaatgaa

SEQ ID NO: 250201 - DNA, 348 bp, synthetic construct
  misc_feature 1..348: note = Description of Artificial Sequence: Synthetic coding sequence
  source 1..348: mol_type = other DNA
atgccggccccctggaccatatgcagcctactgctactctctgtattgtgcatggatctagccatggctggttcctcctttctgagccctgaacaccaaaagttgcaaaggaaggaggccaaaaaaccgtcgggccggctaaagccccgaaccttggagggtcaatttgacccagaggtcggcagtcaggctgagggtgctgaagacgagctcgaaatcagattcaatgcgcctttcaacatcggcatcaagctcgcgggtgcccagtccctccagcacggtcaaacactgggcaagttcttgcaagacatactatgggaggaggctgaggaaacgctggcaaatgaa

SEQ ID NO: 250202 - DNA, 348 bp, synthetic construct
  misc_feature 1..348: note = Description of Artificial Sequence: Synthetic coding sequence
  source 1..348: mol_type = other DNA
atgccagcaccctggaccatttgctcccttctcctcctcagcgtgctttgtatggacctagcgatggcaggctctagcttcctctcccccgaacatcagaagttgcagcgcaaggaggccaaaaagccttcaggccggctgaaacctaggaccctggaaggacagttcgaccctgaggtgggatctcaagccgagggcgccgaagacgaactggaaatccgatttaatgcaccgtttaatatcggtataaagctagctggtgcgcagtcgctccagcacgggcagaccctagggaagttcctacaggatattttgtgggaagaggcggaggaaacgcttgcaaacgaa

SEQ ID NO: 250203 - DNA, 348 bp, synthetic construct
  misc_feature 1..348: note = Description of Artificial Sequence: Synthetic coding sequence
  source 1..348: mol_type = other DNA
atgcccgctccatggacgatatgttcactgctgcttctgtccgtgctgtgtatggacctggcgatggcaggatcctcctttctttcgcctgaacatcagaagctgcaaagaaaagaagcaaagaagccctctggacgccttaagccgcgaactctcgaaggacaatttgaccccgaagtcggcagccaggcggaaggagccgaagatgagctggaaattaggtttaatgccccattcaatatcggtattaagttggctggggcgcagagcctgcagcatggtcaaacccttggtaagtttcttcaggatatcttgtgggaagaagcggaagagactcttgcaaacgaa

SEQ ID NO: 250204 - DNA, 348 bp, synthetic construct
  misc_feature 1..348: note = Description of Artificial Sequence: Synthetic coding sequence
  source 1..348: mol_type = other DNA
atgcccgcaccttggaccatttgtagtttgctcctgttgagtgtcttgtgtatggatcttgccatggccggcagctcattcctttccccagaacaccagaagctgcaaaggaaagaggctaaaaaaccatctgggaggttgaagcccagaactctggaagggcaattcgaccccgaagtgggctcacaagctgaaggggccgaagatgagctggagatcagatttaacgcccctttcaatatcggaattaagcttgccggggcgcagagtctccagcacggtcaaactctcggtaaattcctgcaagatatactctgggaagaggctgaagagacactcgcaaacgaa

SEQ ID NO: 250205 - DNA, 348 bp, synthetic construct
  misc_feature 1..348: note = Description of Artificial Sequence: Synthetic coding sequence
  source 1..348: mol_type = other DNA
atgcctgcgccttggacgatctgttctctgctgctgctgtcagtcctgtgtatggacctggctatggctggaagctcctttctcagtccggagcaccagaaacttcaacgcaaggaagctaaaaaacccagtggacgcctaaagcccagaaccttagaaggtcagttcgacccagaggttgggtctcaggcggaaggcgccgaggacgaacttgagatcaggttcaatgctccgttcaacatcggaattaagctggcaggagcacaaagcctccagcacggccagacccttgggaaatttctacaggacattttgtgggaggaggcggaagagaccctcgctaatgag

SEQ ID NO: 250206 - DNA, 348 bp, synthetic construct
  misc_feature 1..348: note = Description of Artificial Sequence: Synthetic coding sequence
  source 1..348: mol_type = other DNA
atgcccgctccatggaccatttgcagcctgcttctgctgtccgtgttgtgtatggatctggcaatggcgggaagttcgttcctgtcaccggaacaccagaagctccaacggaaggaagcgaaaaaaccatccggacgtctgaagccaaggaccctggagggccagttcgaccctgaagtgggaagccaggccgaaggagccgaagatgaattggagatcagattcaacgcgccgttcaatattggcatcaagttggccggtgctcaatctctgcaacatggacagactctgggcaagtttctccaggacatattgtgggaggaagcagaggagactctcgccaacgaa

SEQ ID NO: 250207 - DNA, 348 bp, synthetic construct
  misc_feature 1..348: note = Description of Artificial Sequence: Synthetic coding sequence
  source 1..348: mol_type = other DNA
atgcctgcaccttggactatatgctcccttcttctcctttcagtcctgtgtatggaccttgcaatggcaggctcatcgttcctcagccccgagcaccaaaagctgcaacgcaaagaggcaaagaagccgtccggccgtcttaaacctagaactctcgagggacaatttgatcccgaagtgggatcacaagccgagggagcagaggacgagctggagatccgctttaatgcacccttcaatattggtatcaaactcgcaggtgcacagagcttgcagcatggtcagacccttggtaagtttctccaagatatcctgtgggaggaagcagaagaaacgcttgctaacgag

SEQ ID NO: 250208 - DNA, 348 bp, synthetic construct
  misc_feature 1..348: note = Description of Artificial Sequence: Synthetic coding sequence
  source 1..348: mol_type = other DNA
atgcccgctccatggaccatttgctccctgctactccttagcgtactgtgtatggacctcgcaatggctgggtcaagctttctctcaccagagcaccagaagctgcagagaaaggaggccaagaagcctagcgggagattgaagccgagaactctggaaggtcagttcgatccagaggtcggttcccaggccgaaggagccgaggacgagttagagataagattcaatgcaccatttaatattgggattaaactggccggggcacaatcactccagcacggacaaacgctcggtaagtttttgcaggacatcctgtgggaggaagccgaagaaacgctggccaatgag

SEQ ID NO: 250209 - DNA, 348 bp, synthetic construct
  misc_feature 1..348: note = Description of Artificial Sequence: Synthetic coding sequence
  source 1..348: mol_type = other DNA
atgccggcgccgtggactatctgttcacttctgctgctctcagtgctctgcatggacctggcgatggccggaagctcgttcctttcaccggaacaccaaaagctgcagcggaaagaagccaaaaaaccatcgggccggctgaagccgcgcacgctggaaggccaattcgacccggaggtcggaagccaggctgaaggagcagaggatgaactggaaatccggttcaatgctcccttcaatatcggaatcaagctggccggagcgcagtcgctgcaacacggacagaccctggggaagttcttgcaagacatcctgtgggaggaggccgaggaaactctcgcgaacgag

SEQ ID NO: 250210 - DNA, 348 bp, synthetic construct
  misc_feature 1..348: note = Description of Artificial Sequence: Synthetic coding sequence
  source 1..348: mol_type = other DNA
atgcctgcaccctggaccatctgttcattgcttctgctctcggttctttgtatggacttggcaatggcaggatcgtcctttctgagcccagaacatcagaagctccaaaggaaagaagcaaagaaaccttcgggacgccttaagcctagaacccttgaaggtcagttcgatccagaggtgggttcccaagctgaaggggcagaagatgaactcgaaattaggtttaacgcacctttcaatattgggattaagctcgcgggagcccagtcactgcaacacggtcagacccttggaaagtttctgcaagacattctctgggaggaggcggaagaaaccctggcgaatgaa

SEQ ID NO: 250211 - DNA, 348 bp, synthetic construct
  misc_feature 1..348: note = Description of Artificial Sequence: Synthetic coding sequence
  source 1..348: mol_type = other DNA
atgccagcgccctggacgatctgcagtttactactcctaagtgtactatgtatggatctcgccatggccggaagttcttttctctctcctgaacatcagaaactgcagcggaaagaggctaaaaaaccctccggacgcctaaaaccaaggacactcgaagggcagtttgatccagaagttgggtctcaggccgagggagccgaagatgaactggaaattcggtttaatgcaccatttaacatagggataaaactagcaggagctcagtctctgcagcacgggcagacactcgggaaatttctgcaggatatactatgggaagaagctgaagaaactctggccaatgaa

SEQ ID NO: 250212 - DNA, 348 bp, synthetic construct
  misc_feature 1..348: note = Description of Artificial Sequence: Synthetic coding sequence
  source 1..348: mol_type = other DNA
atgcctgcgccgtggaccatttgctcactgttgttgctgtcggtgctttgtatggaccttgcaatggcagggtcgtcctttctgtctcctgaacaccagaaattgcagagaaaggaagcaaagaaaccgtccggtcggctcaaacctcgaacgctggaaggtcaatttgaccccgaggtcggatctcaagcagaaggggctgaggatgaactggagattcgcttcaatgcgccattcaacattggcatcaagctggccggtgctcagtcgcttcaacatggacaaactttgggcaagtttttgcaagatatcctctgggaagaagccgaagagactcttgcaaacgag

SEQ ID NO: 250213 - DNA, 348 bp, synthetic construct
  misc_feature 1..348: note = Description of Artificial Sequence: Synthetic coding sequence
  source 1..348: mol_type = other DNA
atgcctgcaccctggactatctgcagcctcctgctgctgagtgttttgtgtatggatctggccatggccgggagttcctttctctctcctgagcaccagaagctgcaaaggaaggaggcaaagaagccatcaggccgactgaaacctagaacactcgaggggcaatttgatcccgaagtgggttctcaagcagaaggtgctgaggacgagctggagatcagattcaacgccccattcaacatcggcattaagctggcaggtgctcagagcctccagcacggtcagacccttggcaagttcctgcaggatatactctgggaggaggctgaggagaccctggccaatgag

SEQ ID NO: 250214 - DNA, 348 bp, synthetic construct
  misc_feature 1..348: note = Description of Artificial Sequence: Synthetic coding sequence
  source 1..348: mol_type = other DNA
atgcccgccccatggaccatatgttctttgctgctcctgtctgtcctctgtatggatttggccatggctggatcttcatttttgtcacccgagcatcagaagctccagcgcaaagaggctaaaaaacccagcggccgtctgaaaccccgcactctggagggacagttcgatcctgaggtgggctctcaggccgagggcgctgaagacgagctggagataaggtttaatgccccttttaacatcggaatcaagttggctggcgcacagtcactgcaacacggccagactttgggaaagtttttgcaggacatcctctgggaagaagctgaagagaccttggccaacgag

SEQ ID NO: 250215 - DNA, 348 bp, synthetic construct
  misc_feature 1..348: note = Description of Artificial Sequence: Synthetic coding sequence
  source 1..348: mol_type = other DNA
atgcctgccccgtggactatctgttccctgctgttgctgagcgtgttgtgcatggatttggcgatggctggctcctccttcctgtccccggagcatcagaagttgcaacgcaaggaagccaagaaaccttcaggacggttgaagccgcggacgctggaaggacagttcgacccggaggtggggtcgcaggctgaaggggccgaggatgaactggagatcagattcaacgcaccattcaacatcggcatcaagctcgccggagctcaatcactgcagcacggccagaccctggggaagttcctgcaggacatcctgtgggaagaagcagaagagactctggcaaacgag

SEQ ID NO: 250216 - DNA, 348 bp, synthetic construct
  misc_feature 1..348: note = Description of Artificial Sequence: Synthetic coding sequence
  source 1..348: mol_type = other DNA
atgcctgcaccttggaccatctgctcactgcttcttctttcggtgctgtgcatggaccttgccatggcaggatcgtcctttctttctcctgaacatcaaaagctccaacggaaggaagcaaagaagcctagcggacgtctcaagcctagaactctggaaggccagtttgatccggaggtcggttcccaggcagaaggagcagaggatgaactggagatcagattcaatgctccattcaacatcgggattaagctcgcaggggcacaatccctgcagcatggccaaacccttggaaagtttcttcaggatatcctttgggaggaagcagaagaaactctggcgaacgaa

SEQ ID NO: 250217 - DNA, 348 bp, synthetic construct
  misc_feature 1..348: note = Description of Artificial Sequence: Synthetic coding sequence
  source 1..348: mol_type = other DNA
atgccagcgccctggactatctgttcactgctcctgctcagcgtcctctgcatggaccttgccatggccggatcgtcgttcctgagccctgaacatcagaagctccagagaaaggaagcgaagaagccgtccggtcgccttaagccaagaaccctcgagggacaattcgatccggaagtgggatcgcaggctgagggagctgaggacgaacttgagatcagattcaacgcgccgttcaatattggcatcaagctcgcgggggcccagtcccttcagcacggacagactctcggcaagttccttcaggacattctctgggaagaggccgaagaaaccttggccaacgaa

SEQ ID NO: 250218 - DNA, 348 bp, synthetic construct
  misc_feature 1..348: note = Description of Artificial Sequence: Synthetic coding sequence
  source 1..348: mol_type = other DNA
atgccggcaccatggacgatttgctcactcctgttgctgtcagtgctttgtatggatcttgccatggccgggagttcttttttaagcccggaacatcagaaattgcaacggaaagaagccaaaaaaccttctgggagactgaaaccgagaacacttgagggtcagtttgatccggaagttggctcacaagcagaaggcgcagaagatgagctcgagattagatttaacgctccctttaatatcgggattaagctcgcgggcgctcaatccttgcaacacggacaaactttagggaagtttcttcaagatatactttgggaagaagcggaagaaacgctcgctaacgaa

SEQ ID NO: 250219 - DNA, 348 bp, synthetic construct
  misc_feature 1..348: note = Description of Artificial Sequence: Synthetic coding sequence
  source 1..348: mol_type = other DNA
atgccagcaccttggacgatctgttcactgctgctgctctcggtgctctgcatggacctggccatggcagggtcctcgttcttgagccccgagcatcaaaaactccagcgcaaagaagccaagaagccctcgggccggctgaaacctcggactctggaggggcaattcgacccggaagtcggatcacaggccgaaggagccgaggatgaattggaaatcagatttaacgctcctttcaatatcggaatcaagttggccggcgcccagtccctgcaacatggacagacgctcggtaaattcctccaagacatcctctgggaggaagcggaagagacgctggccaacgaa

SEQ ID NO: 250220 - DNA, 348 bp, synthetic construct
  misc_feature 1..348: note = Description of Artificial Sequence: Synthetic coding sequence
  source 1..348: mol_type = other DNA
atgccagccccttggaccatttgcagtctgctactgctgagcgttttatgtatggatctggccatggcgggctcgtcttttctgtcccccgagcatcagaagctgcagcgtaaagaggcaaagaagccatccggtagacttaagccacgcactctcgaaggccagttcgatcccgaagtgggcagccaagccgaaggcgccgaagatgagctggagattagattcaatgcgcccttcaacatagggatcaaactggccggcgctcaatccttgcaacacggacagacactgggaaaatttttgcaggacattctttgggaggaggcagaggaaactttggccaacgaa

SEQ ID NO: 250221 - DNA, 348 bp, synthetic construct
  misc_feature 1..348: note = Description of Artificial Sequence: Synthetic coding sequence
  source 1..348: mol_type = other DNA
atgccggccccgtggactatctgcagcctgctcctgctgtctgtcctgtgtatggacttggccatggcaggatccagcttcctgtccccagagcatcaaaaacttcaacgcaaggaagccaaaaaacctagcggacggctgaagccgagaacccttgagggtcagttcgatccggaggttggatcacaagctgagggagcggaggacgagcttgagatccggttcaatgctccgtttaacatcggaatcaaactcgccggagcacagtccttgcagcacggacagaccctggggaagtttctgcaagatattctgtgggaggaggctgaagaaacgttggcgaacgaa

SEQ ID NO: 250222 - DNA, 348 bp, synthetic construct
  misc_feature 1..348: note = Description of Artificial Sequence: Synthetic coding sequence
  source 1..348: mol_type = other DNA
atgcccgcgccgtggacaatttgctctctgctgttgctttcagtcctttgtatggacttagccatggctgggtcctctttccttagcccagaacatcagaagctgcagcggaaagaggctaagaagccctcaggacggctgaaacctcggacactggaaggccagtttgaccccgaggtggggtcacaggccgagggagccgaggacgagctggagatcaggtttaatgccccgttcaacatcggtatcaaactagccggcgcacagagtctgcagcacggtcaaaccctgggtaaatttcttcaggatattctgtgggaggaagctgaggagacgctggccaacgag

SEQ ID NO: 250223 - DNA, 348 bp, synthetic construct
  misc_feature 1..348: note = Description of Artificial Sequence: Synthetic coding sequence
  source 1..348: mol_type = other DNA
atgcctgcaccatggaccatctgtagtttgctcttgttgtccgtgctgtgtatggatctggctatggccgggtccagcttcttgagtccggagcatcaaaaattgcagagaaaggaggccaagaaaccaagcggtcgactgaagcctaggaccttagaaggccagttcgatccagaggtgggaagccaggccgaaggggctgaagacgagctggagatacgtttcaatgccccgtttaatatagggatcaaacttgctggtgcgcagtccctgcaacatggacagactcttggcaaattcctccaggatatactatgggaagaggccgaagagactcttgctaatgag

SEQ ID NO: 250224 - DNA, 348 bp, synthetic construct
  misc_feature 1..348: note = Description of Artificial Sequence: Synthetic coding sequence
  source 1..348: mol_type = other DNA
atgcctgcaccatggaccatctgctctctgctgctcctctcggtgctgtgcatggatcttgccatggcgggcagcagcttcctctcacctgaacaccagaagctgcagagaaaagaagccaagaaaccgagcggacgcttgaagccaagaactttggaaggccagttcgatccagaagtcggttcacaagctgaaggagccgaggacgaactggagattcgcttcaatgctcctttcaatatcgggatcaagctggccggagcgcagtcgcttcagcatgggcagaccttgggcaaattcctgcaagacatcctctgggaggaagctgaggaaaccctggcaaatgaa

SEQ ID NO: 250225 - DNA, 348 bp, synthetic construct
  misc_feature 1..348: note = Description of Artificial Sequence: Synthetic coding sequence
  source 1..348: mol_type = other DNA
atgccagccccatggacaatctgctcactgctgctgttgtctgtgttatgcatggacctcgctatggctgggagtagttttctctcgcctgaacatcaaaaattgcagaggaaagaggctaaaaagccatctggcaggctcaagcccaggactctcgagggccaattcgatccagaggtgggttcccaggccgagggggctgaggatgaattggagattaggtttaacgcccctttcaacatcggtatcaagctagcgggcgcccagtctttacagcatggccaaaccctcggcaaattcctacaagacatcctatgggaagaagcggaggaaacacttgccaatgag

SEQ ID NO: 250226 - DNA, 348 bp, synthetic construct
  misc_feature 1..348: note = Description of Artificial Sequence: Synthetic coding sequence
  source 1..348: mol_type = other DNA
atgccggcgccttggaccatctgctccctgctcctgttgtcagtcctgtgcatggatctcgcaatggccggatcgagctttctctccccggagcaccaaaagttgcagcggaaggaagcaaagaagccatctggtcgattgaaaccgcggactctcgaaggacagttcgaccccgaggtgggatcgcaggcagagggcgccgaagatgagctcgagatccggtttaatgctccgttcaacatcggtattaaactcgccggagcccagtccttgcaacatgggcagacccttggaaagtttctgcaagatattctttgggaggaagccgaagaaaccctggctaacgag

SEQ ID NO: 250227 - DNA, 348 bp, synthetic construct
  misc_feature 1..348: note = Description of Artificial Sequence: Synthetic coding sequence
  source 1..348: mol_type = other DNA
atgccagcaccctggaccatctgcagccttctgttgctttcagtgttgtgcatggaccttgcaatggccggcagtagctttctctcccccgagcaccaaaaactgcagaggaaggaagcaaagaagccatccggtcgcctgaagcctagaaccttggagggtcagtttgatccagaagtgggttcgcaagcggaaggagcggaggatgaacttgaaattcgttttaacgcaccatttaacattgggataaaactggccggggctcaatccctgcagcatggacaaaccctcgggaaatttctccaggacatactctgggaggaagccgaggaaactctggcaaatgaa

SEQ ID NO: 250228 - DNA, 348 bp, synthetic construct
  misc_feature 1..348: note = Description of Artificial Sequence: Synthetic coding sequence
  source 1..348: mol_type = other DNA
atgccagctccttggactatttgctccctattattgctgagtgttctctgcatggatctggcaatggcaggctcttcatttctctctcccgaacatcagaaactacagcggaaggaagccaaaaaaccttctggcagactgaaacctcgcaccttggagggacagttcgacccagaggtaggctcccaggccgaaggcgcggaagatgaattggagatccggttcaatgccccctttaatatcggtattaagctcgccggtgcccagtccttgcagcacggacagacccttggcaagttcctccaagacattctatgggaagaggccgaagaaactttggccaatgaa

SEQ ID NO: 250229 - DNA, 348 bp, synthetic construct
  misc_feature 1..348: note = Description of Artificial Sequence: Synthetic coding sequence
  source 1..348: mol_type = other DNA
atgcctgcaccatggacaatttgctcactactgctgctgagtgttttatgcatggatttggcaatggctggctcctccttcctctctccagagcatcagaagcttcagcggaaagaggcgaaaaagccctctggacgcttaaaacctaggactctggagggccagttcgatcctgaggttggtagccaagctgagggcgcagaagacgagctcgagattcggttcaacgcaccctttaatatcggtattaagttggcaggtgcacagtctctgcagcacggccaaacactcggtaagtttctgcaggacatcttgtgggaggaggctgaggaaactctggcaaatgaa

SEQ ID NO: 250230 - DNA, 348 bp, synthetic construct
  misc_feature 1..348: note = Description of Artificial Sequence: Synthetic coding sequence
  source 1..348: mol_type = other DNA
atgccggcaccatggacgatttgctctctgttactcctgagtgtgctgtgtatggatcttgccatggcaggctcaagcttcctgtcaccagagcatcagaagctccagcgaaaagaagctaaaaagcctagcggcagacttaaaccccgcaccctcgagggccagtttgatccggaggtcggatctcaggccgagggggcagaggatgaactggagatccgctttaatgcaccttttaacattggtataaagttggccggggcacagtcactgcagcacggacaaacgctgggcaagttcctccaggatatcctatgggaggaggctgaagaaacactggctaacgag

SEQ ID NO: 250231 - DNA, 348 bp, synthetic construct
  misc_feature 1..348: note = Description of Artificial Sequence: Synthetic coding sequence
  source 1..348: mol_type = other DNA
atgcccgcaccctggaccatttgctcactgctgctgctgagcgttctctgtatggatttggcaatggctggatcctcttttctgagccctgagcatcagaagcttcagaggaaggaagctaagaagcctagtggcaggctgaagccacggacactggaaggacagttcgatcccgaagtgggctcccaggccgagggcgccgaagatgagcttgaaattaggtttaatgcaccatttaacattggtattaaacttgctggtgcgcaatcactgcagcacggccaaactctgggaaaatttctccaggatattttgtgggaggaggcagaagaaaccctggctaacgag

SEQ ID NO: 250232 - DNA, 348 bp, synthetic construct
  misc_feature 1..348: note = Description of Artificial Sequence: Synthetic coding sequence
  source 1..348: mol_type = other DNA
atgcccgcgccatggactatttgttccctgctgcttctgtccgtcctgtgcatggatctggcaatggccggttcgtcatttctgagccctgaacatcagaagcttcagcgcaaagaggcaaagaaacccagtgggcggcttaaaccccgaaccctggagggacagttcgatccagaagtcgggagccaggccgaaggggccgaggatgagctcgagatccgctttaacgcaccctttaatatcggaataaagttggccggtgcccaaagcttgcagcacggacagacccttgggaaattcctgcaagacatcctctgggaggaagctgaggagacactagcaaatgag

SEQ ID NO: 250233 - DNA, 348 bp, synthetic construct
  misc_feature 1..348: note = Description of Artificial Sequence: Synthetic coding sequence
  source 1..348: mol_type = other DNA
atgccggcaccttggactatctgttccttgctcctcctgtctgtgctgtgcatggaccttgcaatggctggatcgagcttcttgagtccggaacatcagaagctgcaaagaaaggaagcaaagaagccctcaggacggctgaaaccgcgaaccctcgaagggcaattcgaccctgaagtgggaagccaggctgagggtgcggaggatgagctggagattcggtttaacgcccctttcaatatcggcatcaaactggccggggcacagtcactccaacatggccaaactctgggaaagtttctccaggacattttgtgggaggaagccgaagaaaccctggccaacgag

SEQ ID NO: 250234 - DNA, 348 bp, synthetic construct
  misc_feature 1..348: note = Description of Artificial Sequence: Synthetic coding sequence
  source 1..348: mol_type = other DNA
atgcctgcaccctggaccatttgctcgctgcttctgctttcggtcctctgtatggacctggcaatggccggatctagcttcctctcacccgaacatcagaaactccaaagaaaagaggcaaagaagcctagcggtcggctgaagccaaggactctcgaaggacaatttgatcccgaagtggggtcccaggcagaaggtgcagaagatgaacttgaaattaggtttaacgctccattcaatattggtatcaaacttgcgggagcacagtcgctgcagcacggacagactctgggcaaatttctccaagacatcctttgggaggaagctgaagaaactctggccaacgag

SEQ ID NO: 250235 - DNA, 348 bp, synthetic construct
  misc_feature 1..348: note = Description of Artificial Sequence: Synthetic coding sequence
  source 1..348: mol_type = other DNA
atgcctgcgccttggaccatctgctcattgttgcttctcagcgtcctgtgtatggatcttgctatggctggtagttcatttctaagtcctgaacaccagaagctccagcgcaaggaagctaagaagccttccggccgtttgaagccacgtaccttggagggtcagtttgaccctgaagtgggttcccaagcagaaggtgccgaggacgagctcgaaattcgctttaacgcccccttcaacatcgggatcaagcttgccggtgcccagtcgctccagcacggtcagaccttgggcaagttcctccaagacatcttgtgggaggaggccgaggagacgctggctaacgaa

SEQ ID NO: 250236 - DNA, 348 bp, synthetic construct
  misc_feature 1..348: note = Description of Artificial Sequence: Synthetic coding sequence
  source 1..348: mol_type = other DNA
atgcctgcaccttggactatatgtagcctgttactcttgtccgtgttatgtatggacctcgctatggccggaagcagcttcctttcccccgaacaccagaaacttcagcgcaaggaagccaagaagccatcagggaggttgaagccgcgcacgctggaaggtcagttcgatccggaggtcggaagccaggctgaaggcgctgaagatgagctggaaattcgcttcaacgccccctttaatattggaatcaagctagctggcgctcagtcattacaacacgggcagacactgggtaaatttttacaagatattctgtgggaagaggcagaggagaccttagctaatgaa

SEQ ID NO: 250237 - DNA, 348 bp, synthetic construct
  misc_feature 1..348: note = Description of Artificial Sequence: Synthetic coding sequence
  source 1..348: mol_type = other DNA
atgccagcaccgtggaccatctgttctctgctgctcctgagcgtgctctgcatggatttggcaatggcaggttctagctttctaagccctgaacaccagaaactgcagcgcaaggaggccaagaagcctagcgggcgtttgaaaccaagaactctggagggccaattcgatccggaggtagggtcacaggcagagggcgccgaagacgagttagaaatcagattcaatgcccccttcaatatcgggataaagctggccggggcacaatccctgcagcacggccagacccttggaaaattcctgcaggacatcctgtgggaggaggcagaagaaacacttgctaacgag

SEQ ID NO: 250238 - DNA, 348 bp, synthetic construct
  misc_feature 1..348: note = Description of Artificial Sequence: Synthetic coding sequence
  source 1..348: mol_type = other DNA
atgccagcaccctggaccatttgttccctactgttactgtccgttctgtgcatggatcttgcaatggcagggtcttcttttctcagccccgaacatcagaagttgcaacggaaggaagccaagaagccaagtggcagactcaaaccacggaccctggaagggcagttcgacccagaagttggatctcaggccgagggggctgaggacgaactggaaattcggtttaatgctccttttaacatcggcattaagttagctggcgcccagtccttgcagcacggccaaactctgggtaagttccttcaggatatcctgtgggaggaggccgaagagactcttgctaatgag

SEQ ID NO: 250239 - DNA, 348 bp, synthetic construct
  misc_feature 1..348: note = Description of Artificial Sequence: Synthetic coding sequence
  source 1..348: mol_type = other DNA
atgcccgccccatggactatttgttctttgcttctcttatccgtgctctgtatggaccttgctatggctggatcctcgtttcttagtccagagcaccagaagctgcagcgtaaagaagccaagaaacctagcggaaggctaaagcctcgcactttagagggtcaatttgaccccgaggtggggtcgcaagcagagggcgccgaagacgagttggaaattagatttaacgctcccttcaacatcggaattaagcttgccggagcccagtcactccagcatggccaaacactcggcaaattcctgcaagatatcctgtgggaggaagcagaggagacgttagcaaatgag

SEQ ID NO: 250240 - DNA, 348 bp, synthetic construct
  misc_feature 1..348: note = Description of Artificial Sequence: Synthetic coding sequence
  source 1..348: mol_type = other DNA
atgcctgcgccctggactatttgttccttgctcctgctgtccgtgctgtgtatggatcttgcaatggcaggtagctccttcctgagccccgagcatcagaaacttcagaggaaggaggccaagaagcccagcgggagactcaagccccgcacgctcgaaggccagttcgacccagaggtagggtcccaggccgaaggcgcggaagatgagctggagattcggttcaacgcaccatttaatatcggcattaagctggcgggtgcacaatcactgcaacatggccagactctcgggaaatttttgcaggacatcctctgggaggaggccgaggagacgctcgccaacgag

SEQ ID NO: 250241 - DNA, 348 bp, synthetic construct
  misc_feature 1..348: note = Description of Artificial Sequence: Synthetic coding sequence
  source 1..348: mol_type = other DNA
atgccggccccgtggaccatctgctcactgttgctcttatcagtgttgtgtatggatttggccatggctggatcttccttcttatcaccagagcaccaaaaactgcagcggaaagaagcgaagaaaccaagcggccgccttaaaccgaggacgcttgaaggccaatttgatcccgaagtaggtagccaggcagaaggcgcggaagacgagctggagattcgctttaatgctccttttaatatcgggattaaactcgcgggggctcaatccttgcaacacggtcaaactctcggcaaattcctacaggatattctgtgggaagaagcggaggaaactctggcgaatgaa

SEQ ID NO: 250242 - DNA, 348 bp, synthetic construct
  misc_feature 1..348: note = Description of Artificial Sequence: Synthetic coding sequence
  source 1..348: mol_type = other DNA
atgccagctccctggactatttgcagtctcctcttgttgtccgtgctctgtatggacctcgccatggccggctcctctttcctgagccctgagcaccaaaagcttcaaagaaaggaagctaagaaaccctctggccgcttgaagccacgaacactcgaagggcaattcgacccagaggtcgggtcacaagctgaaggggctgaagacgagttggagatccgatttaatgccccttttaacattggtatcaagcttgctggagcgcagagcctccagcacgggcagaccctgggtaagttcctgcaggacatcctctgggaagaagccgaggagactctcgcgaacgag

SEQ ID NO: 250243 - DNA, 348 bp, synthetic construct
  misc_feature 1..348: note = Description of Artificial Sequence: Synthetic coding sequence
  source 1..348: mol_type = other DNA
atgcctgcaccatggacgatttgttcattgttattattgagcgttttgtgtatggatttggctatggctggaagttcttttctttcacctgaacatcaaaaattacaaagaaaggaggctaaaaaaccatcaggaagattaaagcctagaactttagaaggacaatttgatccagaagttggaagtcaagcagaaggagctgaagatgaacttgaaattcgttttaatgcaccatttaatattggtattaaattggcaggtgcccaatctttacaacatggacaaactttgggaaaatttcttcaagatatactatgggaagaagccgaagagactttagcaaatgag

SEQ ID NO: 250244 - DNA, 348 bp, synthetic construct
  misc_feature 1..348: note = Description of Artificial Sequence: Synthetic coding sequence
  source 1..348: mol_type = other DNA
atgccagcaccctggactatatgctcactgctcctgctgagtgtactgtgcatggatctggcaatggcaggctcctctttcctttctcctgagcaccagaagctgcagaggaaggaggcaaagaaaccctctggtaggcttaagccacgcacgctggaaggtcagttcgatccagaagtgggcagtcaagccgaaggggcagaggatgagctggagattcggtttaacgctccgtttaatatcggcatcaaactggctggtgctcaaagtctgcagcacgggcagacactgggcaagtttcttcaggatatcctctgggaagaagctgaggaaactttggcgaatgag

SEQ ID NO: 250245 - DNA, 348 bp, synthetic construct
  misc_feature 1..348: note = Description of Artificial Sequence: Synthetic coding sequence
  source 1..348: mol_type = other DNA
atgcccgcaccctggaccatctgcagcctgctgctcttgtccgtgctgtgcatggatctggcgatggccggttcttcatttttatcccccgagcatcaaaagttgcagcgtaaagaggccaaaaagccctccggtcgcctgaagccgagaaccctggagggacagtttgaccctgaagttggcagtcaggcagagggcgcagaggacgagttggaaattagatttaatgctccttttaacatcggaatcaagctggccggcgcccagagtcttcagcatggtcagaccctgggcaaattcctgcaagacatcctgtgggaggaggcggaagagacattggccaacgaa

SEQ ID NO: 250246 - DNA, 348 bp, synthetic construct
  misc_feature 1..348: note = Description of Artificial Sequence: Synthetic coding sequence
  source 1..348: mol_type = other DNA
atgccagcaccatggactatctgctccttgttgctgctgtcagtactgtgtatggatctggcaatggctggatctagttttttatctcccgaacaccagaagctccaacggaaggaggctaaaaagccctcgggaagactgaagccaaggaccctggagggacagttcgatcctgaagtaggtagccaggccgagggagccgaggacgaactcgagatcagatttaatgcaccattcaatattgggattaagctggctggagcacaatcactgcagcacggccagacgctaggaaagttcctccaagatattctctgggaggaggcggaggaaaccctcgcaaacgaa

SEQ ID NO: 250247 - DNA, 348 bp, synthetic construct
  misc_feature 1..348: note = Description of Artificial Sequence: Synthetic coding sequence
  source 1..348: mol_type = other DNA
atgcctgcaccgtggaccatatgctctctgttactgctcagcgtgctctgcatggatctggctatggcaggttccagttttctatcacctgagcatcagaaactgcaaagaaaggaggccaagaaacccagtggaaggctgaagccccgcactctcgagggccagtttgaccccgaggtggggagccaggcagaaggagccgaggacgagctggagatccggttcaatgctccctttaatatagggatcaaactggcaggagcccagagtcttcagcatgggcaaacattgggtaagttcctacaggacattttatgggaggaggcagaagagacgttagccaacgag

SEQ ID NO: 250248 - DNA, 348 bp, synthetic construct
  misc_feature 1..348: note = Description of Artificial Sequence: Synthetic coding sequence
  source 1..348: mol_type = other DNA
atgcccgctccatggacaatttgctcactcctcctgttatcagtgctgtgtatggaccttgcgatggccgggtcttccttcctgtcacctgagcaccagaagctacagagaaaggaggcgaaaaagccctcaggacgactgaagccacgcaccctggaaggccagtttgaccccgaagtcggctcgcaagctgaaggcgccgaagacgaactcgaaattcgcttcaatgcccccttcaacatcggcataaaacttgcgggcgcccagtcacttcagcacgggcaaacacttggtaagttcttacaggacatcttgtgggaagaggcggaggaaacgctggccaatgaa

SEQ ID NO: 250249 - DNA, 348 bp, synthetic construct
  misc_feature 1..348: note = Description of Artificial Sequence: Synthetic coding sequence
  source 1..348: mol_type = other DNA
atgcctgccccatggactatttgctccctcctgcttctgtccgtcttatgcatggatctggcaatggccggcagcagctttctaagccctgagcaccagaagctgcagaggaaagaagccaagaagccaagcggaaggctaaaacccaggactctggagggtcagtttgaccccgaggttgggagccaggcagagggcgccgaggacgaactggagattcggtttaacgccccattcaatattggtattaagctggcaggcgcccagagcctgcagcacggccagaccctcggcaagttcctgcaggatatactctgggaagaggccgaggagactctggccaacgaa

SEQ ID NO: 250250 - DNA, 348 bp, synthetic construct
  misc_feature 1..348: note = Description of Artificial Sequence: Synthetic coding sequence
  source 1..348: mol_type = other DNA
atgccggccccttggacaatttgttcgcttctgctgctgagtgtattgtgcatggacttggctatggcaggaagctcgtttttgtcgcctgagcatcagaaactgcagcggaaggaggcaaagaaaccatccggcagacttaagccacgaactctcgagggtcaatttgaccctgaggtcggatcccaggccgagggcgctgaggatgagctagaaattcggttcaacgcccctttcaatatcggtataaagctcgcaggtgcccagtccctgcagcacggacaaacactgggcaagttcctccaggacattctgtgggaagaggcagaagagactcttgccaacgag

SEQ ID NO: 250251 - DNA, 348 bp, synthetic construct
  misc_feature 1..348: note = Description of Artificial Sequence: Synthetic coding sequence
  source 1..348: mol_type = other DNA
atgcctgccccctggacaatttgttctctgcttctgctgagcgtgttatgtatggatttggcgatggccggtagctccttcttgtcccccgagcatcaaaagctccaacgtaaagaggccaaaaagccttcgggtaggttgaagcctcgaacactggaggggcagttcgatccagaagtcggctcccaggcagaaggagccgaagacgagctcgaaatccgatttaatgctccatttaatatcgggattaagttggccggtgcccagtccctacagcatggacagaccttgggcaagttcctgcaagatattttgtgggaggaggccgaggagactctggccaacgaa

SEQ ID NO: 250252 - DNA, 348 bp, synthetic construct
  misc_feature 1..348: note = Description of Artificial Sequence: Synthetic coding sequence
  source 1..348: mol_type = other DNA
atgccagccccatggacaatctgttccctgcttctgctgagtgtgctgtgtatggatctggccatggccggcagttccttcctgagcccagaacatcagaaacttcagagaaaggaggccaaaaagccctctggccgcctgaagcccagaaccctggagggccagttcgaccccgaggtcgggtcccaggccgagggtgccgaggatgagctcgaaatacgctttaatgcaccttttaacatcggcatcaagcttgcgggggcccagtctctgcagcacgggcagacgttggggaagtttctgcaagacatcctctgggaagaggcagaggagaccctggctaacgaa

SEQ ID NO: 250253 - DNA, 348 bp, synthetic construct
  misc_feature 1..348: note = Description of Artificial Sequence: Synthetic coding sequence
  source 1..348: mol_type = other DNA
atgccggctccctggactatctgttccctgttgttgctcagtgtgctttgcatggacctggctatggcaggaagtagttttctctccccagagcatcaaaaactgcagcgtaaagaagccaaaaagcccagcggaaggctgaagcccagaaccctggaggggcagtttgaccctgaggtgggcagtcaggccgaaggcgccgaagacgagctggagattcgatttaatgcccctttcaatattgggattaaactagcgggtgctcagtcgctgcaacatgggcaaactctgggcaaattccttcaggacatcttgtgggaagaggccgaggaaacgctcgctaatgag

SEQ ID NO: 250254 - DNA, 348 bp, synthetic construct
  misc_feature 1..348: note = Description of Artificial Sequence: Synthetic coding sequence
  source 1..348: mol_type = other DNA
atgcccgccccttggactatttgctcactgttgctcctctcggttctgtgcatggatctggcaatggctgggtcgtccttcctgtcaccagagcatcaaaaacttcagcgaaaagaggccaagaagccatcaggaaggctgaagcctaggaccctggagggacaattcgatcccgaggtcgggtctcaggctgagggagcggaggatgagctcgagatccggttcaatgcgccatttaatatcggtattaagctcgcgggagcccagtcacttcagcacgggcagacactgggcaaattcctgcaggatattctttgggaagaggcagaggagaccctggcaaacgag

SEQ ID NO: 250255 - DNA, 348 bp, synthetic construct
  misc_feature 1..348: note = Description of Artificial Sequence: Synthetic coding sequence
  source 1..348: mol_type = other DNA
atgcccgctccgtggaccatttgctccctgctgcttctgagtgttctgtgtatggatctggcaatggccggatcttcattcttgagccccgagcatcaaaaactgcagcgaaaggaggctaagaagccaagtgggaggctgaaacccaggacgctggaaggacaattcgatcctgaagtcggctcacaggcggagggagctgaggatgagctcgagattaggtttaacgcgccgttcaatatcgggatcaagttggcaggggctcagtctctgcagcacgggcaaactctcggaaaattccttcaagatatcctgtgggaggaggcggaggagacattggcgaacgag

SEQ ID NO: 250256 - DNA, 348 bp, synthetic construct
  misc_feature 1..348: note = Description of Artificial Sequence: Synthetic coding sequence
  source 1..348: mol_type = other DNA
atgcccgccccctggaccatatgcagcctgctccttctctcagtcctgtgtatggacttggcaatggccggctctagtttcctgtcacctgagcatcagaagttgcagcggaaggaggccaagaagcccagcgggcggctgaagcctagaacactggaaggtcagttcgaccccgaggtggggtcccaggccgagggtgctgaggacgagcttgagattaggtttaacgctcccttcaacattgggatcaaactcgcgggggcccagagcttgcagcacggacagacactcggtaaattcctccaggacatcttgtgggaggaagcagaggagaccctcgccaatgag

SEQ ID NO: 250257 - DNA, 348 bp, synthetic construct
  misc_feature 1..348: note = Description of Artificial Sequence: Synthetic coding sequence
  source 1..348: mol_type = other DNA
atgcctgcaccatggacaatctgctcccttctgctgctgtcagttctttgtatggatctggccatggctggtagcagtttcctcagccctgagcaccagaagttgcagcgaaaggaagccaagaaaccctctgggagactcaaacccagaacactggaggggcagtttgaccccgaggtgggctctcaggctgagggcgccgaggacgagttggaaatccggttcaacgcaccattcaacatcggtatcaaactagccggcgcacagagtttacagcatggacagaccttggggaaattcctgcaagacattctgtgggaggaggccgaggagaccttggcgaatgag

SEQ ID NO: 250258 - DNA, 348 bp, synthetic construct
  misc_feature 1..348: note = Description of Artificial Sequence: Synthetic coding sequence
  source 1..348: mol_type = other DNA
atgcctgcaccttggaccatttgttctttgctcttgctgtctgtgctgtgcatggacctcgctatggctggatcatctttcctgagcccagagcatcagaaactccaaagaaaggaggccaagaagccatccggcaggttgaagcctcgtaccctcgagggccagttcgaccctgaagtcggctctcaggccgaaggtgccgaagatgagcttgagattcgtttcaacgctcccttcaatattggcattaagctggctggcgctcagtccctccagcacggacaaaccttgggtaaatttctgcaagacattctctgggaagaggctgaggaaacacttgctaacgaa

SEQ ID NO: 250259 - DNA, 348 bp, synthetic construct
  misc_feature 1..348: note = Description of Artificial Sequence: Synthetic coding sequence
  source 1..348: mol_type = other DNA
atgccggcgccttggaccatctgtagcttgctgctccttagcgtgctgtgtatggatctggccatggcggggtccagctttcttagccctgaacaccagaagctgcagcggaaagaggccaaaaagcccagcggtagactgaaacctcgaacactcgagggccagtttgatcctgaagtcggctcccaggccgaaggcgcagaagatgagttggagatccgatttaacgcgccattcaacatcgggatcaaacttgctggcgcccaatcactacagcatggtcagactctggggaagttcttgcaagacattctgtgggaggaggccgaggaaactctagccaacgag

SEQ ID NO: 250260 - DNA, 348 bp, synthetic construct
  misc_feature 1..348: note = Description of Artificial Sequence: Synthetic coding sequence
  source 1..348: mol_type = other DNA
atgccggcaccctggacaatttgctctctcctcttgctgtccgtgttgtgcatggatctggcaatggccggcagcagtttcctctcccctgaacaccagaaactgcaacggaaagaagcgaagaagccctcaggtcgtctcaaaccccgcactctagaagggcagtttgaccccgaggtgggttcacaggccgagggagcggaggacgagttggaaatacgctttaatgctcccttcaacatcgggatcaagctggctggcgcccagtcccttcagcatggacagacgctggggaaatttctccaagacatactctgggaagaggccgaggagaccctggctaacgag

SEQ ID NO: 250261 - DNA, 348 bp, synthetic construct
  misc_feature 1..348: note = Description of Artificial Sequence: Synthetic coding sequence
  source 1..348: mol_type = other DNA
atgcccgctccctggacaatatgctcacttctcctgcttagcgtgctgtgtatggatctggccatggctgggagttcattcctaagccctgaacaccagaaactgcagaggaaagaagcgaagaaaccctcgggccgcctcaagccgagaacattagagggccagttcgatccagaggtgggttcacaggccgagggggcggaagacgaactggaaattagatttaacgcccccttcaacatcggtattaaactagcgggggcgcagtcgcttcagcacgggcagacattgggcaaattcctgcaggacatcttatgggaggaggcggaggagaccttagctaacgaa

SEQ ID NO: 250262 - DNA, 348 bp, synthetic construct
  misc_feature 1..348: note = Description of Artificial Sequence: Synthetic coding sequence
  source 1..348: mol_type = other DNA
atgccggccccctggaccatctgttcacttctgctcctctccgttctgtgtatggacctcgccatggccggctcctccttcctctccccagagcaccagaagttgcagagaaaagaggcgaagaaaccatcaggaagacttaagccaaggacactggagggacagttcgaccccgaagttggtagccaggcagaaggcgccgaggacgagcttgagatcaggttcaatgctccttttaacatcggtataaagctcgccggagcccaatctctgcagcacggtcagactctcggaaaatttctccaggacatcctctgggaagaggcagaggagactctcgcaaacgag

SEQ ID NO: 250263 - DNA, 348 bp, synthetic construct
  misc_feature 1..348: note = Description of Artificial Sequence: Synthetic coding sequence
  source 1..348: mol_type = other DNA
atgccagccccgtggaccatttgtagcctcctgcttttgtctgtcctgtgcatggacctagccatggctggttcgtccttcctctctcccgaacaccagaagcttcagcgaaaggaagctaaaaagccatcagggcgcctgaaaccccgcactctggaggggcagttcgatccggaggttggctctcaagcagagggagctgaggacgagctggaaattaggttcaacgccccattcaacatcggcatcaaactggcaggggcacagagcttacagcacggacagacactgggcaaattcctgcaggatatcctctgggaagaggccgaggaaacactcgctaatgaa

SEQ ID NO: 250264 - DNA, 348 bp, synthetic construct
  misc_feature 1..348: note = Description of Artificial Sequence: Synthetic coding sequence
  source 1..348: mol_type = other DNA
atgcctgccccctggaccatctgttccctgctgctgttgtccgttctctgcatggacttagccatggccggcagttctttcctctcccccgaacaccaaaagctgcaacgcaaggaggcgaagaagccgagtggccgactgaagcctagaacattggaaggccaattcgaccccgaggtgggcagtcaggctgagggcgcggaggatgagctcgagatcagattcaacgcccctttcaatatcggtatcaagcttgccggcgcgcagtctttgcaacacggtcagaccctcggtaagttcctgcaggacatcctttgggaggaggctgaggagacccttgctaacgag

SEQ ID NO: 250265 - DNA, 348 bp, synthetic construct
  misc_feature 1..348: note = Description of Artificial Sequence: Synthetic coding sequence
  source 1..348: mol_type = other DNA
atgccggccccttggaccatttgtagcctgctgttgctctctgtcctctgtatggatttggccatggccggctcatcttttctcagcccggaacaccaaaagctgcagcgcaaagaagcaaagaaaccttcaggccgcttgaagccccgtaccctcgagggccaattcgatcctgaggtcggctcccaggctgagggggcagaggatgagctggaaatcagattcaacgccccatttaatatcggaattaagcttgcgggcgcacagtccctgcaacacgggcagactctggggaaatttctgcaggacatcttatgggaggaggccgaggagacccttgccaacgaa

SEQ ID NO: 250266 - DNA, 348 bp, synthetic construct; identical to SEQ ID NO: 250246
  misc_feature 1..348: note = Description of Artificial Sequence: Synthetic coding sequence
  source 1..348: mol_type = other DNA

SEQ ID NO: 250267 - DNA, 348 bp, synthetic construct
  misc_feature 1..348: note = Description of Artificial Sequence: Synthetic coding sequence
  source 1..348: mol_type = other DNA
atgcccgcaccatggacaatctgctcactcctgctattgtctgtgctctgtatggatctggcgatggcaggatctagtttcttaagtcctgaacatcaaaaactgcagcgcaaagaagcaaaaaaaccatccgggaggctcaagcctcgcactcttgaagggcagttcgatccggaggtaggatctcaggccgagggggccgaagacgaactagaaatacgatttaacgcacctttcaacatcggaattaaacttgccggggctcagagtctccagcatggacagacactcgggaaattccttcaggatatactttgggaagaggcggaggaaacacttgctaacgaa

SEQ ID NO: 250268 - DNA, 348 bp, synthetic construct
  misc_feature 1..348: note = Description of Artificial Sequence: Synthetic coding sequence
  source 1..348: mol_type = other DNA
atgcctgccccctggaccatttgtagtctgctcctccttagcgtactctgcatggatttggctatggccggcagttcattcctgtcccccgaacatcagaagctccagaggaaagaagctaaaaaaccatccggaaggctcaagcctcgtactcttgagggccagtttgacccagaggtgggctcccaagccgagggggctgaggacgaactggagattaggttcaatgctccattcaacataggaataaaactcgctggagcacagtcactgcagcacggccagaccttaggcaagtttctgcaggacatcctgtgggaagaagccgaagaaacgctcgcgaacgag

SEQ ID NO: 250269 - DNA, 348 bp, synthetic construct
  misc_feature 1..348: note = Description of Artificial Sequence: Synthetic coding sequence
  source 1..348: mol_type = other DNA
atgccggccccgtggactatctgcagtttgctcctactgtctgtattatgcatggacctggccatggctgggagcagctttttgagtccagagcaccagaagctgcaacgcaaagaagccaagaaaccctccgggcggctgaaacctcggaccttggagggccagtttgacccagaagttgggtctcaagcagaaggggcagaggatgagcttgagatacggtttaacgcacccttcaacatcggtatcaaactagctggagcccagtcgctgcagcatgggcaaactctcggtaagttcctccaggatattctctgggaggaggctgaggaaactcttgctaatgag

SEQ ID NO: 250270 - DNA, 348 bp, synthetic construct
  misc_feature 1..348: note = Description of Artificial Sequence: Synthetic coding sequence
  source 1..348: mol_type = other DNA
atgccggccccttggacaatttgctccctcctactcctgagcgtgctgtgtatggacctggctatggctggaagcagcttcctgagcccggagcatcaaaagctccagaggaaggaggccaagaaaccctccggtcgcttgaagccgcgaacccttgagggccagtttgacccggaggtcggttctcaggcggagggtgcggaggatgagttggagattcgctttaatgccccctttaacatcggcataaagctcgcgggagcccagagcctgcagcatggacagacccttggtaagttcctgcaggatattctgtgggaggaagctgaggagacgctagccaacgag

SEQ ID NO: 250271 - DNA, 348 bp, synthetic construct
  misc_feature 1..348: note = Description of Artificial Sequence: Synthetic coding sequence
  source 1..348: mol_type = other DNA
atgcctgctccgtggacaatctgcagccttttacttttatcagttctttgtatggatttagctatggctggttcttcttttttgtcgccagaacaccaaaagttgcagcgtaaggaggctaaaaagccatctggccgattgaagcccagaacccttgaaggacagttcgatccggaagttggatcacaagcagaaggtgcagaggatgaattagaaataaggtttaacgcgccttttaacattggtattaagctagctggcgctcaatcgttgcaacacggacaaactttgggtaaattcttacaggacattctgtgggaggaagctgaagagacacttgcaaacgaa

SEQ ID NO: 250272 - DNA, 348 bp, synthetic construct
  misc_feature 1..348: note = Description of Artificial Sequence: Synthetic coding sequence
  source 1..348: mol_type = other DNA
atgcccgctccgtggaccatctgttccctgctgctgctgtcagtgttgtgcatggatcttgcaatggcggggagctcgtttctgtcgcctgagcaccagaaactgcagagaaaggaagccaagaagccgtcaggacgcctgaaaccaaggactctcgagggacagttcgacccggaagtcggcagccaagccgagggggccgaggacgaactcgaaattcggttcaacgcgccattcaatatcggtatcaagctcgcgggagcccagtcccttcaacatggacagactttgggcaagttcctgcaagatatcctctgggaggaggcagaagaaaccctcgctaacgaa

SEQ ID NO: 250273 - DNA, 348 bp, synthetic construct
  misc_feature 1..348: note = Description of Artificial Sequence: Synthetic coding sequence
  source 1..348: mol_type = other DNA
atgcctgcaccatggacgatctgttctcttctcctcctgtccgtactttgtatggatctagccatggctggatccagtttcctgtcacctgaacaccagaaacttcagagaaaagaagctaaaaaaccttctgggagactaaagccaaggacactggaaggacagttcgatcctgaggtgggaagtcaagcggagggggcagaagatgaattggaaataagatttaatgcaccatttaacatagggattaaactggcaggagcacagtctctacagcatgggcagactctaggaaaattcttacaggacatactttgggaagaagcggaggaaacactcgcgaatgaa

SEQ ID NO: 250274 - DNA, 348 bp, synthetic construct
  misc_feature 1..348: note = Description of Artificial Sequence: Synthetic coding sequence
  source 1..348: mol_type = other DNA
atgcctgccccctggactatatgctctctgctgctacttagtgtcctgtgcatggaccttgctatggccggctccagtttcctgagccctgaacaccagaagctgcaaagaaaggaggccaaaaagccctctggacgccttaagccgcgaacgctggaaggacaattcgaccccgaggtgggatcccaggcggaaggcgcagaagacgagctggaaatccggttcaatgctccctttaatattggcattaagctggcaggagcgcagagcctgcagcatggacagacactcggcaaattcctccaggacattctgtgggaggaagccgaagagacgctcgcaaacgag

SEQ ID NO: 250275 - DNA, 348 bp, synthetic construct
  misc_feature 1..348: note = Description of Artificial Sequence: Synthetic coding sequence
  source 1..348: mol_type = other DNA
atgcctgccccatggactatttgtagccttcttctcttaagcgttctatgcatggacctcgccatggccggatcatcattcctttcaccagaacatcaaaagttgcaacggaaggaggcgaaaaaaccctcgggtcgcttaaagccaagaacacttgagggccaattcgatccagaagtcggatcgcaagctgaaggagcggaagacgaattggaaatacggttcaatgctccattcaatatcggaataaagcttgcgggagctcagtcgctccaacatggacagactctgggaaaattccttcaagatattctatgggaggaagctgaagaaactctcgcaaatgaa

SEQ ID NO: 250276 - DNA, 348 bp, synthetic construct
  misc_feature 1..348: note = Description of Artificial Sequence: Synthetic coding sequence
  source 1..348: mol_type = other DNA
atgccggcgccgtggacgatatgttcgttattactattatcggtattatgtatggatttagcgatggcgggttcgtcgtttctatcgccggaacatcaaaaattacaacgaaaagaagcgaaaaaaccgtcgggtcgactaaaaccgcgtacgctagaaggtcaatttgatccggaagtaggttcgcaagcggaaggtgcggaagatgaactagaaatacgatttaatgcgccgtttaatataggtataaaactagcgggtgcgcaatcgctacaacatggtcaaacgttaggtaaatttttacaagatatactatgggaagaagcggaagaaacgttagcgaatgaa

SEQ ID NO: 250277 - DNA, 348 bp, synthetic construct
  misc_feature 1..348: note = Description of Artificial Sequence: Synthetic coding sequence
  source 1..348: mol_type = other DNA
atgcctgctccttggaccatttgtagcctgctcttgctgtccgtactgtgcatggatctcgcaatggcaggttcatcattcctgtcgcctgagcatcaaaaacttcagcgcaaggaagccaagaaaccttctggccgtcttaagcctaggactctggaggggcaattcgatccggaagtgggatctcaggcagagggggcagaggatgaactcgagatccgtttcaacgcgccattcaatatcggcattaagctcgcaggggcccagtctttacagcatggtcagaccttggggaagttcctccaggacatcctgtgggaggaggcagaggaaacactcgccaatgag

SEQ ID NO: 250278 - DNA, 348 bp, synthetic construct
  misc_feature 1..348: note = Description of Artificial Sequence: Synthetic coding sequence
  source 1..348: mol_type = other DNA
atgccggcgccgtggaccatctgtagcctgctgttgctgtcagtgctgtgtatggatctggctatggctggatctagctttctaagccccgagcatcagaagctgcagcgtaaagaggctaaaaaacccagcggtaggcttaaacccagaaccttggaaggccaattcgaccctgaggtggggagccaggctgaaggagctgaagatgagcttgagatacgatttaatgccccttttaacatcggcataaagctcgccggagctcagtccctccagcacggacaaacactcggtaagttcctccaagatatcctgtgggaggaggctgaggaaaccctggccaatgag

SEQ ID NO: 250279 - DNA, 348 bp, synthetic construct
  misc_feature 1..348: note = Description of Artificial Sequence: Synthetic coding sequence
  source 1..348: mol_type = other DNA
atgcctgccccttggacaatctgttccctcctgcttctttcagtgctctgtatggacctggccatggccgggtccagttttctcagcccagagcaccagaaactgcagaggaaagaagccaagaaaccatcagggagactgaaacctcgcaccctcgagggacagtttgatcccgaagtggggagccaggccgagggagcagaagacgagttggaaatcagatttaacgcgccttttaacattggtatcaaattggccggtgcccagagcttacaacatggtcaaacactgggtaaattcttgcaggatattttgtgggaggaagcggaggagactctggccaatgaa

SEQ ID NO: 250280 - DNA, 348 bp, synthetic construct
  misc_feature 1..348: note = Description of Artificial Sequence: Synthetic coding sequence
  source 1..348: mol_type = other DNA
atgcctgcgccttggaccatttgttccctgctgctattgagcgtgctgtgtatggacctggctatggcaggcagcagctttctaagccccgaacaccaaaaactgcagcgcaaggaagcgaagaaaccctccggacggctcaagccacgcacactagagggccaattcgaccctgaagtaggctcgcaagctgaaggggcagaagacgaactcgaaatccgcttcaacgcccccttcaacatcggcatcaagcttgctggggctcagtctctgcagcatggtcagacactgggcaagtttctgcaagatatcctgtgggaagaggctgaagaaacactcgcaaatgaa

SEQ ID NO: 250281 - DNA, 348 bp, synthetic construct
  misc_feature 1..348: note = Description of Artificial Sequence: Synthetic coding sequence
  source 1..348: mol_type = other DNA
atgccggccccttggacaatctgctcacttctgctgctgtccgttctgtgcatggacctcgccatggccggcagtagcttcctatctcctgaacaccagaaactccagcgcaaagaagcgaagaagcccagcgggcgtcttaagccaaggacgctggagggccagttcgatcccgaagtcggctcccaggctgagggcgctgaggatgagcttgagattcgctttaatgccccattcaatatcggcatcaaactcgctggcgcccaaagcctgcaacacggccaaaccctgggtaagtttctgcaagacattctttgggaagaagccgaggaaacgctcgctaatgag

SEQ ID NO: 250282 - DNA, 348 bp, synthetic construct
  misc_feature 1..348: note = Description of Artificial Sequence: Synthetic coding sequence
  source 1..348: mol_type = other DNA
atgcccgcaccatggactatatgcagcttgctcttgctttctgtcttatgtatggacctggcaatggccggatcttcattcctatctcctgaacatcagaagctgcagcgtaaggaggccaagaagccatctggccggctgaagcctagaacattggaaggacagttcgacccggaagtgggttcccaagccgagggtgctgaagacgaactcgaaattcggttcaacgcacctttcaacataggaattaagctagctggcgcccagagtttacaacacgggcagacattgggcaagtttttgcaggacattctctgggaagaagcagaggaaaccttggccaacgaa

SEQ ID NO: 250283 - DNA, 348 bp, synthetic construct
  misc_feature 1..348: note = Description of Artificial Sequence: Synthetic coding sequence
  source 1..348: mol_type = other DNA
atgccagccccatggaccatctgtagcttgctgttgctgtctgtgctgtgtatggatcttgccatggctgggagttcttttctaagtcccgagcaccagaagctgcaacggaaagaggccaagaaaccgtctggcaggctgaaaccccgtaccctggaaggtcaattcgatcctgaggtaggttcgcaggcggaaggtgcagaggacgagctggagattagattcaacgccccttttaatatcggaattaagctcgcaggcgcccagtccctacaacatggtcaaacactgggaaaatttctgcaggatatactgtgggaagaagcggaagaaaccttggccaatgag

SEQ ID NO: 250284 - DNA, 348 bp, synthetic construct
  misc_feature 1..348: note = Description of Artificial Sequence: Synthetic coding sequence
  source 1..348: mol_type = other DNA
atgcctgctccctggacaatttgctcccttctattgctgtccgtgctgtgcatggatttggccatggcgggcagctctttcctgagtcccgaacaccagaaactccaaaggaaggaagcaaaaaaaccatccggaagactgaaaccaagaaccctggagggacagtttgacccagaagtgggcagccaagcagaaggtgcagaagatgaattggaaatacgcttcaatgccccgtttaatatcggcatcaaactcgctggcgcacaaagcctccagcatggacagactcttggcaaattcttgcaagacatcctctgggaggaggcagaagaaacactcgcaaatgaa

SEQ ID NO: 250285 - DNA, 348 bp, synthetic construct
  misc_feature 1..348: note = Description of Artificial Sequence: Synthetic coding sequence
  source 1..348: mol_type = other DNA
atgccagcgccatggaccatctgctcactgttgctcctgtccgtgctttgcatggaccttgccatggccgggtcatcctttctgtccccagaacaccagaagctccaacgcaaagaggcaaaaaaacccagtggtagacttaagcccaggacactggagggccaatttgatcccgaggtcgggagtcaggcggagggtgccgaggacgagctggagatacggttcaatgccccatttaacattggcatcaaactggcaggagctcagtctttgcagcacggccagactctagggaaatttcttcaggacattttgtgggaggaggccgaagagacattagctaatgaa

SEQ ID NO: 250286 - DNA, 348 bp, synthetic construct
  misc_feature 1..348: note = Description of Artificial Sequence: Synthetic coding sequence
  source 1..348: mol_type = other DNA
atgcctgcaccatggacgatctgctctctgctcctgctgtccgtgctctgcatggatttagcgatggctggaagtagcttcctttcaccagaacaccagaagctccaacgcaaggaggctaaaaaacctagtggccgccttaagcctagaacactcgagggacagttcgatcccgaagttggttcgcaggccgaaggtgccgaagatgaattagagatacggtttaatgccccgttcaatattgggatcaagctggctggggctcagtcccttcagcacggtcagactctcggtaagtttttgcaggacatattgtgggaagaagccgaggaaactctagctaacgaa

SEQ ID NO: 250287 - DNA, 348 bp, synthetic construct
  misc_feature 1..348: note = Description of Artificial Sequence: Synthetic coding sequence
  source 1..348: mol_type = other DNA
atgccggccccttggaccatttgttccctgctactgctgtctgtgctgtgcatggatctggcgatggccggttctagctttctgagcccggaacaccagaaacttcagcgaaaggaagcgaagaaaccgagcggtcgcctgaaaccacgcactctcgagggacaattcgacccggaagtcggcagccaagcagaaggcgctgaggacgagctggagattcgctttaacgccccctttaacatcggcattaagttggcaggcgcacaaagcctgcaacacggccaaaccctgggcaagttccttcaggacatcttgtgggaggaggcggaagagaccctggcaaatgag

SEQ ID NO: 250288 - DNA, 1503 bp, synthetic construct
  misc_feature 1..1503: note = Description of Artificial Sequence: Synthetic coding sequence
  source 1..1503: mol_type = other DNA
atgaggctgcccaaattgctgaccttcctgctctggtacctcgcatggctggacctggagtttatctgtactgtgctgggggcccccgaccttggacagcgccctcaaggcacaaggccagggctcgctaaagccgaggccaaagagcgccctccccttgcgcggaatgtttttcgccctggtgggcactcctacggcggcggggcgactaatgccaacgcccgggccaagggaggcactggtcagaccggcggacttacgcagccaaaaaaagatgaacccaagaaacttccgcctagacctgggggacctgagcctaagccagggcaccctcctcagacgaggcaggcaacagcccggaccgtcactccgaagggtcagttgccgggcggaaaggcacctccaaaggccggttctgtgccctcatcgttcctgctgaaaaaagccagagaacctggcccgcctagagaaccgaaagagcctttcaggccccctccgataaccccacatgagtacatgctgtccctgtataggacactgtccgacgccgaccgcaagggcggtaacagctccgtcaagctagaggccggactggccaacacgattacatcattcatcgacaagggacaggacgatagaggccctgtagtgcgaaagcagcgatatgtatttgatattagtgccctggagaaagatggcttgctcggtgccgagcttcgcatccttcgcaagaaaccatccgatactgctaaacctgcggcccccggtggcggacgggccgcccagctaaaattgtcctcatgtccctccgggcggcagccagcaagtcttctcgacgtccggtcggttcctggcctggatggtagtggttgggaggtgtttgatatctggaagctcttccgcaactttaagaacagcgctcagctgtgcttggaactggaggcatgggagaggggcagagctgttgatctccggggccttggcttcgatcgggccgcgagacaggtccacgagaaagctctgtttctggtttttggacgcacaaaaaagcgcgatcttttcttcaacgaaatcaaggcgaggtccggtcaggacgacaagaccgtttacgaatacctgtttagccagaggcggaagagacgggcacccctggccacccgccaagggaagcggccctccaagaatctaaaggcccggtgctctcgtaaagctctgcacgtgaacttcaaggacatgggatgggatgactggataatcgcgcctttggagtacgaagcttttcattgcgaaggactatgtgagttccccctccggtctcacctggaacccacgaaccacgctgtgattcagaccttgatgaactctatggaccctgagtcaactcctcctacgtgctgcgtgcccacacgactgtcccccattagtatcctgtttatcgatagtgctaacaatgtcgtgtataagcaatacgaagatatggttgtcgagtcttgcggttgcaga

SEQ ID NO: 250289 - DNA, 1503 bp, synthetic construct
  misc_feature 1..1503: note = Description of Artificial Sequence: Synthetic coding sequence
  source 1..1503: mol_type = other DNA
atgaggcttcccaaattgctcacttttctcctgtggtaccttgcttggcttgacttggagtttatctgcacagtattgggagcccccgatcttgggcaaagaccccaaggaacccgcccgggccttgcaaaggcagaggcaaaggaacgcccgcctttagcgcgcaacgtttttaggcccggaggccactcttacggagggggagccacaaacgcaaacgccagggccaaaggaggcacggggcagactggagggttgacccaaccaaagaaagacgaacccaagaaactgcctccccggcctggcggtcctgagcctaagcctgggcaccctccccaaaccaggcaggctaccgcaagaaccgtcacccctaagggtcaacttcccgggggcaaagctcctccgaaagctggcagcgtccctagctcctttttgttaaagaaagctagagagcctggcccacctcgcgagcccaaggaaccctttcggccaccgcctatcaccccacatgagtacatgctcagtctttatcggaccttatccgacgccgacaggaaaggagggaactcttcagtcaaattagaggcaggcttagctaacactatcacctctttcatagacaaaggtcaagatgatagaggccccgtggttaggaagcaaagatacgttttcgatatatcagcgctggagaaagacggcctcttgggggccgaactcaggatccttcgtaaaaagcctagcgacactgccaaaccagcagctccaggcggaggacgggctgctcagcttaaactgtccagctgtccctccggcagacagcccgcctctctcctggatgtgaggagtgtgccaggccttgatgggtctgggtgggaagtgtttgacatctggaaattgttccgcaattttaagaactctgcgcagctgtgcctggaactggaagcttgggagagaggcagagccgtagacctaagaggcttgggattcgatcgtgctgcaagacaagttcacgaaaaggctctgttcctggtcttcggcagaacgaagaagcgtgatctttttttcaacgaaatcaaggcaaggtctggccaggacgataagactgtctatgagtatctgttctcacaaagaaggaaaaggcgtgcaccactggccaccagacagggcaagagacctagtaagaacctgaaagccagatgcagtcgcaaggcattgcacgtgaacttcaaagatatgggctgggatgactggattatcgctccattggaatatgaggcctttcattgcgaaggattgtgcgagttccccctcagatctcacttggaacctacaaatcatgcagttattcaaaccctcatgaacagcatggaccctgagagcaccccaccaacctgctgtgtgccgaccaggctctccccaattagcatcctgtttattgacagcgcgaataatgtggtctacaaacagtacgaggatatggtggtggaaagttgcggatgccgg

SEQ ID NO: 250290 - DNA, 1503 bp, synthetic construct
  misc_feature 1..1503: note = Description of Artificial Sequence: Synthetic coding sequence
  source 1..1503: mol_type = other DNA
atgagactgccgaaactgctgacctttctgctgtggtatctggcctggctcgatctggagttcatctgtaccgttctgggagctccggatcttgggcagcgccctcaagggacacggccgggactggctaaagctgaagctaaggaaaggcctccgctggctcggaatgtgtttagaccgggcggacattcttacggaggcggagcgacaaacgcgaacgcccgagccaagggcggtaccggccagaccggggggttaacacaacctaaaaaggacgaacctaagaagctccctccaagacctgggggccccgagccgaagcctggccaccctcctcagactcgacaggcgaccgccagaaccgtaactcctaaaggtcagctgcctggtggcaaggcaccacccaaagcagggtcagtcccctcctccttccttctgaaaaaagcgcgggaaccgggcccaccccgagagccaaaagagcccttccgacccccccccatcacccctcacgagtacatgctatccctctacaggacactgagcgacgctgacaggaagggcggtaattcctccgtcaaattggaggcgggtttggctaacaccatcacttcgttcattgataaaggtcaggacgatcgcggcccagtcgtcaggaaacagagatacgtcttcgacatttctgcgctcgagaaggatggcctgctgggagccgagctgaggatccttagaaaaaagccaagcgacaccgccaaaccagccgcgccaggcggcggccgtgccgctcagcttaaactgtcttcttgtccctcaggtcggcaaccagctagcctcctagacgtgcgcagtgtgcccgggttggatgggtccggttgggaggtatttgacatctggaaactattcaggaatttcaaaaatagcgctcagctctgcttggagcttgaagcctgggaaaggggaagggccgtcgatctcagagggctgggctttgatcgagcagcacgccaggtgcacgagaaggcactgtttctggtattcgggcggaccaaaaaacgcgacttgttttttaacgagatcaaagccagatccggacaggatgataagaccgtatatgagtatctgttttcacaaagacggaaacggcgggcccctctcgctactagacagggcaaaagaccatccaagaacctcaaggcccggtgttcacgaaaggcactgcatgtgaattttaaagatatgggatgggacgactggatcatcgccccgctggaatacgaggcatttcactgcgaaggactctgtgaattccccctgcgctcccatctggagcccaccaatcacgctgtcatccaaacactgatgaattctatggatcccgagtcaacccctccgacatgctgcgttcccacccggctcagtccaatctcaatcctgtttatagactcagcgaacaatgtggtgtacaagcagtacgaggatatggtcgtggaatcctgcgggtgcaga

SEQ ID NO: 250291 - DNA, 1503 bp, synthetic construct
  misc_feature 1..1503: note = Description of Artificial Sequence: Synthetic coding sequence
  source 1..1503: mol_type = other DNA
atgagattgccaaagcttctcaccttcctcttgtggtacctggcatggctggatctggagttcatatgtaccgtactcggagctccggacctgggccagcgacctcaggggacacggcctgggctggccaaggcggaggcaaaggagcgaccacctctggcaagaaacgtgttccggcctgggggtcacagctatggcggaggagccaccaacgcaaacgcaagggccaagggggggactggccagacagggggacttacacaacctaagaaggacgaacccaaaaaactgcctcccaggccaggaggtccagagccaaagccgggccaccctccacagactaggcaagccacagcgagaacggttactccaaaagggcaactgccaggcgggaaagccccgcctaaggccggttctgtgccatccagcttcttactcaaaaaagctagggagcctggacctcccagggaacctaaagagccgttcaggcccccaccaatcaccccccatgaatatatgctgagtttgtatcgcacgctgtctgacgcggatagaaaagggggcaattcctcagtgaagctggaggctggattggccaataccatcacctcctttatcgacaaggggcaggatgaccgcggccccgtcgtaaggaagcagcgctacgtgttcgacatttccgctctcgaaaaggatggcctgctcggcgctgaacttaggattttgcgcaagaaaccctcagacactgccaagcctgccgcgccagggggtggccgggcggctcagctcaagctgtcttcttgtccctcagggaggcagccagcaagcttactggacgtgcgaagtgtgcccggactcgacgggagcgggtgggaagtcttcgacatttggaaactcttcagaaatttcaaaaactcggcacagctgtgcctggagcttgaggcttgggaacgcggcagggctgtcgacctacgaggtctcggttttgatcgggccgccagacaggtgcacgaaaaagcactgttccttgtgtttggtaggacaaagaaacgggatctctttttcaacgaaatcaaggcacgaagcggccaggacgacaagacagtttacgagtatttgttctctcagcggcgaaagcggcgagctccccttgccacaagacaaggcaaacggccttccaagaatctcaaggctcggtgcagcagaaaagcccttcatgtgaattttaaggacatgggatgggacgattggatcattgctcccctggagtatgaggcgttccattgtgaaggtctatgcgagttcccactacggtcccacttggaaccaacaaaccacgcagttatccagaccctcatgaactctatggatccagagagcaccccccccacctgctgcgtgcctacgaggctcagcccgattagcatcttgtttatcgacagcgccaataacgtggtgtacaagcagtatgaggacatggtggtggagtcctgcggctgtagg

SEQ ID NO: 250292 - DNA, 1503 bp, synthetic construct
  misc_feature 1..1503: note = Description of Artificial Sequence: Synthetic coding sequence
  source 1..1503: mol_type = other DNA
atgagattacctaaacttttgaccttccttctctggtatctggcctggctggacttggagttcatatgtacagtcttaggggcgcccgacctggggcagcgtccgcagggcacccgccctgggctggctaaggctgaggcgaaagaacgccccccgctggcacggaacgtatttaggcctggaggccactcttatggaggaggcgccacgaatgcaaacgctcgggccaagggaggaactggacagactggcggcctgacgcagcccaaaaaagatgaacctaagaagctgccaccgaggcctggggggcccgaacctaaaccaggacaccctccacagaccagacaggcaactgctaggactgttacaccaaagggccagttgcccggcggcaaggcccctccaaaggccggctctgtcccaagctccttcctcctgaagaaggccagggagccaggcccaccccgggaaccaaaggagccattcagacctcccccaattactccgcacgagtacatgctctccttataccggactctcagtgatgccgaccgtaaaggtggtaacagctccgtgaaactcgaagcaggcctggccaataccattacgtcctttatagacaagggccaggatgataggggtcctgtcgttagaaaacagcgatatgtgtttgacattagtgcgctggaaaaagatggcctactgggtgccgaactcagaatactgagaaaaaagccgagcgacactgccaagcctgccgcgcctggcggtggcagagcagcccaactgaagctgtctagctgccccagtgggcgtcagccagcttctttactcgacgtcagatccgtgcccgggcttgatggctcaggttgggaggtgttcgatatttggaaactcttcagaaactttaagaactccgcccagctgtgtctggagcttgaagcctgggagcgtggcagggctgttgacctgagaggactcgggtttgacagggctgcccggcaggttcacgagaaggctctctttctcgtctttggcagaactaaaaagagggacctcttttttaatgagataaaagcacgcagtggccaggacgataagactgtgtacgagtacctgttctcccagcggcggaagcgccgtgctcctctcgcaacgagacaggggaaacggcccagcaaaaatttaaaggccagatgctcccgaaaagctctgcatgttaatttcaaagacatgggttgggatgactggatcatcgcaccactcgagtacgaggcattccactgcgagggcttatgtgagtttccactccggagtcacttggagcctaccaaccacgccgtgatccaaaccttgatgaatagcatggacccagaatcaactcctccaacatgctgtgtgccgacgaggttgtcacccatctcaattctgtttatagactccgccaacaacgtggtgtataaacagtatgaggatatggtagtcgagagctgcgggtgccgc

SEQ ID NO: 250293 - DNA, 1503 bp, synthetic construct
  misc_feature 1..1503: note = Description of Artificial Sequence: Synthetic coding sequence
  source 1..1503: mol_type = other DNA
atgcgcctgcccaagctgctgaccttcctcctgtggtatctcgcctggctggatcttgagtttatatgcacggtactcggagccccagatttgggacagcggccccagggcacaaggcccggactggcaaaggccgaagccaaggaacggcctcccctcgcccgaaatgtgtttcggcctggaggccactcgtatgggggcggtgctactaatgcaaacgccagagccaaaggcggcacaggccagacagggggcctaacgcagccaaagaaagatgagcccaagaaactaccacctaggcccggtgggccagagccaaagccagggcaccccccacagacacggcaagctacagcccgtaccgtgacacctaaggggcagctcccaggtggcaaggccccacctaaagccggctcagtgcccagtagctttctcctgaagaaagcaagagagccaggaccccccagagaacctaaggaaccattcagaccaccccctattaccccccacgagtacatgttgtccctttaccgcactttgagcgacgccgacagaaagggggggaatagtagcgttaagctggaagctggactggctaacactattacgagttttatagacaagggtcaggacgaccggggccccgtggtcaggaagcagcgctacgttttcgacatctcggcactggaaaaggatgggttgctcggcgccgaactgcggattctgaggaaaaaaccctcagataccgctaaacccgcggctcctggtgggggccgggccgcacagctgaaactgagcagctgcccctccggcagacagccggcaagcctcctggatgtacgcagtgtccctggactggatggatcaggttgggaggtcttcgacatatggaagctatttcggaacttcaagaactctgcacagctgtgcctggagcttgaggcttgggagagaggcagggccgtagatctgagaggtctcggattcgaccgcgctgctagacaagttcatgaaaaggctctctttctggtgttcggcaggacaaagaagcgggatctgtttttcaacgagatcaaagctcggagtggtcaagacgataagaccgtgtacgagtatctgttctctcagcggagaaagcggcgggcccctctggcaacacggcaaggaaaaaggccatctaagaatctgaaagctcggtgttctagaaaagcccttcatgtgaactttaaggacatggggtgggatgactggattattgcaccgcttgagtacgaagcctttcattgtgaaggactgtgtgagttccctctaaggtcgcatttggagccgacaaaccatgccgtgatccagacattgatgaattccatggatccagaatcaaccccacctacctgctgcgttcctaccagacttagccccatctccatacttttcattgactccgctaacaacgtagtatacaagcagtacgaggacatggtcgtagaatcatgcgggtgtcga

SEQ ID NO: 250294 - DNA, 1503 bp, synthetic construct
  misc_feature 1..1503: note = Description of Artificial Sequence: Synthetic coding sequence
  source 1..1503: mol_type = other DNA
atgcgactgcctaaattattaacatttctcctgtggtatctagcctggcttgacctggagttcatatgtaccgtcctgggggcgccagatcttgggcagcgcccccagggcacaagacctggattggctaaagctgaggccaaagaacgtcctcctcttgctcgcaacgtgttcaggccaggtggccactcctatgggggtggcgccaccaatgcaaacgcccgggccaaggggggaactggacagacaggaggattaactcagcccaaaaaagatgaacctaaaaagctgccacctagaccgggggggccagaaccgaagccaggccaccccccacagacaaggcaggcgactgccagaactgtaactcccaaaggtcaactgcctggaggaaaggccccacccaaggcgggctcagtaccatcctcttttctgctcaagaaggccagggagcccggtcctccgagggaaccgaaagaaccattccggccccctccaataaccccacacgagtatatgctcagtctctatcgtaccctgagcgacgccgatcgaaaaggcggtaacagctctgtgaagctggaagccggactggccaacaccatcacgtcgtttattgataagggacaggacgatcgagggcccgtcgtcagaaagcaacgctacgttttcgacatcagcgctcttgagaaggacggattgctcggggccgaactgcgcatcctcaggaaaaagccaagtgataccgccaagccagccgcaccaggcggagggcgtgccgcccagctgaagctctcttcttgtccctccggcagacaacccgctagcctgctggacgtacggagtgtgccagggcttgacggctctggctgggaggtctttgacatatggaagctgttccgtaacttcaaaaacagcgcccagctgtgtctcgagttggaggcatgggagagggggagagcagtggacttgaggggcctgggcttcgacagggccgcgcgacaggtgcacgaaaaggcgctgttcctggtgtttgggcgcactaaaaagcgtgatctgtttttcaacgagatcaaggcccggagcggtcaggatgacaagaccgtctacgagtacctgttttcccagcgccgcaagcgtagagctccgctggccacacgacagggcaaacggccatcgaaaaatttaaaggccagatgcagtaggaaagcgctccatgtcaattttaaggatatggggtgggatgattggattattgctcctttggagtatgaggctttccactgtgaggggctgtgtgagttcccactgcggagtcacctcgagcccaccaatcacgctgtgatccaaaccctgatgaatagcatggatcccgagtcgactccacccacctgttgcgtcccgacaagactttcccctatcagcatactgttcatcgacagcgcaaacaatgtagtgtacaagcagtacgaggatatggtggtcgaatcctgcggatgtagg

SEQ ID NO: 250295 - DNA, 1503 bp, synthetic construct
  misc_feature 1..1503: note = Description of Artificial Sequence: Synthetic coding sequence
  source 1..1503: mol_type = other DNA
atgagactcccaaaactcctgacttttctgctctggtaccttgcgtggctcgacctggaattcatttgcactgtgctgggtgctccagaccttggccaacgcccccaaggtactcgcccaggccttgcaaaagcggaggcaaaggagcgcccgccgctggcccgaaacgtgttccggccggggggtcactcatacggcggtggggcaactaatgcaaatgcgcgggccaaagggggaaccggtcagactggcggcctcacccaacctaaaaaggatgagcctaagaaactgccaccccgcccaggcggccccgagccgaagcccggacatccgccacaaaccagacaggcaacggctcgaaccgtcacgccgaagggtcaactgccaggaggaaaggcccctccgaaagctggatctgtgcctagctcgttcttgctcaagaaggctcgggaaccaggtcctcctagggaacctaaggagccctttagacctccccctataacccctcacgaatacatgctttcactttatcgcaccctgtcagatgctgatcggaagggcggtaactcatccgtgaaacttgaagcagggctggccaacactatcacgtcgtttatcgacaaaggtcaggatgacagaggacccgtagtgaggaagcagagatacgtgtttgacatctccgcactggagaaggatgggcttctcggagccgaactccggattctccgtaagaagccttccgatactgcaaagccagccgcacctggaggcggaagagcagcgcagttgaagctgagctcctgtcccagtgggcgtcaacctgcatcgcttcttgacgtgcgttccgtgcctggtttggatggttcggggtgggaagtttttgatatatggaagttgtttcgtaactttaagaattcggcacagctttgtctggaacttgaagcgtgggaacgaggaagagcggtggacctcagaggtttggggtttgatcgcgccgcacggcaggttcacgagaaggcgctcttcctggtgttcggcaggaccaagaaacgtgacctgttctttaatgaaatcaaagcaaggtcgggacaagatgacaagaccgtgtacgaatacctgttttcccaaagacggaaaaggcgagcaccacttgcaactcgacaggggaaacgcccttccaagaatctcaaggcacgatgctcccgtaaagctcttcatgtcaacttcaaggatatgggatgggatgactggatcatcgcgccactggaatacgaggcctttcattgtgaagggctgtgcgaatttcctcttaggagccacctggagcccaccaaccatgcagttatccaaacgctcatgaactcaatggatcccgaaagtacccctccgacctgttgcgtcccgactcgtctcagcccgatctccattctcttcattgactcggcaaacaatgtcgtgtacaaacaatacgaggatatggtggtggagtcttgtggatgtcgg

SEQ ID NO: 250296 - DNA, 1503 bp, synthetic construct
  misc_feature 1..1503: note = Description of Artificial Sequence: Synthetic coding sequence
  source 1..1503: mol_type = other DNA
atgaggcttccaaaactgctgacgttcctgttgtggtacttggcctggctggacctggagttcatttgtaccgtgctgggagcccctgacctggggcagcggcctcaggggacgagacctgggcttgcaaaagcggaggcgaaagaacggcctcctctggcccggaacgtttttcggccagggggacacagctatggcggtggcgccacaaacgcaaacgcccgggccaaggggggaaccgggcagactggcgggctcactcagccgaagaaggacgagcccaagaaactacctccacgccctggcgggcccgagcccaaacccggacatccgccccagaccagacaggccactgcccgaactgtgacacccaagggacagctccctgggggaaaggcacctcccaaagccggcagcgtgccaagttcttttctcctgaagaaggctagggagcctggaccacctagagaacctaaggaaccgtttagacctcctccaatcacgccgcacgagtacatgctgtcactttatagaactctctccgatgcagaccgcaaggggggcaattcttccgttaagctcgaggcgggcttggcaaatacaattacgtctttcattgacaaaggacaagatgacagagggccggtggtgaggaaacagaggtacgttttcgacatctctgccttagaaaaagatgggttgctcggtgcagagctacgcatacttagaaaaaaacctagcgacacagctaagccagccgcccctggaggaggacgtgcagcacagctcaaactctccagctgtccatccggccggcagcctgcatctctgcttgatgtcagatctgtgccgggtctcgatgggtctgggtgggaggtatttgatatctggaaactgttccggaatttcaaaaactccgcccagctatgtctggagctagaagcctgggaaagaggccgggccgtggatctgcgggggctgggcttcgaccgggcagcacgccaagtccacgagaaagctctgtttctggtgttcggccggaccaaaaagagagacctgttcttcaacgaaattaaggcccgctctggccaggacgacaagaccgtctacgagtacctgttctctcagaggagaaagcgtcgagcgcctttagctacccggcaggggaaacgccctagtaaaaaccttaaggccagatgttcgcggaaggcacttcacgtaaatttcaaggacatggggtgggatgattggatcatagcgcccctcgaatacgaagcctttcattgtgagggcctttgcgagttccccctgcgctcccacctggagccaacaaatcacgctgtcattcagacgcttatgaattcgatggaccccgaatctacgcctcccacatgctgtgtgcctactcgtttgtcaccaatctccatcctctttatcgattctgccaacaacgtagtctacaaacaatacgaagatatggtggtcgagagttgtggttgtaga

SEQ ID NO: 250297 - DNA, 1503 bp, synthetic construct
  misc_feature 1..1503: note = Description of Artificial Sequence: Synthetic coding sequence
  source 1..1503: mol_type = other DNA
atgcgccttccaaaacttctcaccttcctcctctggtacctcgcatggctggacttggagtttatctgcaccgtcctgggggcacccgatctcggtcagcgaccccaaggaacgaggcctggtcttgcaaaggcagaagccaaggaaaggcctccgctggcacggaatgttttccgtcccggaggtcattcctacggtggaggagccaccaacgcgaacgcacgagctaaaggaggaacgggccaaacggggggccttactcaaccaaagaaggatgaacctaagaagctgcctcctcgccccggcggaccagaacctaaacctggtcatccgcctcaaaccagacaagcgactgcacgtactgtgactcccaagggccagcttcctggtggtaaggcacctccaaaggccggttcggtccctagctccttcctgctgaaaaaagcgcgtgaacctgggcccccaagagaacctaaggaaccatttagaccccctcccattactccacatgaatacatgctgtccctttacagaactctctcagacgcggatagaaaagggggtaattcgtccgtgaaacttgaagcgggacttgcaaataccattacctctttcattgataaagggcaagatgatcgaggacctgtggtgcgaaagcaaaggtacgtgtttgacatttccgcactcgagaaggatggacttttgggggccgagcttcgtatcctcagaaagaaaccttccgatactgcaaagcccgcggcgcctggcggaggaagagcagcacaactgaagttgtcctcgtgtccatcggggaggcaaccagcgtcgctcctcgacgtgcgctccgtgccgggactggacggctcgggatgggaagtgtttgatatctggaagctctttcggaacttcaaaaactcagcacagctttgtcttgagcttgaggcatgggaacgcgggcgagcagtggatcttcgtgggctgggatttgatagggcagcccgccaagtgcatgaaaaagcactgtttcttgtctttggtagaacgaaaaagagagatctgtttttcaacgaaatcaaggcgagaagcgggcaggacgacaagaccgtgtacgaatacctctttagccaacgtagaaagcgcagggcccctctcgccacgcgccagggcaagcgacccagcaaaaatctgaaggcacgatgtagccgcaaggccctgcatgttaactttaaagatatggggtgggatgactggatcatagcacctctggagtacgaggcctttcactgcgaggggttgtgtgagtttccactgaggtcccacctcgaacctactaaccacgcagtgatccagaccctgatgaacagcatggatcctgaatccacgccacctacttgttgtgtgccaacccgcctctcacctataagcattctgtttatcgacagcgccaacaacgtggtgtataaacaatacgaagatatggtggtggagtcatgtggttgcaga

SEQ ID NO: 250298 - DNA, 1503 bp, synthetic construct
  misc_feature 1..1503: note = Description of Artificial Sequence: Synthetic coding sequence
  source 1..1503: mol_type = other DNA
atgcgactgccgaagctgctcactttcctcctgtggtacctcgcatggctcgacctggagttcatctgcactgtgttgggtgctccggacctgggacagcggccccaagggacccgccccggtttggccaaggccgaagcaaaggaacgcccgccgctggcccgcaatgtgtttcgccccggcggtcactcgtacggcggaggggcgaccaacgcaaacgcgcgggccaaaggaggtactggacagaccggaggcctcacccagcctaagaaagacgagcctaagaagctgcccccacggccgggcggtcctgaaccgaagcctggacacccgcctcagactaggcaggccactgcgcggaccgtgactccaaagggccagcttcctggtggcaaggcacctccaaaggcgggatcagtcccgtcatctttcctgctgaagaaagcccgagagcccggaccacctcgggaaccgaaagagccgtttcgccctccaccgatcaccccacacgaatacatgcttagcctttatcggactctgtcggacgctgaccgaaaagggggaaattcttccgtcaagctggaagcaggactggccaacaccatcacctcgttcatcgacaagggccaagatgaccgtggaccggtggtgagaaaacagagatacgtgtttgacatcagcgctctggagaaagatggactgctgggcgcggagctgcgcattttgcgcaagaagccgtccgatactgcaaagcctgcggcgcccggcggaggcagggcggcccagttgaagctctcgtcgtgcccgtcaggaaggcagccagcatccctgctcgacgtgcggtccgtgccggggctcgacgggtcgggctgggaggtgtttgatatatggaaattgttccgaaatttcaagaacagcgcccaactttgtctggagctcgaggcttgggagagaggcagagccgtcgatctgaggggcctgggtttcgacagagctgctcggcaggtgcatgagaaggccctttttctcgtgttcggtcggaccaagaagcgagacttgttcttcaacgaaatcaaggcaaggtccggccaagatgataagactgtgtacgaatacctcttttcgcagaggaggaagcgccgggccccgctggcgacgaggcaggggaaacggccgtcaaagaacctgaaggctcggtgctcgcggaaggcgttgcacgtcaacttcaaggatatgggctgggacgattggattatcgccccactggagtatgaggccttccactgcgagggcttgtgcgaattcccgcttcggagccatctggagcctacgaatcacgcagtgattcagaccctgatgaactccatggacccagagtccactccacccacctgctgtgtgccgactcggctgagcccgatcagtatcctgttcatcgatagcgcaaacaatgtggtgtacaaacagtacgaagatatggtggtggaatcctgcggatgcagg

SEQ ID NO: 250299 - DNA, 1503 bp, synthetic construct
  misc_feature 1..1503: note = Description of Artificial Sequence: Synthetic coding sequence
  source 1..1503: mol_type = other DNA
atgaggctgcctaagttgctgacattcctcctgtggtatcttgcatggctcgatctggaattcatctgtaccgtcttgggcgcacccgacctgggtcagagaccccaaggtacacgccctggtctcgcaaaggcagaagctaaggaacgtccccctttggccagaaatgtgttccgcccaggtggccactcctacggaggcggagccaccaacgctaacgcaagggcaaaaggtggcaccggtcagactggtggactcactcaacctaaaaaagatgaaccaaagaaactcccccctaggcccggtggtccagaacccaagcccggtcaccctccacaaactagacaagccaccgccaggaccgtcacaccaaagggtcagttgcctggcggtaaggctcctcccaaagctggcagtgtcccttcttcttttttgctgaagaaggcccgcgagcctggccccccacgtgagcctaaggaaccctttagaccaccccctattacaccccatgaatacatgctttccctgtacagaactctctccgacgcagaccgcaagggtggcaactccagcgtcaaactcgaagccggcctcgcaaatactattaccagcttcatcgacaaaggccaagacgatcgtggccctgtcgtcagaaaacagaggtacgtctttgacatctctgccctggagaaagacggactcctgggtgccgagcttcgtatcctgcgtaagaaacctagtgataccgccaaacctgctgcacctggtggcggacgtgcagcacaactcaaactctcctcttgtccctcaggcagacagcctgcctccttgctcgatgtgagatccgtacccggactcgacggttccggttgggaggtctttgatatctggaagttgttcaggaacttcaagaactctgcccagctctgcctcgagctcgaggcatgggagagaggaagggctgtggacctgcgtggtcttggcttcgacagggcagcaaggcaggtgcatgaaaaggcactgttcctggtcttcggcagaactaagaagagagatctctttttcaacgagatcaaggccaggtccggacaggacgacaagaccgtatacgagtacctgttttctcagagaaggaagcgtagggcccctctggccacacgtcagggcaagcgcccatctaagaacctcaaggcccgttgctctcgcaaggccttgcatgtcaacttcaaagatatgggttgggacgactggatcatcgccccattggaatacgaagctttccactgcgagggcctgtgcgagttcccactgcgtagtcacctggagcctactaaccacgccgtcattcagaccttgatgaactctatggatcctgagtccacacctcctacctgttgtgtcccaactcgcctgtcacccatctccatactgttcatcgactccgccaataacgtggtgtacaagcagtatgaggacatggtggtagaatcctgcggctgcagg

SEQ ID NO: 250300 - DNA, 1503 bp, synthetic construct
  misc_feature 1..1503: note = Description of Artificial Sequence: Synthetic coding sequence
  source 1..1503: mol_type = other DNA
atgcgactgcctaagttgctgacctttctgctgtggtaccttgcctggctggacctcgaatttatctgcactgtactgggagccccagatttagggcagaggccacagggaactcgacctggcctggcaaaggccgaagccaaagaacgacctcccctcgctcgcaatgtgtttcgacctggcggccattcgtatgggggcggtgctacgaacgcaaatgctcgagcaaaaggcggaaccgggcagaccggtggcctaacccagccaaaaaaggatgaacccaagaaattgcctcctagacccggtggcccagaacctaagcccggccacccacctcagaccaggcaggccacagcacgaaccgtgaccccaaagggtcagctcccaggcgggaaagcgcctcccaaggctggctccgtgccctcctctttcctcctgaagaaagcccgagaaccgggaccaccaagagaaccgaaggagccctttcggcctcctcccatcaccccccacgaatacatgctctctctgtatcgtacgctctcagacgccgacaggaaggggggcaacagctcggttaaactggaagccggcctcgccaatactatcacttcattcattgacaaaggacaagatgatcgaggcccagttgtgaggaagcaaagatatgtgttcgacatcagtgcgctcgagaaagatggcttattgggagcggaactgcggattctgaggaaaaagccctcagacacagctaagcctgcagccccgggagggggccgggccgcccagcttaaactgagcagttgtccctccgggcgacagccagcgagcttacttgatgtccggtctgtgcccggcctcgatggcagcgggtgggaagtcttcgacatatggaaattgttccgtaattttaaaaattctgcgcaattgtgtttggagctggaggcatgggaaagaggccgtgcagttgacctgagagggctgggctttgaccgagccgctagacaggttcacgaaaaggcgctctttctggtgttcggccggaccaaaaaacgcgacttgtttttcaacgagattaaggctagaagcggacaggatgacaaaacagtgtatgagtatctgtttagccagcgcagaaagaggcgagctcccctagccaccagacagggaaagaggccttccaagaacctgaaggctcgatgttcacgcaaggcgctccatgtcaatttcaaagatatgggctgggatgactggataattgcacctttggaatacgaagcctttcattgcgaaggcctatgtgaattccccttgcgtagtcacttagaacccaccaatcacgccgtgattcagacgctaatgaattcgatggacccagaaagcaccccaccgacgtgctgtgtcccaacgaggctctctcccatctctatcctgtttattgactctgccaacaatgtcgtctacaagcagtatgaagatatggttgttgagtcatgtggctgtcga

SEQ ID NO: 250301 - DNA, 1503 bp, synthetic construct
  misc_feature 1..1503: note = Description of Artificial Sequence: Synthetic coding sequence
  source 1..1503: mol_type = other DNA
atgagattgcccaaacttctaacatttctcctttggtacctcgcctggctagatcttgaattcatatgtacggttctgggcgcacccgatctgggtcagcggccccagggcacacggcccggtctggcaaaagcagaagcaaaagaacggccccccctcgcacggaatgtgtttaggcccgggggccactcatatgggggcggcgctaccaatgctaacgccagagccaaggggggtactgggcagacgggtggtctcacccagccaaagaaagacgaaccgaagaaactgccaccgagacccggcggtcctgagccaaagccaggacatcccccgcagactcgccaggctacggccaggacggtgaccccgaaagggcagctgcccggcgggaaagcaccacctaaggcaggctctgtgccgagctcatttctcctcaaaaaggccagagagcctggtcctcctcgggagcctaaggagcctttcagaccgccacctattacccctcacgaatatatgctgtcgctctacaggaccctgtctgatgctgacaggaagggcggcaacagtagcgttaagctggaggcaggactggctaacaccattacctctttcattgataaggggcaagacgacagagggccagtcgtacgaaaacagcgttacgtgtttgacatcagcgccttggagaaagatgggctgttgggggccgagcttcgtatcttaaggaagaagccctccgataccgcaaaacctgctgcacctgggggaggcagggcagcccaactgaagcttagttcatgcccttcagggagacagccagcaagccttttggacgtgcgcagtgttccaggcctggacggatccggatgggaggtttttgatatctggaagttattccgaaacttcaaaaactccgcgcagctgtgtctagaattagaagcatgggaaagggggagggccgtcgacctccgcgggttgggcttcgacagggccgcgaggcaggtacatgaaaaggccctcttcctggtatttggtcgaacaaagaaaagagatttgttttttaatgaaataaaagcccgctcgggacaggatgataagactgtgtacgaatacctgttttcacagcgccgtaaacggcgagcccctctggccacacgacaaggcaaacggccgagcaagaacctcaaggcccggtgttcaagaaaggctttgcacgtgaacttcaaggacatgggctgggacgattggattatagcgcctctggaatacgaagcattccattgtgagggactctgtgaattcccactgaggagtcacctcgagccgacgaaccacgctgtgatacagaccctgatgaacagcatggatcctgagtccaccccacctacttgttgtgtcccaaccagactctctccgatctcaatcttattcattgattctgccaacaatgtagtttataagcaatacgaagacatggtggtagagtcctgtggctgtcgc

SEQ ID NO: 250302 - DNA, 1503 bp, synthetic construct
  misc_feature 1..1503: note = Description of Artificial Sequence: Synthetic coding sequence
  source 1..1503: mol_type = other DNA
atgcgactgcctaagctcttgaccttccttctctggtatctcgcctggttggacctggagtttatatgcactgtgctgggagcacctgacctcgggcagaggcctcagggaacaaggcccggcctggccaaggctgaagctaaggagaggccccctctcgcacggaatgtatttcgacctgggggccacagctatgggggtggcgccaccaacgcgaatgccagggccaaagggggcaccggacagacagggggcctgacccaaccaaagaaggacgaacctaagaagctgccgcccagaccggggggacccgagcctaagccaggacatccccctcagactagacaggctaccgcgagaactgtcactccaaaaggacagttgccaggaggcaaggccccaccaaaggccggctccgtgcccagtagctttctgctgaagaaggctcgagagcctggcccgccacgggaacccaaagaaccatttagaccgccacccatcactccacatgaatatatgttgagcctgtatcgaacactgtctgacgccgaccggaaaggcggtaacagctctgtgaaactcgaggcaggcctggctaataccatcacgagtttcattgacaaagggcaggatgatcgggggccagtggtgagaaagcaacgctacgtctttgatatctcagcattggaaaaagacggactgttgggcgccgagctcaggatcctcagaaagaaaccttccgatacagccaagcccgctgcgcctggtgggggccgggctgcccagcttaagctgagtagttgtcctagcggtcggcagccggcatctctgttggatgttcgctccgtaccagggctggacgggagcggctgggaggtgttcgatatttggaaactgttcaggaactttaaaaactctgcccaactgtgcctcgaattggaggcctgggaaaggggtcgggcagtggacctccggggactgggttttgatagagccgcccgccaggtgcacgaaaaagctttgtttttggtctttggtcggacaaaaaaaagagatctcttttttaacgaaattaaagcccgcagcggtcaggacgacaaaaccgtgtatgagtatctgtttagccaacgccggaagcggcgagcaccattggccactcggcagggaaaaagaccctctaagaacctcaaagctagatgttctcgcaaggccctccatgtgaattttaaggacatggggtgggacgactggatcatcgccccattggagtatgaggctttccactgcgaagggctgtgtgagtttcctctcaggagtcatttggaacctaccaaccacgccgtgatccaaaccctgatgaacagtatggatccggaatccacacctccaacttgttgtgtgccaacaaggctgagccctatctccatccttttcattgactcagccaacaatgtggtatacaaacagtacgaggatatggtggtggaatcctgtggctgccgg

SEQ ID NO: 250303 - DNA, 1503 bp, synthetic construct
  misc_feature 1..1503: note = Description of Artificial Sequence: Synthetic coding sequence
  source 1..1503: mol_type = other DNA
atgcgcctgccgaagctgctcacgttcctgctctggtatctggcctggctggatctggagttcatttgtacggttctgggtgctccggacttgggccagcgccctcaaggaacgcgaccgggtctagcaaaggcggaggctaaggaacggccgccgctcgcgcgaaatgttttccgccccggtggccacagctacggtggcggcgccactaacgcgaatgcccgtgcaaaggggggtaccggtcaaacgggaggtttgacccaaccaaaaaaggatgagcctaagaaattgccaccacgtcctggcggtccagagcctaaaccagggcatccgccacagacccgccaagccacggcgcgaactgtcacccctaaaggtcagctgccgggtgggaaggcaccaccgaaagccggctccgtgccttcatcatttttgctgaagaaagcgcgcgagccagggccgccacgcgagcctaaggagccgttcagaccgccaccaatcactccgcacgaatatatgctgagcctgtaccgcacactgtcagacgccgatcgcaaaggtgggaatagctcagttaagctggaggccggcctggccaacacgatcaccagcttcattgacaagggccaggacgataggggtccggtggttagaaaacaacgttacgtgtttgacatctccgctttagagaaagacggattactgggagcggaactccgaattttgaggaagaagcctagcgacaccgccaagcccgccgctccaggcgggggccgtgctgcacaactgaagctgagcagctgcccgtccggcagacagccggcgtctctgctggatgtccgctccgtcccagggctggatggaagcgggtgggaggtatttgatatctggaagctgtttagaaacttcaaaaattctgcccaactgtgcctggagctggaggcctgggaacgcggtcgcgctgtcgatttgcgcggcttgggtttcgaccgtgcggcacgccaggtgcacgagaaggcgctgttcctcgtgtttgggcgaacaaaaaagcgcgacctgttcttcaacgagattaaagcccgcagcggccaagatgataagacggtgtacgaatatctgtttagccagcgtcggaagcgacgagcgccgctggcgacccgccagggaaagagaccatccaaaaacctcaaagcccgctgcagccggaaagccctgcacgttaacttcaaagacatgggctgggatgattggatcattgctccactagaatacgaggctttccactgcgagggcttgtgcgaattcccattaaggtcccacctggagcctacaaatcatgcggtgatccagacacttatgaacagcatggacccggagagcacgcctccaacctgttgtgtgccaacccggctgagcccaatcagcattctgttcatcgactcagctaacaacgttgtctataaacaatacgaagacatggtggtggaaagctgcggttgtcgc

SEQ ID NO: 250304 - DNA, 1503 bp, synthetic construct
  misc_feature 1..1503: note = Description of Artificial Sequence: Synthetic coding sequence
  source 1..1503: mol_type = other DNA
atgcgactgccgaagctgctcacgtttctcctgtggtaccttgcctggctggatctcgagtttatctgtaccgtgcttggtgcaccagatctgggacaacgcccccagggtactcggcccggtctggccaaggccgaagcaaaagagcgcccgccccttgccagaaacgtctttaggcctggaggtcattcgtatggcggtggcgccacgaatgctaacgcaagagcaaagggcggaaccggacagactggtggacttactcaaccaaagaaagatgaacccaagaagttgccccctagacctggaggtcccgagccaaaacctggtcatcctccccagactcgccaagcgactgcaaggactgtgactcctaagggacaacttcccggcggcaaggcacctccaaaggcaggttcggtgcccagctcattccttcttaagaaagcgagggaaccaggaccaccaagggaacccaaggaaccattccggcctcccccaataaccccccatgaatacatgctcagcctgtaccgtactctgagcgatgccgatagaaagggtggaaactcctcggtgaaactggaagctggcctggcgaacaccattacgtcgttcattgacaaaggacaggatgacagagggccggtggtccgcaagcagcgatatgtctttgatatttcggcactcgagaaggatgggctcctgggtgcagaactgcggatccttcgaaaaaagccatcggacaccgcaaagcctgccgcccctggagggggccgggcagcgcaactgaaactttcgtcgtgtccttcgggccggcaacccgcttccctgcttgatgtgcggtccgtcccaggtcttgatggatccggatgggaggtgtttgatatctggaagctgtttagaaacttcaagaacagcgctcagctttgtcttgaacttgaagcatgggagcgcggtcgtgccgtggacctgcgcgggctgggtttcgatagagccgcaagacaagtgcatgagaaggccctgttcctggtgtttggaaggaccaagaagagagatctgtttttcaacgagattaaagcacgctcgggacaagatgataagactgtgtacgaatatctgtttagccagcgccgaaagcggcgagcccctcttgcaacgagacaggggaagaggccttctaagaatttgaaagcacgctgttcaaggaaggcgctccatgtcaactttaaagatatggggtgggacgattggataatcgcgcccctcgaatacgaggccttccactgtgaagggctctgtgagtttccgcttcgatcgcatcttgagcctacgaatcatgccgtgatccagaccctcatgaattcgatggatcctgaaagcacccctccaacgtgttgtgtccctactcgcttgtcaccaatctctatcctgttcattgattcagcaaacaatgtggtgtacaagcagtacgaggacatggtcgttgaatcgtgcggatgtcgg

SEQ ID NO: 250305 - DNA, 1503 bp, synthetic construct
  misc_feature 1..1503: note = Description of Artificial Sequence: Synthetic coding sequence
  source 1..1503: mol_type = other DNA
atgagactgcctaagctgctaacattccttctatggtacctagcgtggctggacctggagtttatctgcactgtcctgggagctccagatctcgggcaacgccctcagggaacccggcccggcttggctaaggccgaagccaaggagcgtcctccactggcgcgaaacgtgttccggcctggcgggcacagctacgggggcggagccacgaacgccaacgcccgagctaaaggcggtaccggtcagaccgggggactaacacagcctaaaaaggatgagcccaagaagctgcctcctcgacccggagggccagaaccgaaaccaggccatccccctcagaccagacaggctactgcaaggaccgtcaccccaaagggccagctgccgggcggaaaagcccctcctaaagccgggtccgtgccgagttcctttctcctgaagaaggctagggagcctgggccaccccgagaaccaaaagaaccctttcgccctcctccgattactcctcacgaatacatgttaagcctctatcgaaccttgagcgacgcagacagaaaaggtgggaattcaagcgtaaagctcgaggcgggtctggctaatacaattacttcgtttatcgataagggacaggacgaccggggtcccgtcgtgcgtaagcagcgctatgtgtttgatatttcagccctggagaaagacgggttgttgggcgccgagctgcggattctcaggaagaagccaagtgacacggcaaagcctgccgcaccaggcggtgggagagccgctcagctgaagctttccagctgccctagtgggcggcagcccgcaagcttgttagacgtaagaagcgttcccggcctagacggtagcgggtgggaagtgtttgatatttggaaactgtttaggaactttaaaaatagtgcacagttgtgtttagagctggaggcatgggaaagaggcagggccgtggatctgcgtggtctgggctttgaccgggccgccaggcaggttcatgaaaaggcgctgtttcttgtcttcgggcggactaagaaaagagacctgtttttcaacgaaattaaagcgcgatccgggcaggacgataagactgtgtatgagtatcttttcagccaaagacggaagcggcgcgcccccctggccaccagacagggaaagcgaccatcaaaaaacctcaaagcacgctgttctaggaaggctttacatgtaaacttcaaagatatgggctgggacgattggatcatcgccccacttgagtacgaggccttccattgcgagggtttatgtgagttccctctccggagccacctggagccgaccaatcatgcggtgattcagaccttgatgaacagcatggatccggaatccacacccccgacgtgttgtgtccctacccggctatccccgatttctatacttttcattgacagcgccaacaacgtagtgtataagcagtacgaagatatggtggtcgagtcatgcggatgtcgc

SEQ ID NO: 250306 - DNA, 1503 bp, synthetic construct
  misc_feature 1..1503: note = Description of Artificial Sequence: Synthetic coding sequence
  source 1..1503: mol_type = other DNA
atgaggcttcccaagctgctcacctttttgctgtggtacctcgcctggctggatctggaattcatttgtactgtgctgggtgcgccagatcttgggcaacgcccgcaggggacccggcctggactggcgaaagcagaggcaaaggaacgacccccattggcccggaacgttttcagacctggaggtcatagctacggaggaggtgccaccaacgctaacgctagggcaaaaggtggtaccggacaaactggaggcctgacccaacctaaaaaggatgaaccaaaaaagttgccgccacgtccaggaggccctgagcctaagcctggtcatccccctcagactagacaagcaactgcaagaactgtgactcctaagggacagctgcctggagggaaagccccgcctaaagcaggatcggtgccttcctcgtttttgctcaagaaggcacgtgagcctgggccgcctcgtgagcctaaggaaccttttcgacctcctcctattaccccgcatgaatacatgctctcactctacagaactttgtcggatgcggatagaaagggaggcaattcatcagtcaagctcgaggctggccttgcaaataccatcacctcattcattgacaaaggacaagatgatagaggtccagtggtgaggaagcagcggtacgtgtttgatatcagtgctcttgagaaggacggtctgctcggtgcagagcttcggattctccgcaagaagcctagcgacactgccaagcctgccgcgccaggaggaggacgggcggcgcagcttaagttgtcctcatgtccctccggacgccaacctgcgagcctgctggatgtccggtccgttcctggacttgatggctccggttgggaggtgttcgacatttggaagctgttcagaaactttaagaactcagcccaactctgtttggaactcgaggcgtgggaacgtgggcgggcagtggatctgcgcggtcttggctttgaccgtgcagcacgccaggtccatgagaaggcacttttccttgtgtttggcagaaccaaaaaacgagatcttttctttaatgaaatcaaggcaaggtcgggacaggatgataaaaccgtctacgagtatttgttttcccagaggagaaagaggcgtgcccctctcgccaccagacaaggaaagcgtccgtcgaagaaccttaaggcaagatgctcgcgaaaggccctccacgtcaatttcaaagatatgggatgggatgactggattatcgctccgctcgaatacgaggcgttccattgtgagggactgtgtgaattccctctgaggagccaccttgagccaaccaatcacgcagttatccagactttgatgaactctatggaccctgaatcgacgccccccacctgttgcgtcccaacgagactttctccaatatcgatccttttcattgactcggccaacaatgtggtgtacaaacaatacgaagatatggtggtggagtcctgcggatgtagg

SEQ ID NO: 250307 - DNA, 1503 bp, synthetic construct
  misc_feature 1..1503: note = Description of Artificial Sequence: Synthetic coding sequence
  source 1..1503: mol_type = other DNA
atgagacttcctaagctgctcacctttttgttgtggtaccttgcctggcttgatcttgagtttatctgcacggtgctgggagcaccagatttgggtcagcggccacagggcactcgccctggtctggcaaaagcagaagcaaaggaaagaccccctctcgcaagaaacgtctttcgaccgggaggacactcatacggtggaggtgccaccaacgccaatgcaagggcaaaagggggaactggacaaaccggggggctgactcaaccgaaaaaggacgagccaaagaaactcccacccaggcccggcggtccagaacctaagccaggtcatcctcctcaaactagacaggctactgcaagaaccgtcactcccaagggacaactgcctggcggaaaggcaccccctaaagctggatccgtgccgtcctcatttcttttgaagaaggcaagagaacccggccctccacgcgaacctaaggaacctttcagacctccaccaattacgccccatgaatacatgctgagcctttatcgaactctgtccgatgcggaccgcaaagggggaaactcaagcgtgaagttggaagcggggcttgcgaacaccattacctcctttatcgataaggggcaggatgatagaggtcccgtcgtccgcaagcaacgatacgtgtttgacattagcgcactcgaaaaggatggacttctcggagctgaactccgtattctgagaaaaaagccgagcgacactgcaaagccagcagccccaggtggaggtcgggcggcacagctgaaactttcctcctgtccatcgggccgacaaccggcctctcttctcgatgtgcgtagcgttccgggccttgacggaagcggttgggaagtgtttgatatttggaagttgttccgaaacttcaagaattctgcacaactttgtctggagctggaggcatgggaaaggggcagggctgtggacttgcgtggcctgggttttgaccgtgcagcaagacaggtgcacgagaaagcactgttcctggtgtttggtcggactaagaaacgcgatctcttcttcaacgagattaaagcccgctccggacaggacgataagactgtctacgagtacctgttctcacagaggagaaagcgaagggctcctctggcaactcgtcagggaaagcgcccatccaagaaccttaaggcccgctgctcaaggaaggcgcttcacgtcaactttaaggatatgggttgggatgactggataatcgcacccttggagtacgaggcattccattgcgaaggactgtgcgaatttcctctgcggtcgcatctggaaccaactaaccatgccgtgatccaaactcttatgaacagcatggatccggaatccacccctcctacttgctgtgtccctaccagactttcaccaattagcattctgtttatagatagcgccaacaatgttgtgtacaagcagtacgaggacatggtggtggaatcctgcggctgtcgc

SEQ ID NO: 250308 - DNA, 1503 bp, synthetic construct
  misc_feature 1..1503: note = Description of Artificial Sequence: Synthetic coding sequence
  source 1..1503: mol_type = other DNA
atgcgcctgccaaagctcctcactttcctgctgtggtacctcgcatggctcgacctcgaattcatttgtactgtgctcggtgctcccgatctgggacagcggccgcaaggaaccagaccgggtctggcaaaagctgaagcaaaggaacggccgcctctggcccggaacgtgttcaggcccggcggacattcatacggagggggcgcgaccaatgccaacgcacgggccaagggcggcaccggtcagaccggtggtctgactcagccgaagaaggatgagccaaagaaacttccgccccgccccggcggacccgagccaaagccgggccacccgcctcaaactagacaggctaccgcgcgcactgtcactccgaagggccagctgccgggcgggaaggctcccccgaaagcgggatcggtcccttcatcatttctgctcaagaaagcgcgagaacccggcccaccaagggaacctaaagaaccgttccggccgccgccaatcaccccacacgaatacatgctctcactgtacagaactctgagcgatgcggaccgaaaaggaggaaattcgagcgtgaagctggaagcgggactggccaacaccatcacctcgttcattgacaaggggcaagatgatcggggtccagtggttcggaagcagcggtacgtgttcgatatttccgcactggaaaaagacgggctcctgggagccgagctgcggattttgcggaagaagccttcggacactgccaagcctgcggccccgggaggcggccgcgcggctcagttgaaactgtcctcgtgcccgtcaggtcgccaaccagcctcactcctggacgtgaggtcagtgccaggcctggatggatcgggatgggaagttttcgatatttggaaacttttccggaactttaagaatagcgctcagctctgccttgagctcgaggcctgggaacgcggcagagccgtggatctgcgcggactgggcttcgaccgggccgccagacaagtccatgagaaggcgctgttcctcgttttcggacgcaccaagaaacgcgaccttttcttcaacgagatcaaggctagatctggccaggatgataagactgtctatgaatacctttttagccagcggaggaagcgcagagcgccgctggccactcggcaaggaaagcgcccttcgaagaacctcaaggcccgctgctcacgcaaagccctccacgtgaacttcaaagacatggggtgggacgactggatcatcgcgcctctggaatacgaagccttccattgcgaggggctgtgtgagtttcccctccggtcccatctcgagcctaccaatcatgcagtcatccaaaccctgatgaactccatggacccagagtcaaccccgcccacttgctgcgtgccgacccggctgagccccatctccatcttgtttatcgactcagctaacaacgtggtgtacaagcaatacgaggatatggtggtggagtcctgcggctgtcgc

SEQ ID NO: 250309 - DNA, 1503 bp, synthetic construct
  misc_feature 1..1503: note = Description of Artificial Sequence: Synthetic coding sequence
  source 1..1503: mol_type = other DNA
atgagactccccaagctactgactttcctattatggtatctagcttggctggatttagaatttatatgcactgtcttaggagcccctgacctcgggcagagaccccaggggactaggcccggattagccaaagccgaagctaaagaaaggcctcctcttgctcggaatgtttttcggcctggaggacattcgtatggggggggagcaactaacgctaacgcccgagccaagggggggacaggacagactgggggactgacacagcccaaaaaagatgagccaaaaaaattacctccaaggcctggagggcccgaacccaagccagggcacccccctcagacaaggcaggctactgctaggacggtaactcccaaagggcagctacccggagggaaagcaccacccaaagccgggtctgttccctcttctttcctccttaaaaaagctagagaaccaggaccacctcgggaaccgaaagagccctttagaccccctccaataacacctcacgaatatatgctaagtctttatagaacactatctgatgccgatcgcaaaggaggaaattcatctgtcaaattagaagccgggttagcaaatactatcacttcttttatagataaagggcaggacgaccgagggcctgtggttcgcaaacagagatatgtcttcgacatctctgcattggaaaaagatggactactaggagcagaacttcgaatccttaggaaaaagccatctgatacggctaaacctgccgctccaggaggagggcgcgccgcgcagcttaaactctcatcatgccccagtggaagacagcccgcctctcttctggatgtccgatctgtcccaggactagatggaagtggatgggaggtgttcgatatttggaaactatttcggaatttcaagaactctgcacagctttgtctcgaattggaagcctgggaaaggggacgcgccgtagatttacgcgggctggggttcgaccgggccgctcgccaggtgcatgagaaggccttattcctcgtctttggacgcactaaaaaaagggatttgttcttcaatgaaataaaggctcgatcggggcaggatgataaaacagtatacgagtatctgttttctcagaggcggaaaaggcgggctccactggccactcggcagggaaaaaggccatctaaaaacctcaaagctcgatgttctcggaaggccttacatgtaaatttcaaagatatggggtgggatgattggatcattgcccctctcgaatacgaagcctttcattgtgaaggactgtgtgaattcccactgcgctctcaccttgagccaacaaaccacgccgtgattcagacactgatgaattccatggatcccgaatccacacctcctacatgttgcgtgccaacacggctttccccaatatcgatccttttcattgatagtgccaataatgtagtgtataaacagtatgaagatatggtggtggaatcttgtggatgcagg

SEQ ID NO: 250310 - DNA, 1503 bp, synthetic construct
  misc_feature 1..1503: note = Description of Artificial Sequence: Synthetic coding sequence
  source 1..1503: mol_type = other DNA
atgcggttacccaaacttctgacttttttattgtggtatttggcctggctcgatttggaattcatttgtacggttctcggagccccggatttaggacagcgtccacaaggaacgaggcctggtcttgctaaggctgaagctaaagaaaggccaccattggcccgtaacgtctttaggccgggtggacattcatatggtgggggggctactaatgccaatgctcgggcaaaggggggtacaggtcagacgggcggtcttactcagccaaaaaaggacgagcccaagaaattgcctccaagacccggaggccccgagcccaagcccggacatccgcctcagacacgacaagctactgcgcgaacagttactcctaaaggtcaattgccaggcggcaaagctcccccaaaggctggatccgtcccaagttcatttttgcttaagaaagctcgggaacccggtcctcctagggagccgaaggagccattcagaccaccacccatcactcctcatgaatatatgctctccctctataggacattgtccgatgctgatcgcaagggtgggaattcaagtgtaaaacttgaagctggacttgctaacactattaccagctttatagataagggccaagatgaccgcggtccagttgttcgaaaacaaagatatgttttcgatatctcagctctcgagaaagacggtcttcttggtgccgagcttagaatccttaggaagaagccatctgatacagccaagcctgccgccccaggtggtggaagggcggctcagttaaagctctcgtcatgcccctccggtaggcagcctgctagtctcctcgatgtccgatcagtacccggacttgatggttcagggtgggaggtgttcgacatctggaaactctttagaaatttcaagaatagtgctcaactttgcctggaactcgaagcctgggagcgaggacgtgcagtagatttgcgtggtcttggcttcgatagggctgcgcgccaggtgcacgagaaggcactgttcttagttttcggtagaactaaaaagcgtgatcttttctttaacgagataaaggctcgttccggacaagatgataagaccgtttatgaatatcttttctcacaaaggaggaagcggcgagcaccattggctacacgccaaggaaaacgtccatctaagaaccttaaagcacgttgctcgaggaaggccttgcatgtaaatttcaaagatatgggatgggacgactggataatcgccccgttagaatatgaggcatttcattgtgagggtttgtgcgagtttcctctccggtcccaccttgaaccaactaaccacgctgttattcagactcttatgaactctatggatccagagtcaacaccgccaacgtgctgtgtacctactaggctgtctcctatctccatcctatttattgacagtgctaacaacgttgtatacaaacaatatgaggacatggttgttgagtcttgcggttgccgt

SEQ ID NO: 250311 - DNA, 1503 bp, synthetic construct
  misc_feature 1..1503: note = Description of Artificial Sequence: Synthetic coding sequence
  source 1..1503: mol_type = other DNA
atgcgcctcccaaagctgcttaccttcctgctgtggtacctcgcgtggttagatctcgaattcatctgcacagtgctgggagccccagacttaggtcagaggccccaaggtacaagacctggactagcgaaggcggaggccaaggagcggccccccctcgccagaaacgtctttcgacccggtggacactcatacggcggaggggctaccaacgcaaacgcaagggctaaaggcggaacaggtcagactgggggccttactcaacctaaaaaggacgagcccaagaagctccctcccaggcctggcggccccgagcccaaacctgggcacccccctcagacacgtcaggccacagcaagaacagtgacgcccaaaggccagctgccagggggaaaggcaccccctaaggccggctcagttccatcctcttttctcctgaaaaaggcccgtgaaccaggccctcctcgagagcctaaggaacccttccgcccccctccaatcactcctcacgagtacatgctttctctgtatcggaccttgagcgacgccgaccgtaaaggcgggaattctagcgtcaaattggaagcaggcctggctaacactattacctcctttattgacaagggtcaggatgaccgaggcccggtagtcagaaaacaaaggtacgtgttcgatatcagtgctctcgagaaggacggtttactgggagccgagctcaggattctgcgcaaaaagccctccgacactgccaagcccgccgcccccggcggagggagggcagctcagttgaagctgagttcttgcccatctggccgtcagcccgcgtccttgctggacgttaggtcagtgcctggtctcgacggatctgggtgggaggtattcgatatctggaaactatttcggaactttaagaattccgcgcagttgtgcctggaactggaagcctgggaacggggcagagctgttgacctgcgggggttgggattcgacagagccgcccgccaggttcacgagaaagcactctttctggtgtttggacgcactaaaaaaagagatctcttttttaatgagatcaaggcccgatctggacaggacgacaagactgtctatgaatatctgttttcacagcggcgaaagagacgggcgccgctcgcaacacggcagggcaagagacctagcaagaatcttaaagcccgttgctctcggaaggccctgcatgtgaactttaaagatatgggctgggatgactggattatagctcctctggagtacgaggcgttccactgcgagggcttgtgtgaatttccactaaggagccatctggaacccactaaccatgccgtgatacagacgctaatgaacagcatggatcctgagtctacaccccccacttgctgtgttcccactcgcttaagtcccatctccatactcttcatagattctgccaataacgtcgtctataaacaatacgaggacatggtggtcgaaagctgtggctgtcgt

SEQ ID NO: 250312 - DNA, 1503 bp, synthetic construct
  misc_feature 1..1503: note = Description of Artificial Sequence: Synthetic coding sequence
  source 1..1503: mol_type = other DNA
atgcgcctcccaaaattgttgacttttctgctctggtacctggcgtggttggacctggaatttatctgcaccgttcttggagctccagatttaggccaaagaccacagggaaccaggcctggcctcgccaaggccgaggccaaggagcgtccgcctctggcgagaaacgtgtttaggcccggcggtcattcctacggcggcggcgctaccaatgctaacgcccgcgcaaaaggcggaacagggcagacaggcgggctaactcagcccaagaaagatgagcctaaaaagcttccccccagacctggagggcctgagccaaagcccggacatccaccccaaactcgccaggccaccgccaggaccgttacgcctaaaggacagttaccgggtggaaaggccccgcccaaagccggttctgttccatcgtcctttctactgaagaaggcccgagaacctgggccccccagagaacccaaagagccattcagaccccctcctattactcctcacgaatatatgttatcactgtatcgcacactctccgatgccgacagaaagggggggaacagttcagtcaaactggaggcaggactggcaaatactataacttcttttattgataaaggccaggacgatcgcggccccgtggtaagaaagcagagatatgtttttgacatcagcgccctggagaaagacggcctcctcggggccgaattaaggatccttaggaagaaaccctccgataccgccaagccggcagctcccgggggtggccgagctgctcagttgaagctcagtagctgtccttctggacgtcagcccgcgtccttgttggacgtccgatctgtgcccggactggacgggtcaggctgggaagtttttgatatctggaaactgtttaggaatttcaaaaactcagcccagctgtgcctggagctcgaagcctgggagcgggggagagccgtggatctgcgaggcctgggatttgatcgggctgcgcgacaagtgcatgaaaaagccctgtttctcgtctttggtcgaacgaaaaagcgagatctgtttttcaacgaaatcaaagcgcgttccggccaggacgataagaccgtctacgagtacctgttctctcagcgccgcaaaaggcgagctcctctggccactcgtcagggcaaaaggccttctaaaaatcttaaggcccggtgttcaagaaaggccctccacgtgaactttaaagatatggggtgggacgattggattattgcccccctggaatatgaggccttccactgtgaaggcttgtgtgaattcccccttcggagccacttggagccaacaaatcacgccgtgattcagacactgatgaactcgatggaccccgaatcaacaccaccaacctgctgtgtgcccacacgtctgagccctatttctatactgtttatcgactctgcaaataatgtggtctacaaacagtatgaagacatggttgttgaatcctgcggatgccga

SEQ ID NO: 250313 - DNA, 1503 bp, synthetic construct
  misc_feature 1..1503: note = Description of Artificial Sequence: Synthetic coding sequence
  source 1..1503: mol_type = other DNA
atgcggctgccaaagctcctgacctttctcctctggtacctggcctggctcgatttggaattcatttgcactgtgttgggcgctccagacctcggccaaagaccgcagggcacgcgcccgggcctggccaaggccgaggctaaggagcgccctccgctggcgcggaacgtctttcgcccaggcggacactcatacggtggcggagccactaatgccaacgccagagccaagggaggcactgggcaaaccggaggtctgacccagcccaagaaggacgagccaaagaagctgcccccacgcccgggcggtccagaacctaaaccaggacacccaccgcagactcgccaggctaccgctagaactgtgaccccgaaaggacagctgcccggtggtaaggccccaccgaaggctgggtccgtccctagctccttcctcctcaagaaggcgcgggagcccggtccgcccagggagccgaaggaacctttccgcccacccccaatcaccccgcatgaatacatgctgtcactttaccgaactctgtcggatgctgaccgcaagggagggaactccagcgtcaagctggaagctgggctcgcgaacaccatcacttcattcatcgacaaagggcaggatgatagaggccccgtggtccggaagcaacgctatgtgtttgacatcagcgctctggagaaggatggactgctgggagccgagctgaggattctccggaagaagccgtccgatacggcaaaaccggctgcaccaggtggaggacgcgcagcccaactgaaactctcctcatgcccttcgggacggcaaccagcatccctgctggacgtgagaagcgtgccgggcctggacggctcgggatgggaggtgttcgatatttggaaactgttccgcaactttaagaattccgcgcagctctgcctcgaactggaggcgtgggagcgcggcagagcagtggacttgcgcggactggggtttgatcgggccgcccgtcaggtgcatgaaaaggcgcttttccttgtattcgggcggaccaagaaacgggatctcttcttcaacgaaatcaaagcccgctccggtcaggacgacaagactgtctacgagtatctcttctcccaacgccgcaaaagacgcgcgccgctggccacccggcagggaaagcggccgtcgaaaaaccttaaagcccgctgctcacggaaggcgctgcatgttaacttcaaggacatgggctgggacgactggatcatcgctcctctggaatacgaagcgtttcattgtgagggcctctgcgaattcccgctgcgaagtcacctcgagcctaccaaccatgccgtgatccagacgctcatgaattccatggatcctgagtcaactccaccgacctgttgcgtaccgacgcgcctgagccctatatcgatcctgttcatcgattcggccaataatgtggtgtacaagcaatacgaagatatggtggtggaaagctgtggctgcaga

SEQ ID NO: 250314 - DNA, 1503 bp, synthetic construct
  misc_feature 1..1503: note = Description of Artificial Sequence: Synthetic coding sequence
  source 1..1503: mol_type = other DNA
atgcggctgcccaaactcttaacgttcctcctgtggtaccttgcctggctggaccttgagtttatctgtacagtcttgggcgccccagacctcggccagcggccacagggcactagacccggcctggccaaggccgaggctaaagaaagacctcccctcgctcggaatgtattccgccccggcggacacagttatggcgggggtgctacaaacgctaatgcgcgtgcaaaggggggtacgggacagaccggtgggctgacccagccaaagaaggacgagcccaagaaactgcctcctcgcccgggcggccccgaacccaagccaggccatccaccccagacgcgtcaggcgacggcccgtactgttacacccaaaggtcagctgcccggagggaaagcgcctcccaaggcaggttcggtgcccagttcattcctcttgaaaaaggccagagaacctgggccacccagagagcctaaggagccttttaggccgccacccatcacaccacacgaatacatgttgtcactataccggaccttgagtgacgccgaccgaaagggcggcaattctagcgtgaagcttgaagctgggttggcaaataccatcaccagctttattgataaaggacaagatgaccgaggtccagtagtgcggaagcagagatatgtgttcgacatatctgccctggaaaaggatggcctgcttggggctgaactgcgaattctcaggaaaaagccttcagacaccgctaagcctgctgcgccgggaggaggccgggcggcacagctcaaactcagctcttgtccaagtggcagacagcccgcttctctgttggatgtgcgatctgtccccgggctggacggcagcggctgggaagtcttcgacatctggaagctttttaggaattttaagaattctgctcaactttgtctggaactggaagcctgggagaggggcagggcggtcgacctgaggggactgggcttcgatagagcagctaggcaagtccacgaaaaagcactgtttctggtctttggtcgcactaagaagagagacctgttctttaacgagatcaaggccaggagcggccaggatgacaaaacagtctacgagtacctgttctcccagcggagaaagaggcgggccccactggcaacacgacagggaaaaagacccagtaagaatcttaaggccagatgcagtcggaaagcccttcatgtgaatttcaaggacatgggctgggacgattggatcatagcccctttggaatacgaggcgttccactgcgagggcttatgcgaattcccgctccggagtcatctggaacccaccaatcacgctgtcatacagaccttaatgaattccatggaccccgaatcaacacccccgacatgctgtgtgcctacaagactgtcacctatatctatactttttattgactccgcaaacaacgtcgtgtacaagcaatatgaggatatggtcgttgagagctgcggatgtaga

SEQ ID NO: 250315 - DNA, 1503 bp, synthetic construct
  misc_feature 1..1503: note = Description of Artificial Sequence: Synthetic coding sequence
  source 1..1503: mol_type = other DNA
atgcgcctccccaaactcctcacctttcttctctggtacctggcatggttagatctggagtttatctgcacggtcctcggtgcgcctgacctcgggcagcggcctcaaggtacacgacccggtctggcgaaagctgaggcgaaagagcgacctcctttggctcgcaacgtgtttcgcccgggcggccatagctacgggggtggggcaacgaacgctaatgcccgggctaagggcggtacgggacagacaggcggcttaacacagcctaaaaaagacgagcccaagaagttgcctccaagacccggggggccagaacccaaaccaggacatcctccccaaactcgtcaggctacagctaggaccgtcactcccaaagggcagctgccaggtggaaaggctccccccaaggccgggtctgtcccgtcatcgttcctgctaaaaaaggccagggaacctggcccgcccagggagcccaaagaacccttccggccacccccaattacaccgcacgaatatatgttatccctctatcggaccctgtccgatgcggacaggaagggtgggaactcatccgtcaagttagaggccggcctcgccaatactattacatcctttattgacaaaggccaggatgaccgcggccctgtcgtacgaaagcagcgttacgtgttcgatatcagcgccctggaaaaggatgggctcctcggggccgagctacggatcctgagaaaaaaaccaagcgataccgctaaacccgcagctcctggcgggggcagagccgcgcaactgaaactaagctcctgcccatcaggtcggcaacccgcctctttgctggacgtgcgctccgtgcctggccttgatggctcggggtgggaagtgtttgacatttggaaactgttcagaaatttcaagaatagcgcacaactctgccttgagctggaggcatgggaaagaggaagggcagtggaccttcgcggccttggcttcgacagggctgcccggcaggtgcatgagaaagccctgttcctggtatttgggcgcaccaaaaagagggatctgttctttaatgaaattaaggcccggtctggtcaggatgacaaaacagtatacgagtacttgttctcacagaggaggaagagacgggcccctctcgccacgcggcaggggaagaggccatcaaagaacctcaaggccagatgcagccgcaaggctctacatgtgaattttaaagacatggggtgggacgactggataatcgctcccttagagtatgaagctttccattgcgaagggctatgtgaattccccttacggtcacacctcgaaccaacaaatcacgctgtaatccagacactgatgaatagtatggacccagaatccacgcccccgacctgttgtgtccctacaaggctcagcccaatcagcatcctgttcattgatagcgctaataatgtagtatataaacagtatgaggacatggtagtagaaagttgcggatgcagg

SEQ ID NO: 250316 - DNA, 1503 bp, synthetic construct
  misc_feature 1..1503: note = Description of Artificial Sequence: Synthetic coding sequence
  source 1..1503: mol_type = other DNA
atgaggctgccaaagctgttgacttttctcctgtggtacctcgcctggctggatctggaatttatttgtacagttctgggcgctcctgatcttgggcagaggccccagggcacacgaccagggcttgccaaagctgaggcgaaagaacggccaccactcgcgaggaatgtgttcagacccggcggacactcttatggcggcggcgccacaaacgctaatgcacgggctaaagggggtactgggcaaacaggcggcctcactcagcccaagaaggacgagccaaagaagcttccccctcgcccaggcgggcccgaaccaaagcctggacacccaccacagaccagacaggccactgctcggacagtgacacccaagggccaactgccgggcgggaaggcaccgccaaaggcagggtcagtaccctccagcttccttctgaaaaaggcccgggaacctggtccaccccgggagcccaaggaaccattcaggccccctccgattaccccccatgagtacatgctctctctgtacaggactttgtccgacgccgacagaaaaggtgggaattcttccgttaaactcgaggccggcttggccaacacgatcaccagtttcattgacaaggggcaggatgaccggggacccgtggtcagaaaacaaagatatgtgttcgacatttctgccctcgagaaggatgggctgcttggcgcagaactcagaattctccgcaagaagcccagcgatacggcaaaaccagctgcacccgggggcggtcgggccgctcagttgaagctgagttcttgcccctccggacgccagccagcttctctccttgacgtgagatctgtgccaggcctcgacggaagcggatgggaggtcttcgacatctggaaactgtttaggaactttaagaattccgcccaactgtgtctcgagcttgaggcttgggaaaggggcagggcggtggacttgcgagggctcgggtttgatagggccgctagacaggtgcacgagaaagctctctttttggtgtttggacggaccaagaaaagggatttgttcttcaatgagatcaaggcacgatctggccaggatgacaagacggtctacgagtaccttttttctcagcggcgcaagcgccgggctcctttggctacccggcagggtaagcgcccttccaagaatctgaaggctagatgtagcagaaaagctctgcatgtgaatttcaaggacatgggttgggacgactggatcatagctcccctggaatatgaggccttccactgtgaggggttgtgtgaattccccctgagaagtcaccttgaaccaacaaatcatgctgtaatacagaccttgatgaattccatggaccccgagagtacgccacctacttgctgcgtgcctactcggctgagtccaatctccatcctctttatcgattccgctaacaatgtggtgtacaaacagtacgaggacatggtggtggagtcctgtggttgtaga

SEQ ID NO: 250317 - DNA, 1503 bp, synthetic construct
  misc_feature 1..1503: note = Description of Artificial Sequence: Synthetic coding sequence
  source 1..1503: mol_type = other DNA
atgcgcctgccgaaacttctgactttcttgctgtggtatctcgcgtggctcgacctcgaattcatctgtactgtcctgggcgcaccggacctgggccaacggccgcagggtaccagacccggtctggcaaaggcggaggcaaaagaaaggcctccgctggcgcggaacgtgtttcgcccaggagggcattcgtacgggggaggagcaaccaatgctaacgcgagagcaaagggagggaccggacaaacgggagggctcacccagcctaagaaggacgagccgaagaagctgccacctcgccccggcggaccggagccgaagccggggcacccaccacagacccgccaggccaccgcccgcactgtgaccccgaagggacaacttccgggcggaaaggcgcctccgaaggccggctcggtgccgagctcattcctgctgaaaaaagcccgggagccagggcctcctcgagaaccgaaggaaccatttcggccgccgcctatcactccccacgagtacatgctctccctctaccgcactctgtcggacgcagaccggaagggcggtaattcaagcgtcaagttggaggcagggctcgccaataccatcacttccttcatcgataaagggcaagacgaccgggggcctgtggtgagaaagcagcgctacgttttcgatatctcggccttggagaaggatggtctgcttggagccgaattgaggatacttcggaagaaaccctcggataccgccaaaccggctgcgcccggcggcggccgggccgcacagctgaagctgagctcctgcccgagcgggagacaaccggcctcgctcctggacgtccgttccgtgccgggcctggacgggtcaggatgggaggtgtttgacatctggaaactgttccgcaatttcaaaaactcagctcagctttgcctggagctggaagcatgggaacgcggccgagcagtggatctgcggggactcggattcgaccgcgctgctcggcaggtgcacgagaaggccctgttccttgttttcggacgaactaagaagagggatttgttctttaacgagatcaaggcccgcagcgggcaggatgataagaccgtctacgaatacttgttttcacaacggagaaaacggcgggcaccactcgcaacgcgccagggcaagcgcccgtcaaaaaacttgaaggcgaggtgctcccgcaaagcattgcatgtgaacttcaaggacatgggatgggatgattggattatcgcccctctcgaatacgaggcgttccactgcgaaggtctgtgtgaattcccgctgcgctcacatctcgaaccaactaaccacgctgtgattcagacgctgatgaattcgatggacccagaatcgacgccgcctacctgctgcgtcccgacccggctgtcgccaatctcaatcctgttcatcgacagcgcaaacaacgtggtgtacaagcaatacgaagatatggtggtcgagtcctgtggctgccgc

SEQ ID NO: 250318 - DNA, 1503 bp, synthetic construct
  misc_feature 1..1503: note = Description of Artificial Sequence: Synthetic coding sequence
  source 1..1503: mol_type = other DNA
atgaggctgccaaaactccttacatttctcttgtggtacctcgcttggctggacttggagttcatctgcacagtgctgggagccccggacctgggccagagaccgcaaggcacaaggcccggtctggctaaggccgaagctaaagaaaggccacctctcgccaggaacgtcttccgcccagggggtcactcttatgggggcggggctacaaatgccaacgctcgggccaaaggaggaaccggtcaaactggcggactcacacagccgaagaaggacgagccaaagaagctgcctccgcgaccaggaggccctgaacctaaacctggccaccctcctcagacccgccaggccacagcccgcactgtgaccccgaaggggcagctgccgggcggtaaggcgcccccaaaggcaggctcagtgccttcttcgttcctgcttaaaaaggccagagagcctggcccaccaagggagccgaaggagccattcagaccccccccaatcacacctcacgagtatatgctgtccttgtacaggacactgtcagatgccgaccggaagggggggaatagctcagtgaaattagaggcaggcctggcaaacactatcacgagtttcatcgacaagggtcaggacgatcgaggaccagtggtgcgcaagcagaggtatgtcttcgacatcagcgctctggagaaggatggccttctgggtgccgaattgagaattctgagaaaaaagccctccgacacggccaaaccggccgcacccggaggggggcgggcagcacagctgaaactctcttcatgtccctccggacgtcagcctgcaagcctcctggacgtcaggagcgtaccagggcttgacggctccggctgggaggttttcgatatttggaaactatttagaaacttcaaaaattcagcgcagctttgcctagagttggaggcatgggagagaggacgagccgttgacctccgcggacttggcttcgatcgggcagctcgccaggtgcacgaaaaagccctctttctggtcttcggcagaacaaagaaacgtgatctgttctttaatgagatcaaagcgcgaagcggacaagacgataaaactgtctacgagtatttgtttagccaacgccgaaagcggcgtgctccactggccacccgacagggcaaacgacctagtaagaaccttaaagcccgctgtagccgcaaggcgctgcatgtaaactttaaggacatggggtgggatgattggattattgcacccctcgaatacgaagccttccactgcgagggtctgtgcgagttccctctgagatcacatttagagccaacaaatcacgccgttattcaaacgctgatgaattctatggacccggaatctaccccccccacatgctgcgttcccacacggctatccccaattagtattctattcatcgattcagctaacaacgtggtttataaacaatacgaggacatggtggtggaatcttgtgggtgtagg

SEQ ID NO: 250319 - DNA, 1503 bp, synthetic construct
  misc_feature 1..1503: note = Description of Artificial Sequence: Synthetic coding sequence
  source 1..1503: mol_type = other DNA
atgagattgccaaagctgctgacattcctgttatggtatctagcttggctggaccttgagttcatctgcaccgtcctgggcgcccccgacttagggcagcgtccccagggaacccgtcccgggctggcgaaggccgaggcaaaggagcgccctcccctggcgcgcaacgtatttaggccagggggacactcatacggtggcggtgcgactaacgcaaatgcaagagcaaagggtgggacaggtcagacgggaggactaacccagcccaaaaaggacgagccaaaaaaacttcctccacgcccaggggggccggagccaaaacccggtcatccgccacagactcggcaagctactgcgaggacagtcacccccaaaggacagcttccgggcggaaaagccccccctaaggctgggtcggttccttcatctttcctgctgaagaaagctcgagagcctggtccacctagggagcccaaagaaccctttcggcctccccccatcacaccccatgagtacatgctgtctctctaccgcacgttgtcagatgctgaccgcaaggggggcaacagttcagttaaactcgaagccggtctggccaatacgatcacttccttcatagataaagggcaggacgaccgcgggcccgtggtgagaaaacagcggtatgtgttcgacattagcgctctcgaaaaagatggtcttttgggtgccgagcttcggattttaagaaaaaaaccatcggacaccgccaagcccgctgctcccgggggcgggagagccgcgcagctgaagctaagcagctgccccagcggcaggcagcccgccagtctgctcgatgtgagaagcgttcctgggctggacgggtccggatgggaagtgtttgatatctggaaactgtttagaaattttaagaactcagctcagctctgcttggagctcgaagcctgggagagagggcgggcagtggatctgcgaggcctcggcttcgatcgggctgcccggcaagtgcacgagaaagccctgtttctagtgtttggtagaaccaagaagcgggacttattttttaatgaaatcaaagcccggtcaggccaggacgacaaaacggtttatgagtatctcttctcgcagagacgcaagcgaagggcgccactggctacaagacaggggaagcggccttccaaaaacctgaaggcccggtgttcgaggaaagccctgcacgttaattttaaagatatgggatgggacgactggatcatcgctcctttggagtatgaggcttttcattgcgaaggcttgtgtgaatttccactccgcagccacctggagcctaccaaccatgcagtgatccagacattgatgaacagtatggaccctgagagcacgccacctacgtgctgcgtgcctaccaggttgtccccaattagcatattgttcatcgattcagccaataacgttgtttataagcagtacgaagatatggtggtggagtcctgtggctgtcgg

SEQ ID NO: 250320 - DNA, 1503 bp, synthetic construct
  misc_feature 1..1503: note = Description of Artificial Sequence: Synthetic coding sequence
  source 1..1503: mol_type = other DNA
atgcgtctccctaaactgctcaccttcctcctgtggtacttggcttggctggatctggagttcatatgtacggtgctcggcgccccggatctgggccagagacctcaggggacacgccctggactcgcgaaggcggaagccaaggaacgaccaccgctggcgcgcaatgtcttccggcccggaggccattcgtacggaggcggagccaccaacgcaaacgcccgagcaaaaggtggcactggtcaaacgggagggctgacccagcctaagaaagacgagcctaagaaactcccgccgaggcctggtggccccgagccaaagcccggccatccgcctcaaactcgacaggccacggcccgtacagtgactcccaaaggacagctgcctggaggcaaggccccacccaaagctggttccgtgccctcctccttcttgctcaagaaggcgcgtgaacccggcccaccccgtgagcctaaagagccatttcgtccgccacctattaccccccacgagtatatgctgtcattgtatagaaccctgtccgatgccgaccgcaagggcggcaactcgagcgtgaagctggaggccggtctggccaatacaatcacctccttcattgacaagggccaagatgaccgcggcccagtcgtacgaaagcagcgttacgtcttcgatatctccgccctggaaaaagacggtttattgggtgctgaacttagaatactacgaaaaaagccatccgacacggcgaaaccggccgcccccggtggcggacgcgccgcccagctcaagctatcgtcctgtccgtcgggccgccagccggcctcactcttggatgttcgcagtgtgcccggccttgacggaagcggatgggaggtctttgatatttggaagttgtttagaaattttaagaactccgcgcagctctgtctggagctggaggcctgggagcgtggacgcgctgtagatctgcgcggactgggcttcgaccgcgctgcccgccaggtacacgagaaagccttgttcctagtcttcggacgcaccaagaagagggacctgttcttcaacgaaattaaggccagatccggacaggacgataagacagtttacgagtacctgttcagtcagcgacgcaaacgtcgagctcccctcgccacgcggcaaggcaaacgaccaagtaagaatttgaaggcacgatgtagcaggaaggcccttcacgtgaacttcaaagacatgggttgggacgactggatcattgccccgctggagtacgaagccttccactgcgagggcctttgcgaatttccactgcgaagccacctcgagccgaccaatcacgccgtgattcagacgttaatgaacagcatggatccagaaagcacgccacctacgtgctgtgtgccgacgcgcctttcacccataagcatcttgttcatagatagtgcgaacaacgtcgtctacaagcagtatgaggatatggtggtcgaaagctgcggatgccga

SEQ ID NO: 250321 - DNA, 1503 bp, synthetic construct
  misc_feature 1..1503: note = Description of Artificial Sequence: Synthetic coding sequence
  source 1..1503: mol_type = other DNA
atgcgcctgccaaaactgctgacttttctgctgtggtatctggcttggctggaccttgagttcatctgtaccgtcctgggcgctccggacctcgggcagcggccgcagggcaccaggccaggtttagccaaggcagaggccaaagaaagaccgccactggctcgaaacgtatttaggccaggagggcacagctacggcggcggcgctaccaacgccaacgccagggccaaagggggcactggacagacagggggcctgacccagcctaagaaggacgagcccaagaagctgccaccccggccaggtggcccagagcctaaaccgggccaccctccccagacccgtcaggcaacggctcggacggtaacccccaaaggccagctcccaggcgggaaggcaccccccaaggcaggttccgtgcccagttcgttcctgttgaagaaggctcgcgagcctgggcctccgcgtgaaccaaaagaacccttcaggccaccccctatcacccctcacgaatatatgttgagcttatataggaccctctccgatgctgaccgcaaggggggcaactccagtgtgaaactcgaggcgggcctagccaataccataacctcattcatcgataaggggcaggacgacaggggtcccgtggtccgaaagcagaggtacgtgttcgacataagcgccctggaaaaagacggtctgttgggtgccgaacttaggatcctccggaagaaaccatcggacaccgccaaacccgccgcacccggcgggggtagggcagcgcagttgaagctgagctcatgcccctcaggacggcagccggctagcctgctggacgtgcgatctgtgcctggcctggacgggagcggatgggaggtttttgatatctggaaactcttccgcaacttcaagaattccgcgcagttgtgcctcgaactagaggcgtgggagcgcggtagagccgtcgacctgagaggccttggctttgatagggcagcccgccaggtgcacgaaaaggctctttttctggtttttgggagaactaaaaaacgggatctgtttttcaatgaaatcaaggcgcgcagtggtcaggatgataaaacggtctacgagtatttgttctcccagaggagaaaacgtcgagcaccccttgccacccgccagggtaagaggcccagtaaaaatctgaaggccagatgttcacgcaaagcgcttcatgtcaatttcaaggacatgggatgggatgattggatcatcgctcctctggaatacgaggccttccattgcgaggggttgtgtgagtttccattaaggagccacttagagcccacgaaccacgcagtgatacaaaccctgatgaactctatggatcccgagtcaacgccacccacatgctgcgttcctactaggttgtccccaataagcatcctctttattgatagcgctaataatgtggtgtacaagcagtacgaagacatggtagtcgagtcatgtggctgcagg

SEQ ID NO: 250322 - DNA, 1503 bp, synthetic construct; identical to SEQ ID NO: 250305
  misc_feature 1..1503: note = Description of Artificial Sequence: Synthetic coding sequence
  source 1..1503: mol_type = other DNA

SEQ ID NO: 250323 - DNA, 1503 bp, synthetic construct
  misc_feature 1..1503: note = Description of Artificial Sequence: Synthetic coding sequence
  source 1..1503: mol_type = other DNA
atgcgtctcccgaaactcctgactttcctgctgtggtatctggcctggctggacctggagttcatctgcacagtcctgggggcaccggatctcggacagagacctcagggaaccagacctgggttggcaaaagcggaagcaaaggagcggcctccgttggcccgaaacgtctttaggcctggcggccacagttacggggggggcgccacaaacgccaacgcgagagccaaaggagggactggtcagactggcggtcttacccagccaaaaaaggacgagcctaagaaactcccgccccgtcctggcggacccgagcctaagcctgggcacccacctcagacccgacaggctaccgctcggaccgttacaccaaaagggcagttgccaggcggcaaagcacctccaaaggcaggcagcgttccaagttcgtttctcctgaagaaagctcgcgaacccggacctccccgtgagcccaaggaaccgtttagaccgcctccaataacaccccatgagtacatgctctcactgtatcggaccctgtcagatgcagaccgcaagggcggaaactccagcgtgaaattagaggcgggcctggctaacactattaccagctttatagataaggggcaggatgacaggggcccagttgtccgcaagcagcgatacgtcttcgacatctccgcattggaaaaggatggcctactgggagcagagttacgcattttgcgaaagaagccatcagacacagccaagccggcggcgccaggcggtggccgcgctgcacaactgaagctctcatcttgtccatccggacgccagcccgcctcactgttggacgtgcggtccgtacctggcctggatggatctggctgggaggtcttcgacatctggaaattattccgaaacttcaagaactctgctcagctgtgtcttgagctggaagcatgggagagaggaagggccgtggacctccgaggactgggattcgaccgcgcagcacgacaagtccacgaaaaggctctcttccttgtgtttggccgtactaaaaagagagacttgttctttaatgagataaaggccagatcaggccaggatgataagactgtgtatgaatatctcttttctcagaggcggaaaagacgagctccgctggcaactcggcagggcaagcggccctccaagaatctcaaggctcggtgctcgcggaaggcactccacgtgaacttcaaggatatgggctgggatgattggatcattgcacccttagaatacgaggcatttcattgtgaaggactctgtgagttcccactacgcagccaccttgaacccacaaatcatgcggtcatccagactctgatgaatagtatggacccggagagcaccccccctacatgctgtgtccctactaggctgtcaccaatatccatactcttcatcgattcggccaacaatgtagtgtacaagcaatacgaggacatggtcgtggaaagctgcggatgtcgc

SEQ ID NO: 250324 - DNA, 1503 bp, synthetic construct
  misc_feature 1..1503: note = Description of Artificial Sequence: Synthetic coding sequence
  source 1..1503: mol_type = other DNA
atgcggctccctaaactgttaacttttctgttatggtatctggcctggttggacctggaattcatctgcacggtccttggcgcccctgatctgggacagaggccacaaggcacgaggcctggcctggccaaagctgaggcaaaggaacgaccgcccttggcccgaaatgtgtttcgcccaggtggacattcgtatggggggggtgctacaaacgcaaacgcacgcgcaaaaggggggacaggccagaccggtggcttgactcagcccaaaaaggatgagcccaaaaagctgccacctagacctggagggccagaacctaagcccgggcaccctccccagacccgccaggctactgcgaggaccgtgacacccaaggggcagttgccggggggcaaggcccccccaaaggctgggtccgtgccctctagcttccttctgaaaaaagcacgggagcctggccctcctagagagcccaaggagccgttccgccccccgcccatcactcctcacgagtacatgctctctctataccgcacactgtccgatgcagaccgcaagggaggcaatagctctgtaaagttagaggctggactcgccaacactatcacttcttttattgacaaaggccaagacgatcgtggtcctgtggtgcggaagcagaggtatgtgtttgatattagcgcgcttgaaaaagacggactcctgggtgctgaacttcggatcttgagaaagaagccttcggacacagctaaacccgccgccccaggagggggtcgtgcagcccagcttaaactgtcaagctgcccgtccgggcggcagcctgcctcactgttagatgtgagatccgttccaggactcgacggatccgggtgggaggtcttcgacatttggaaacttttccgcaattttaagaactctgcccagctctgtctggagctggaggcgtgggagcgcgggagggctgtggatctgaggggcctgggttttgacagggccgcccggcaggtccacgagaaagccttgttcctggtctttgggagaaccaagaaaagagacctcttcttcaatgagattaaagcaagaagcggtcaggacgacaaaaccgtgtacgagtacttgttctctcagagacgcaaacgtcgggcacctctggctacgcgtcagggtaagagaccgtccaaaaacttgaaagcaaggtgtagcaggaaagcccttcatgtgaactttaaggatatggggtgggatgattggatcatcgcgccactcgagtacgaggctttccactgtgaaggactgtgcgaattcccactgagatcccaccttgaacccacaaaccacgccgtgatccagacattgatgaactctatggatccagagtccactccaccaacttgctgtgtgcccacccggctttcacccatttcaatcctgttcatcgatagtgccaataacgtcgtatataagcaatacgaagatatggtggtggaatcatgtggctgcaga

SEQ ID NO: 250325 - DNA, 1503 bp, synthetic construct
  misc_feature 1..1503: note = Description of Artificial Sequence: Synthetic coding sequence
  source 1..1503: mol_type = other DNA
atgcgtctcccaaagctgctcactttcctgctttggtacctggcgtggctggatcttgagttcatctgtactgtgctcggagcaccggatctcggacaacggccacagggaactcgccctggacttgcaaaggcagaagccaaggagcgccctccgttggctagaaacgtctttcggccgggagggcattcatacggaggcggcgccaccaatgccaatgcgagagccaagggtggcactggccagaccggaggcctcactcaaccgaagaaagatgaacccaagaagctgccacccaggccagggggtcctgaaccaaaacccggacatccgccgcaaacccggcaagcgaccgccagaaccgtgactccgaagggccagctgccaggaggcaaagccccaccgaaagccggctcagtgccatcatcattccttctcaagaaagcgcgtgaaccggggcccccgagggagccaaaggaaccgtttaggcctccgccaatcaccccgcacgaatacatgctcagcctctaccgcacgctctcagacgcagatcgcaagggcggtaacagctccgttaaactggaagcgggactggctaacactatcacctccttcatcgacaagggccaggatgatcgcggtccggtggtgcgcaagcagcgatacgtgtttgacatctcggccttggagaaagacggcctcctcggtgcggaactgaggatactgcggaaaaaaccttcagacactgccaagcctgctgctccggggggaggtcgcgcggcgcagttgaaattgagcagctgcccttcgggcagacagcctgcgtcgcttctcgacgtgcggagcgtgccgggactcgacggctcgggttgggaagtgttcgacatctggaagctgttcaggaacttcaagaattccgctcagctttgtctggagctggaggcatgggagaggggccgggcagtggacctgcgcggcctcggattcgatagagccgccaggcaggttcacgaaaaggcattgttcctcgtgttcggccggaccaaaaaacgcgacctgtttttcaatgagattaaagccaggtcgggacaggacgacaagacggtctatgagtacttgttctcgcaacgccgcaagcgacgcgctccgctggccacgcgacaaggaaagcggccgtcaaagaatctgaaggcccggtgcagccggaaggccctgcacgtgaatttcaaggacatgggctgggacgattggatcattgccccattggagtacgaggcgtttcactgcgagggtctgtgtgaatttccattgcgctcacacctcgaaccgaccaaccatgcagtgatccagaccctcatgaactctatggacccagaatcgactccgcctacgtgctgcgtgccgacccgcttgtcccctatcagcattttgttcatcgattccgcaaacaacgtcgtctacaaacagtacgaagatatggtcgtcgaaagctgcggatgcaga

SEQ ID NO: 250326 - DNA, 1503 bp, synthetic construct
  misc_feature 1..1503: note = Description of Artificial Sequence: Synthetic coding sequence
  source 1..1503: mol_type = other DNA
atgaggctcccgaagctgctaacatttctgctttggtacttggcttggctagacctggaattcatatgcaccgtactaggggcgccagatcttggacagcggccgcaggggactcgacctggactagcaaaggccgaggctaaggagagacccccactggcccggaatgtgttccgccccggtggccactcttatggggggggggccacaaacgcaaatgcccgcgcgaagggcgggacaggccagacaggaggtctgacgcaaccaaagaaagacgagcccaagaagctgccaccccgtccaggagggcctgagccgaagccaggccatccaccgcagaccaggcaggctacagccaggaccgtgacacccaagggccagctaccgggcggtaaagctccaccaaaggctggcagcgtgccatcttccttccttttgaagaaagccagagagccaggccccccccgcgagcctaaagagcccttcagaccccctccaatcactcctcatgaatacatgttatccctttatcggacactgtccgacgcggatcggaagggggggaactcatcagttaaactcgaagccgggctagccaataccatcacctcttttatagacaaagggcaggatgacaggggcccagtcgtcaggaaacagaggtatgtgtttgacataagcgcattggagaaagatggcctgcttggcgccgagttacgtatcctgagaaagaagccgtctgacactgccaagccagccgcccccggaggggggcgcgcagctcagctgaaactgtcttcttgcccatcaggacgccaaccggccagtctcctcgatgtcagaagcgttccgggcctggacggctccggctgggaggtgttcgacatatggaaactgttcaggaactttaagaattcagctcagctgtgcctggaactcgaggcctgggagaggggcagggccgtggatctccgaggccttggcttcgacagggcagcgcgacaagtacacgaaaaagcgctctttctcgtttttggccgaaccaagaagcgggacctgttttttaacgagatcaaagccaggtctggtcaagatgacaagactgtttatgagtacttatttagccagagaagaaagcgaagagcacctttggccacacggcagggcaagcggccctctaaaaacctcaaagccagatgttcaagaaaggctctccacgtcaacttcaaggacatggggtgggatgactggatcatagcacccctggagtacgaggctttccattgtgagggactttgcgaattccctctcagaagccacctcgagcccacaaaccacgccgtcatccagaccctcatgaacagcatggatccggaatccacaccccccacatgctgcgtgccgacacgactgagtccaatttcaattctgtttatcgattctgccaacaacgttgtgtacaagcaatacgaagacatggtggttgagtcttgcggatgccgg

SEQ ID NO: 250327 - DNA, 1503 bp, synthetic construct
  misc_feature 1..1503: note = Description of Artificial Sequence: Synthetic coding sequence
  source 1..1503: mol_type = other DNA
atgcgtctgccaaaattgctcaccttcctactctggtacctggcgtggttggaccttgagttcatttgtaccgttcttggggctcccgatttgggccagcggccccagggcacccgcccagggctcgcaaaggcggaggccaaagaaagaccgccactggcccgaaatgtttttcgacccggcggacattcctatggcgggggagccactaatgctaatgcccgggctaaagggggcacgggccagaccggtggcttgacccagccaaagaaagatgagcctaaaaagctgccgccgaggcctggggggcctgaacctaaacctggccacccgccccagacacgccaagctaccgcccgcacagtgacacctaaaggacaacttcccggcgggaaagccccccccaaagctggtagcgtgccgtctagcttcctgctcaaaaaagcaagggaaccagggcccccaagggagccaaaggagcctttccggcctcccccaatcacacctcatgagtacatgctgagcctgtatagaaccctctccgatgcagaccgtaagggtgggaatagttctgttaaattggaagctggcctagcgaacacgatcacctctttcatcgataaaggccaggatgatcgggggcccgtggtcagaaaacagcgatatgtttttgacatttccgctctggaaaaggatgggttgttgggcgctgaactcagaattctccggaaaaagccatccgatacagcaaagccggcggcccctggggggggtagggctgcccaattgaaactcagctcttgtcctagtggaaggcaacccgcatctctgcttgacgttcgcagcgtacctgggttagacgggtccgggtgggaagtttttgacatctggaaacttttccgaaattttaaaaactctgctcagctttgcctggaactggaagcctgggagcgtggtagagccgtggatttaagggggctgggtttcgatcgcgcggcaagacaggtgcatgaaaaggctcttttcctcgtgtttggtcgcaccaagaaaagggatctgttttttaatgaaatcaaagcgcgctccggacaagacgacaagactgtgtacgagtacctcttctcccagcgcaggaagcgccgagcccctttagccacgagacaggggaaacgcccctctaagaacctaaaggcccggtgcagccggaaggcgctccacgtaaacttcaaggacatgggttgggacgactggatcattgcaccactggagtacgaggccttccattgcgaaggattgtgtgagtttccactccggagtcacctggagcccaccaaccacgccgtcatccagaccttgatgaactcaatggatcccgagagtaccccccctacatgttgcgttccgactcgcttgtccccgatctcaatcttgtttattgatagtgctaacaacgtggtgtacaagcagtacgaggacatggtggtggagtcatgcggctgtcga

SEQ ID NO: 250328 - DNA, 1503 bp, synthetic construct
  misc_feature 1..1503: note = Description of Artificial Sequence: Synthetic coding sequence
  source 1..1503: mol_type = other DNA
atgagattacctaagctgctgacattccttctgtggtacctggcttggctggacttggaatttatttgcactgtcttaggagccccagaccttggtcagagacctcaagggactagacccggcctcgccaaggcagaggcgaaggagagaccacctctcgcaaggaacgtgttcagacctgggggccactcctatgggggcggtgccactaacgccaacgctcgggctaaggggggaacgggtcagactgggggactcacccagcctaagaaggatgagcccaagaagctcccccctcgaccaggggggccagagcctaaacctggtcatccccctcagacaagacaggccacggctagaacggtgacccccaaggggcagttacccggtggaaaggcccccccaaaagcgggctcagtgccaagtagcttcctgctgaagaaagctcgcgagcccggcccaccacgggaaccaaaagagccatttcggcctccacctattacacctcatgagtacatgctcagcctgtaccgtactctgagtgatgctgacaggaagggaggaaactcttcagtcaagctagaggccggccttgcaaacacaataacaagcttcatcgataaaggacaggatgatagagggcccgttgttagaaaacaacgatacgtgtttgacatatccgcactggagaaggatgggctgctgggcgctgagttgaggatacttcggaagaagcctagcgataccgccaaacctgctgccccaggaggaggacgagccgcacagctgaagctgtcctcttgtccaagcggacgccaacccgcttctcttctggacgtccggtctgtacccggccttgatggatctggctgggaggtgtttgatatatggaaactattcagaaattttaaaaactcagcacagttgtgccttgagttggaagcctgggagcgcgggagggctgtggatctccggggattggggtttgatcgggccgcgcgccaggttcacgagaaggcattattcttagttttcggaagaactaagaagcgcgacttgtttttcaacgaaataaaggcgaggtccggacaggacgataaaactgtatacgaatacttattcagccaacggaggaagcggcgcgcccccctcgccacacgacagggaaaacgcccctcaaagaatttgaaggccagatgtagccgaaaagctttgcacgtcaatttcaaggatatggggtgggacgattggattatcgctcccctggaatacgaggccttccattgcgaaggcctttgtgaattcccattgcgatctcatctcgaacccaccaatcacgccgtgattcagaccctcatgaattctatggatccggagagcacccctcctacatgctgcgtacctacacggttgtcacccatatcaattctcttcatcgattctgctaataatgtggtctataagcagtatgaagacatggtggtggaatcttgcggttgccgg

SEQ ID NO: 250329 - DNA, 1503 bp, synthetic construct
  misc_feature 1..1503: note = Description of Artificial Sequence: Synthetic coding sequence
  source 1..1503: mol_type = other DNA
atgaggttgccaaagctgttgacctttctgctttggtatctcgcgtggctggatctggagttcatatgcactgtgctgggtgcaccagatctcggtcagcggccccagggtactaggccaggtctggcaaaagcagaagccaaggagcgcccccctctggcacgaaatgtttttcgtccaggaggtcattcgtacggaggaggcgccaccaatgcaaatgccagagcaaaaggaggaaccggtcagaccggaggactcacccagcctaagaaggatgaacccaagaagctcccacccagaccaggagggccagaacccaagcccggacatcctcctcagacccggcaggcaaccgctcgaactgtcactcctaagggccagcttcctggaggaaaggcacccccaaaggcaggatccgtcccttcgtcatttctcttgaaaaaggccagagagcctggtcctcctcgagagccaaaggaaccgtttagaccaccacctattacgcctcatgaatacatgctctcactttaccggactctgagcgacgcagatcgaaagggtggaaacagctcagtcaagctggaagcggggctcgcaaataccattaccagcttcattgacaagggtcaggacgaccgaggccctgtggtgaggaagcagcggtacgtctttgacatctcggcccttgaaaaggatggacttctcggggccgagctgcggattcttcggaaaaagccgtcggacactgcaaagccagccgcaccaggtgggggccgcgcagcccaactcaagctgtcaagttgcccgtccggtcgtcaaccagcgtccttgcttgacgtgagatccgtcccagggcttgacgggtcgggttgggaagtatttgacatctggaagctgtttcgcaactttaagaattccgctcagctgtgtctcgaactggaggcatgggagcggggccgcgccgttgatcttaggggcctcgggtttgaccgggcagcacgtcaggtgcatgaaaaagcattgttccttgtgtttggcagaaccaagaagcgtgaccttttcttcaacgaaatcaaggcaagaagcggacaggatgataaaaccgtgtacgagtaccttttctcccaaaggcgtaaacgcagagcgccacttgcaactaggcaagggaaacgcccctcaaagaatctcaaggcgcgctgttcaagaaaggcgctccacgttaactttaaggatatgggttgggatgattggatcattgcccctctggaatacgaggcctttcattgtgaaggattgtgtgaatttcctttgcggtcgcatctggaacctaccaaccatgcagtgatacaaacccttatgaacagcatggaccccgaaagcacccctcctacctgttgcgtgccgactagactgtcaccaatctcgatcctctttattgattcggcgaataacgtcgtctacaaacaatacgaggacatggtcgtcgagtcctgcggttgtaga

SEQ ID NO: 250330 - DNA, 1503 bp, synthetic construct
  misc_feature 1..1503: note = Description of Artificial Sequence: Synthetic coding sequence
  source 1..1503: mol_type = other DNA
atgcgtctcccaaagctgcttacctttttgctctggtaccttgcctggctggatcttgagttcatttgtactgtgctcggagctccagatcttggccaacgacctcagggtacgaggccaggtttggccaaggccgaggccaaggagcggcctcccctcgcaaggaacgtgttcaggcccggaggccactcatacggtggaggcgccactaacgcaaacgcaagggctaaaggtggcaccggtcagacgggcggtttgacccagcctaagaaggacgagccgaagaaactgccaccccgaccaggcgggcccgaaccaaaacctggacatccccctcagactcgacaggcaaccgcgagaactgtgactccaaagggccagctgcccggtgggaaagccccaccaaaagccggaagcgtgccatccagctttttgctcaagaaggcacgagagccaggaccaccgcgggaacctaaggaaccttttcgcccgcctccaattactccacatgaatacatgctttcgctgtaccgaaccctgtcagacgccgatagaaaaggaggtaattcgtcggtgaagctggaagcgggtcttgcaaataccatcaccagcttcatcgacaagggccaagatgatcggggaccagtcgtccgaaaacaacggtacgtgttcgatatttcagcactggaaaaagatggactccttggagccgagcttcggattctccggaagaagccatcggacactgcaaaacctgccgcccccggcggaggcagagcagcccaactgaaactgtcctcgtgccctagcggtcgccagccggcgagcttgctggatgtgagatcggtgccgggactcgacggaagcggctgggaggtgtttgatatttggaagctcttcagaaacttcaaaaactcggcgcaactttgtctggaactcgaagcatgggaaagaggtcgagcagtagatctgagaggactgggttttgacagagccgccagacaggtccacgaaaaggcactctttctggtgtttgggcgcacgaagaagagggatctgtttttcaatgagataaaagcgagaagcggacaagatgacaaaactgtgtatgaataccttttctcccaaagacggaagcgccgagcccctctggcgactcgccaaggaaagcggccttccaagaatctcaaagctaggtgttcccgaaaggcacttcatgtcaatttcaaggacatgggttgggatgattggattattgccccacttgaatacgaagcgtttcattgcgaggggctctgtgaatttccccttagaagccatctcgagcctaccaaccatgccgtgatccaaacgctgatgaacagcatggacccagaaagcaccccgcctacttgttgtgtgccaaccaggctctctcctattagcattcttttcatcgactcagctaacaacgtcgtgtacaagcaatacgaagatatggtggttgaatcatgtggctgccgc

SEQ ID NO: 250331 - DNA, 1503 bp, synthetic construct
  misc_feature 1..1503: note = Description of Artificial Sequence: Synthetic coding sequence
  source 1..1503: mol_type = other DNA
atgcggctgcctaagcttttgacgttcttgctttggtatctggcctggctggacctcgaattcatctgtaccgtcctcggagccccggacttgggacagcgcccacagggaactcggcccggacttgcaaaggccgaggcgaaagaacggccacctctcgcccgcaatgtttttcgaccaggtgggcactcatacgggggcggagccaccaatgccaatgccagggcaaagggcggtactggccagacgggagggcttacacaacctaagaaggatgagccaaaaaaattgcctcccaggcccggcggccctgaacccaagcccggacaccccccccaaaccagacaggctacggcccggactgtcacacccaagggacagctgcccggaggtaaagctccacctaaggccggcagtgtcccctctagttttctgcttaagaaggctcgagaacctgggcctcccagggaacccaaggaaccctttcggccaccccctatcactccccatgaatatatgctgtctctctatcggaccctgtccgacgctgataggaagggtgggaactccagtgtcaagctcgaggcgggccttgcaaacaccattacctccttcatagataagggccaggacgatagagggcccgtggtgaggaagcagagatatgtgttcgacataagtgcactggaaaaagacggtctgctgggcgcggagctgcggatcttgcgcaaaaaaccatctgacaccgccaagcctgcagctcctggtgggggaagagctgcccagctgaagctgtcaagctgccctagtggtcgacaacccgccagccttcttgatgttcgatcagtgccaggactggacgggtccggatgggaggtgtttgatatctggaagctttttaggaactttaaaaacagcgcacagttgtgccttgaactggaggcatgggaaagagggagggcggtggatctcaggggtctgggcttcgacagggcggctcggcaggtgcatgaaaaggctttgttcctcgtcttcggcaggaccaagaaacgcgatctgttttttaacgaaataaaggccaggtctggccaggatgacaagacggtctacgagtacctttttagtcagcggaggaaacggagagcaccactggccacacgccaggggaagaggccctcaaagaatctcaaggctcggtgcagcaggaaggctctccatgttaactttaaagacatgggttgggacgattggattatagctcctcttgagtatgaggcatttcactgcgaaggactctgcgagtttcccctgagatcccatttggagcctactaaccacgctgttatacagactcttatgaactccatggaccccgagagtactcctccgacttgttgcgttccgaccagactgtcacccatttcaatcctgtttatagatagcgccaacaatgtggtgtacaagcagtacgaagacatggtggtggagagctgtgggtgtcgc

SEQ ID NO: 250332 - DNA, 1503 bp, synthetic construct
  misc_feature 1..1503: note = Description of Artificial Sequence: Synthetic coding sequence
  source 1..1503: mol_type = other DNA
atgaggctccctaagctgctaaccttcctcctctggtatttggcttggctggacctggagtttatctgcaccgtgctaggcgcgccggaccttggccaacgacctcagggtacaaggcccgggctggccaaggcggaagccaaggagaggccgcctttagcaaggaacgtttttagaccaggaggtcactcctacggcggcggggcgacgaatgccaatgcgagggccaaggggggcacagggcagacgggcggactgacccagccgaagaaggacgagcccaaaaaacttccacctaggcctggaggcccagaacctaagcctgggcaccctccacagacgagacaggcaacggcccgtaccgtgacccctaaaggccagctcccgggaggaaaggcccctcctaaggccggctcagtgccttctagctttctgctgaaaaaggcacgagagcctgggccaccccgggaacccaaagaacctttcagaccgccacctatcaccccgcacgagtacatgctgtcactgtatagaacactttctgatgcagaccgcaaggggggcaattcatcagtgaagctggaggccgggctggccaatacaatcacgtctttcatagataagggtcaagatgaccggggccccgtggtccgaaagcagaggtatgtgttcgatattagtgccttggaaaaagatggcctgctcggagccgagttacgtatcctgagaaaaaaacctagcgatactgctaaaccggccgccccaggaggtggccgtgccgcccagctcaagctgagcagctgtcctagcggtagacaacccgcctcattgcttgatgtaaggagcgtccctggcctggacggctccgggtgggaagtgttcgatatttggaagctctttcgaaattttaaaaactcggcgcaactgtgcttggagctcgaggcatgggagcgtggcagagccgttgacctgagaggacttggctttgatcgggcagcaagacaggtgcacgaaaaggctcttttcctagtgttcggcagaactaagaagcgcgatctctttttcaacgaaatcaaagcccgtagcggacaggatgataagaccgtctatgagtacctgttctcacaacgcaggaaacggagggcccctttggcaactagacaggggaaaagacctagcaagaatctgaaggctcggtgctctcgcaaagccctgcacgttaactttaaggatatgggttgggatgactggatcatcgcgccactagagtatgaggcatttcactgtgaggggctgtgcgaatttcctctgcgtagccatcttgaaccaaccaaccacgccgtaatacagactttgatgaactctatggatcctgaatccactcccccaacttgctgcgttcccacccggctcagccctatctctatcctctttatcgatagtgctaataacgtcgtgtataaacagtatgaagacatggtggtcgaatcatgcggctgccgc

SEQ ID NO: 250333 - DNA, 1503 bp, synthetic construct
  misc_feature 1..1503: note = Description of Artificial Sequence: Synthetic coding sequence
  source 1..1503: mol_type = other DNA
atgaggcttcctaagctcctcacctttctgctttggtaccttgcatggcttgacctggagtttatctgtacggtcctgggcgcgccggacctgggacagcggccacaaggtactcggccagggttggctaaggcagaggccaaggaacgaccacccctcgcgaggaatgtgtttaggccaggagggcactcctacggaggcggcgctaccaatgcaaacgccagggcaaaaggaggaactggtcagacgggtggactcactcaaccgaaaaaggatgaacccaaaaagctgccaccacggcccgggggaccagaacctaagcctggtcatccaccccaaacccgccaagcgactgcaaggactgtgacgccgaaggggcaactccctggtggaaaggcaccccctaaagcaggaagcgtccctagctccttcctgctgaagaaggcgcgagaaccgggacccccacgcgaacctaaggagccattcaggcctccacctattactcctcatgagtacatgttgtcactttacagaacgctttcagacgcagatcgaaagggaggtaattcgtcagtcaagctggaagccggtctggcaaacactattacttccttcatcgataaaggtcaagacgatagaggcccagtggtgcggaaacagagatacgtctttgacatttccgctcttgaaaaggacggattgcttggagcagaactgagaatactgcggaaaaaaccgtcggatactgcaaagcctgccgcacctggtggaggacgggcagcccaactgaagctctcctcctgtcctagcggaaggcagcctgcctcgctcctggacgttaggtctgtgcccggtctggatggatcgggatgggaagtgttcgacatttggaaactgttccgaaactttaagaactccgctcaactctgcctcgagctggaggcatgggaaagagggagagctgtggatcttaggggccttggttttgatagagccgcacggcaggtccatgagaaagcactgtttttggtgttcggaagaaccaagaaacgggatcttttcttcaacgaaatcaaggcacggtcaggtcaggatgataagaccgtgtacgaataccttttctctcagagaagaaagaggcgagctccactggcaacccgccaaggcaagcgaccttccaagaacctcaaagccagatgtagccgaaaggcactgcacgtgaactttaaggatatgggttgggatgattggattatcgccccactggagtatgaggctttccattgtgaagggctctgtgaatttcctcttcggtcccatctggaacctaccaaccacgcggtgatccaaacccttatgaattcgatggaccctgagtcgactccccctacttgttgtgtcccgacccgcctgtcaccaatttctattctgtttatagactcggccaacaatgtggtgtataagcagtacgaagatatggtcgtggagtcctgcggttgtaga

SEQ ID NO: 250334 - DNA, 1503 bp, synthetic construct
  misc_feature 1..1503: note = Description of Artificial Sequence: Synthetic coding sequence
  source 1..1503: mol_type = other DNA
atgcggctgccaaagctgctcactttcctcctgtggtacttggcttggctcgacctggagttcatctgcaccgtgcttggagctccagatcttggccagcgccctcaaggaactagaccaggcctcgcaaaagccgaagccaaagaacggcccccacttgcgcggaacgtgtttcggcctggaggacatagctacggaggcggtgctaccaacgccaacgctagagccaaaggaggaaccgggcaaactggaggactgacccaacctaagaaggacgagccgaagaagttgcctccgaggccaggagggccggaaccgaagccgggccatccgccacagacccgccaagccactgcaagaaccgtgactccgaagggtcaactccccggaggcaaagctcctccgaaggccgggtcagtcccgtcatccttcctgctgaagaaggcccgcgagccaggacctccacgggaaccgaaggagccgttccgcccaccgccaatcactccgcacgagtacatgctctcactctaccgcaccctctcggacgcagatcggaaaggaggcaacagctctgtgaagctcgaggcgggactcgcaaataccatcacctcgtttatcgacaaaggtcaagatgatcgcggcccggtggtcagaaagcagagatacgtgttcgatatcagcgccctggaaaaagacggtctgctgggggccgaactgaggatcttgcggaagaagccttccgacaccgctaagcctgctgccccaggaggaggacgggctgcccagctgaagctgtcctcgtgcccgtcaggacggcagccggcatcccttctcgatgtgcgctcggtgccgggactggacggctccggatgggaagtgttcgacatctggaaactcttccggaactttaagaactcagcacagctctgcctggaacttgaagcgtgggagagaggccgggcggtggacctccgcgggctgggttttgacagagcagcccgccaagtgcacgaaaaagcactgtttctggtgtttggacgtactaaaaagagggatctgttcttcaacgaaatcaaagcccggtctggacaagatgacaagaccgtctacgaatacctcttctctcagaggagaaaacggcgggctccccttgcgacccgccaaggaaagaggccttcgaaaaatctgaaagcaagatgcagcaggaaggccctgcatgtgaactttaaggacatgggatgggatgactggatcatcgcaccgctcgagtacgaagccttccactgtgagggactgtgcgaattcccgcttcgctcacatcttgaacccactaaccacgcggtcattcagaccctgatgaatagcatggaccctgagtcgaccccgccgacctgctgtgtgccaacccgcctgtctccaatctcgatcctcttcatcgactccgctaacaatgtcgtctacaagcagtacgaggacatggtcgtggagtcctgcggctgtagg

SEQ ID NO: 250335 - DNA, 1503 bp, synthetic construct
  misc_feature 1..1503: note = Description of Artificial Sequence: Synthetic coding sequence
  source 1..1503: mol_type = other DNA
atgcgcctgccgaagctgctcacctttctgctctggtacctggcatggctggatctggaattcatctgcaccgtgctgggagctccagacctgggtcaaagacctcagggaactcgcccgggactcgcaaaggctgaggcgaaagagcgcccgccgctggcgagaaacgtctttcgcccggggggccacagttacggaggcggtgccaccaacgcaaacgcccgagccaagggagggactggccagactgggggacttactcagccgaagaaagacgaaccaaagaaactgccaccgcgcccagggggcccggaaccaaagccaggacatccgccgcagacccgccaggccaccgcgcggactgtgaccccaaaaggccagctgccggggggaaaggccccaccaaaggccgggtcggtgccttcctcctttctgctgaagaaggcccgcgagccggggccgccgcgcgaaccgaaggaaccgttccggcctcctccaatcaccccgcatgagtacatgctctcactgtatcgcactctgtctgacgcagaccggaaaggcggaaactcgtccgtgaagctggaagcgggcctggccaacaccatcactagctttatcgataagggccaggacgaccggggccctgtggtgagaaaacagcgctacgtctttgatatcagcgccttggaaaaggacggtctgctcggtgcagagctgcgtatactcagaaaaaagccaagcgacaccgccaagcctgccgcgccgggtggaggaagagctgctcaactcaagctctcgtcctgtccttcgggacgccagccggcttccctgctcgacgtgagatcggttccgggactggacggctcggggtgggaagtctttgacatctggaaattgtttaggaactttaagaattcagcccagctgtgcctcgagctggaggcttgggaaaggggacgcgccgtggacttgcgggggttgggatttgatcgcgctgcgcgccaagtccacgagaaggcgctgttcctcgttttcggtcggacgaaaaaacgggacctgttcttcaacgagatcaaggcgcggagcggacaagatgacaaaacggtgtacgaatacctcttctcccaacgccggaagcgcagagcccccttggcaacgcgccagggaaaacggccgtcgaagaatcttaaggcacgatgcagccgcaaggcattgcatgtgaacttcaaggacatgggctgggacgactggattatcgccccgctggaatacgaggcttttcactgcgagggactctgtgagtttcccctccgctcgcacctggagccgaccaaccatgcagtcatccaaactctgatgaattcaatggacccggaatcgaccccgccgacctgctgcgtgccaactcggctgtccccgatctcgatccttttcatcgactcagcgaacaacgtggtgtacaagcagtacgaagatatggtggtcgaatcttgcggatgtcgc

SEQ ID NO: 250336 - DNA, 1503 bp, synthetic construct
  misc_feature 1..1503: note = Description of Artificial Sequence: Synthetic coding sequence
  source 1..1503: mol_type = other DNA
atgcgcctgcccaagctcctcactttcctgctgtggtacctcgcttggctggacttggagttcatctgcacggtgctcggcgcacccgacctgggtcagcggccacagggaaccagacccggacttgcaaaagccgaggccaaggaaagaccgcccctggccagaaatgtctttcgtccgggaggacacagctacggtggcggcgctactaacgcgaacgcccgggctaagggagggaccggacagaccggcggcttgactcagcctaagaaggacgagccaaagaaacttccgccgcggcccggaggacccgagcctaagccaggacaccctccgcaaacccgccaagcaactgccagaactgtcaccccaaaaggacagctcccgggaggaaaggctccacccaaggccggttccgtgccatcgtcctttttgctgaagaaggcccgggaacccggcccgccacgagaacccaaagaacctttcaggccacccccaatcaccccccacgagtacatgctgtcactgtaccgcaccctgtccgacgccgacaggaagggaggtaacagctcggttaagttggaggctggcctggctaatacgatcacctccttcatcgacaaaggacaagacgataggggacctgtggtgcgtaagcagcgctacgtgttcgatatttcggcccttgaaaaggacggactcctgggggcggaactgcggatcctgagaaagaagccttcggataccgcgaaacctgcggcgccaggaggcggtagagccgcccaactgaaactttcgagctgcccgtcgggacgccagccggcgtccctgctcgacgtccgctcggtgccgggactcgatggttccggctgggaggtgttcgacatctggaagctgttccgcaatttcaaaaactcggcccagctctgtttggaacttgaggcttgggagcggggacgcgccgtagatctcaggggcctgggattcgaccgggcggcccggcaagtccacgagaaagctctgttcctggtgttcggccggactaagaagcgcgacctctttttcaacgaaatcaaagcccggtccggacaagatgataagacggtgtacgaatacctcttttcacagcgccgaaagagaagggcgccgctggccacccggcagggaaaacggccgtcaaagaacctcaaggcccggtgctcgaggaaggccctccacgttaacttcaaggacatgggctgggatgattggatcatcgccccccttgaatacgaggccttccactgcgaggggctgtgcgaattcccgctgcggtcccacctggaaccaaccaaccacgcggtgattcagactctcatgaactcaatggacccggaatcgactcctcctacctgttgcgtgccaactcggctgtcgcctatttcgattctctttattgactctgcgaacaacgtggtgtacaagcagtacgaggacatggtcgtcgaaagctgtgggtgccgg

SEQ ID NO: 250337 - DNA, 1503 bp, synthetic construct
  misc_feature 1..1503: note = Description of Artificial Sequence: Synthetic coding sequence
  source 1..1503: mol_type = other DNA
atgcgcttgcccaagcttctgaccttccttctgtggtatctcgcatggcttgatcttgagttcatttgcactgttctgggtgcacccgatttaggccagaggccccagggcactaggcccgggttggcgaaggctgaggcaaaagagcgcccacccttagctagaaatgtgttccggcctggcgggcatagctatggtggcggtgctactaatgccaatgccagagctaaggggggcactgggcagaccggtgggttaacacagcccaagaaagacgaacctaagaagcttcccccacgtcccggagggccagagccaaagccaggacacccaccgcagacccggcaggcaaccgcccggactgtaactcctaaaggacaattgcctggggggaaagcccctcccaaggccgggtccgtgccctcttcctttttgctcaagaaggcccgtgagcccgggccaccacgcgagccaaaggagcccttcagacccccccccatcaccccacatgagtatatgctttcactgtaccggactttatccgacgccgacagaaaaggaggcaacagctccgtgaagttggaggcagggctcgccaacaccattactagtttcatcgataaaggccaggacgatagaggcccggtagtccggaagcagagatatgtgttcgacatctccgccctcgaaaaggatgggctgctcggagcagaactccgcatacttaggaagaaaccaagcgacacagctaagcccgctgccccggggggaggtagggcggctcagctgaagctttcttcatgtccaagcggaagacaacccgcgtccctgctggatgtgcgcagcgtgcccggccttgatgggtctggctgggaggtgtttgacatctggaagctgttccgaaatttcaagaactccgcacagctgtgcctcgagctggaggcgtgggaacgaggacgcgccgtagatctgagggggttgggtttcgatcgagcagctagacaggtgcacgagaaggccctttttcttgtgtttggaaggacaaagaagcgtgaccttttctttaatgagatcaaagctcgaagcggccaagacgacaagactgtttacgaatacctgttcagccagcggagaaagcggcgagctcctctcgcaactcggcagggtaaaaggccaagcaaaaatctgaaggctcggtgttcacggaaggcgttgcatgtgaatttcaaagatatgggttgggacgactggatcattgcacccctggagtatgaggcttttcattgtgagggcctgtgtgaatttccactccgatcccacttggagccaaccaaccatgcagtgatccagacactgatgaattcaatggatccagagtccactcctcctacatgttgtgtcccgaccaggttgagtccaatttccatcctgtttatcgatagtgccaacaacgtggtgtataaacagtacgaagacatggtagttgaaagttgtggctgcagg

SEQ ID NO: 250338 - DNA, 1503 bp, synthetic construct
  misc_feature 1..1503: note = Description of Artificial Sequence: Synthetic coding sequence
  source 1..1503: mol_type = other DNA
atgcgtctcccaaagttgctgactttcctgctttggtacctcgcctggctggacctggagttcatttgtactgtactcggcgctccagacctgggccagagaccccaaggcacccgacccggtctcgctaaggcggaggctaaagaaagacctcctctcgcacggaatgtgtttcgtcccggtggccattcctatggcggaggcgccacaaatgcgaatgcccgtgccaagggggggaccggccagaccggcggcctcacacagcccaaaaaagatgaacctaaaaagctgcccccaagaccggggggtcccgagcccaagcccgggcatccaccccagactcgccaggccaccgcccgaacagtcaccccgaagggacagctccccggtgggaaggctccacccaaggccggatcggtccccagcagctttcttctgaagaaagcccgggaaccaggcccccccagggagccaaaagaaccattccgcccccctcccatcacacctcacgagtatatgctctcactgtatcgaaccctgagcgacgccgaccgtaagggcgggaacagctccgttaagttggaagctgggctggccaacaccattacctcattcatcgacaaaggacaggatgaccggggccccgttgtccgcaagcagcgatacgtgttcgatatcagtgcacttgagaaagacggcttgctcggtgccgaactgcgcatactgagaaagaagccaagcgacacagctaaacctgcagcaccaggcggcgggcgggctgcccagctgaaactctctagctgtccctccggaaggcagcccgcatccctcctggatgtgcgctctgttccagggctggacggaagcggatgggaggtctttgacatttggaagctgttccgcaacttcaagaacagtgcgcagctttgccttgagctcgaggcttgggagcggggcagagcagtcgacctgcgcgggctgggctttgaccgagctgccagacaggtgcatgagaaagcgctcttcctggtgttcggacggacaaagaagcgggacctgtttttcaatgagataaaagcccgctcagggcaggatgataagacggtgtacgagtacctcttctcccagagacgaaaaagacgtgctcccctggccacccgccaaggaaagagaccgtcaaagaacctgaaggccaggtgtagtagaaaggcactccacgtcaatttcaaggacatgggctgggatgattggatcatcgcccctttggaatacgaagcctttcactgcgagggattatgcgaattcccgcttaggagtcacctggagcctactaatcatgccgtaatccagaccctgatgaactccatggaccccgagtccacgccacccacatgttgcgttcctactcggctgtcaccaatatctatcctcttcatcgactccgccaataatgtcgtttacaagcagtacgaggacatggtggtcgagtcgtgcggctgccga

SEQ ID NO: 250339 - DNA, 1503 bp, synthetic construct
  misc_feature 1..1503: note = Description of Artificial Sequence: Synthetic coding sequence
  source 1..1503: mol_type = other DNA
atgcggctgccgaaactgttgaccttcctgctgtggtatctcgcctggcttgatctggagttcatctgtactgtgctcggcgccccagacttgggacagcgaccacaaggcactcgcccgggactggcaaaggcggaggcaaaagaacggcctcccctcgcaaggaatgtgttccgtcccgggggtcattcatacggaggaggcgcaaccaatgcaaacgcccgggccaagggcggaaccggtcagaccggtggactgacgcagccgaagaaggacgaaccaaaaaagctgccaccgcgcccgggaggaccagagccaaagccaggacatccgccccagacccggcaagctacggcgcggactgtcacgccgaagggacagctgccgggtgggaaggctccgccaaaagctggcagtgtgccttccagctttctcctcaagaaagcgagagagccgggaccgccccgcgaaccgaaagaaccattccgccctccgcctatcactccgcacgagtacatgctttcgctttatcgcactctctccgacgccgatcggaagggcgggaactcttctgttaagctcgaagccggtctggcaaacaccattacttccttcattgataagggacaagatgaccgcgggccggtcgtgcggaagcagcgctacgtgtttgacatctccgcgctggagaaggacggcctgctgggagctgaactgcgcatcctgcgcaagaagccttcggacaccgcaaagccggctgcaccgggaggcggacgggctgcccagctcaaactgtcgtcgtgtccatccggtcggcagcctgccagcctcctcgacgttagatcggtgcctgggctcgacggttcaggctgggaagtgttcgatatctggaaacttttcagaaacttcaagaattccgctcagctctgcttggaactcgaggcctgggaaagaggccgagccgtcgatctgaggggactgggatttgacagggcggcgcgccaagtacacgagaaggcattgtttctggtgttcggacggaccaaaaagcgcgatctctttttcaatgagatcaaggccaggagcggacaggacgacaaaaccgtgtacgagtacctcttctcgcagcgccgtaagaggagagccccgttggctactcgtcaaggaaagcggccttccaagaatttgaaggcgcgttgttcacggaaggccctgcatgttaacttcaaggatatggggtgggacgattggattatcgcaccgctggaatatgaagcgttccactgcgaagggctgtgcgagtttccacttcgctcgcacctcgaacccactaaccatgccgtaatacagacgcttatgaacagcatggacccagagtcaacccctccgacctgctgcgtgcccaccaggttgtccccaatcagcatcctgttcatcgattccgccaacaacgtggtgtacaaacaatacgaggacatggtcgtggaaagctgcggctgccgg

SEQ ID NO: 250340 - DNA, 1503 bp, synthetic construct
  misc_feature 1..1503: note = Description of Artificial Sequence: Synthetic coding sequence
  source 1..1503: mol_type = other DNA
atgaggctccccaagctgctgaccttcctgttgtggtacctggcgtggttggacctggagttcatctgcaccgtgctgggtgcgccggacctgggacaacgccctcaaggaacccgcccaggactggccaaggccgaggccaaggaacgccctccactggcacggaacgtattcagaccgggcggacactcctacggcggaggcgccactaatgctaacgccagggcgaaaggcgggactggacagacgggaggcctgacccagccgaagaaggacgagccaaagaagctgcctccacgcccaggcggaccggaaccaaagccaggccatccaccccaaacccgccaagcaactgcccgcacggtgactccgaagggccagctgccaggtggaaaagccccgccaaaggccggctcagtgccctcatcattcctcctgaagaaagcccgcgagccgggcccgccgcgcgaaccgaaagaaccgtttcgccctccaccaatcactccacatgaatacatgttgtcgctctaccgcaccctctccgacgccgaccgcaagggagggaattcctccgtgaagctggaagctggacttgctaacaccatcactagcttcatcgacaagggccaggatgatagaggcccggtggtgaggaagcagagatacgttttcgatatctcagcgttggaaaaggatggacttctgggggccgagctccgcattctccgcaagaagccgtcggacaccgcaaagccagcggcccccggcggagggcgcgccgcccagctcaagctctcgtcatgcccatcagggcggcagcctgcctccctcctggacgtccgatcggtgcccggattggacggctccggatgggaagtgtttgacatctggaaattgttcagaaacttcaagaattcagcacaactgtgtctggaactggaggcttgggaaaggggacgcgcggtcgacctccggggactgggcttcgatcgggcagcccggcaggtccacgaaaaggccctttttctggtgtttggacggaccaagaaacgggacctcttcttcaacgagatcaaggcacggtcaggacaggatgacaagactgtgtacgagtacctgttttcgcagcggaggaaacgcagagcgccgctggcgactcgccagggcaagaggccgtcaaagaatctgaaggcacgctgtagccggaaggcgttgcacgtcaatttcaaggacatgggctgggatgactggattattgctccgctggaatacgaagcgttccactgtgaaggcttgtgcgaattcccgctgcgctcccacttggagccgactaaccatgctgtcatccagaccctcatgaattcgatggatccagaatcgactccgcccacttgctgcgtgcctacccggctgagcccgatttcgatcctcttcatcgactccgcgaataacgtggtgtataaacaatacgaagatatggttgtggaatcctgcggatgcaga

SEQ ID NO: 250341 - DNA, 1503 bp, synthetic construct
  misc_feature 1..1503: note = Description of Artificial Sequence: Synthetic coding sequence
  source 1..1503: mol_type = other DNA
atgagacttccgaaattgctgacctttttgctttggtaccttgcttggcttgatctggagttcatctgcaccgtccttggggcccccgacttgggtcaaaggcctcagggaacccggcccggacttgcaaaagcagaagcaaaggaaagacccccactggcacgaaatgtgtttcggcctggtggtcattcctacggcggcggggcgactaacgccaacgccagagccaagggagggaccggccagactggtgggctgacccagccaaagaaggacgaacccaagaagttgccacccagacccggaggtccagaaccaaagccaggacatccccctcagacccgacaggcaaccgcaagaaccgtcactcctaagggccaactcccaggagggaaggcacctccaaaggctgggtcggtcccttcctccttcctcctgaagaaagccagagaaccaggacctccacgggagcccaaggaacctttccgccccccacctattactccacacgagtacatgctgagcctgtaccgcaccctgtccgatgcagatagaaaaggtggtaattcgtcggtgaaactggaagctggtctggcaaacactatcacttcgttcattgacaagggacaagatgataggggacctgtggtcagaaagcagagatacgtgttcgatataagcgcgctggagaaggatgggctgctgggagctgagctgcggatcctgagaaagaaaccatccgatacggccaagcctgctgcaccaggcggagggagagcggcacaacttaaactgtcctcctgtccttccgggcggcagccagcgtcgctcctcgatgtgagaagcgtgcctggacttgacgggtccggatgggaagtgtttgatatatggaaactttttcgcaacttcaagaattcggcacaactgtgcctggaactggaggcgtgggagagagggcgcgctgtcgatcttagaggactgggctttgatcgtgcagcaagacaagtccatgaaaaggccctctttctggtgtttggtcgtactaagaaaagagatctgtttttcaacgaaatcaaagcacgttcaggccaggacgataagacggtgtatgaataccttttttcgcaaagaaggaaacgtagggcaccccttgcaacccggcaaggcaagcgcccatctaagaacctgaaggcacggtgttcaagaaaagcgctgcacgtgaactttaaggacatgggttgggatgactggatcattgcacctctcgaatacgaagcatttcattgtgaaggtttgtgtgaattccctttgagatcgcatctcgaacccaccaaccatgcagtgatccagaccctgatgaactcgatggatcctgagtcgaccccgccgacctgttgcgtgcctactcgactgagccctatttcaattcttttcatcgattcggcgaataatgtggtgtacaagcagtacgaagatatggtggtcgagtcgtgcgggtgtagg

SEQ ID NO: 250342 - DNA, 1503 bp, synthetic construct
  misc_feature 1..1503: note = Description of Artificial Sequence: Synthetic coding sequence
  source 1..1503: mol_type = other DNA
atgcgactacccaaactactgactttccttctctggtaccttgcttggttagatctcgagttcatctgtaccgtccttggtgctccagacctgggccaacgacctcaagggacgaggcctggtttggcgaaggccgaggccaaggaacggccgccgctcgcgcgcaatgtatttcgccccggtggtcacagttacgggggcggcgcaaccaacgcgaatgcaagagcaaagggcggaacaggtcaaactggcggacttactcagcccaagaaagacgagcccaagaagctacccccgagacccggaggtcccgagccgaagccgggccatcctcctcaaactcgccaagcgaccgcccgcacggttacacctaagggacaactccccggcgggaaggctccccccaaagcaggtagcgtgccttcttcgttcctcctgaagaaagcacgcgaaccaggcccgccgcgcgaacccaaggagccctttcggccgcccccgattactccccacgaatatatgctaagcctctatcgtacgctctccgatgcggacaggaagggaggcaactcttctgttaaacttgaggcaggacttgccaataccatcacgagtttcatcgacaagggccaagatgatcgaggccctgtcgtccggaagcagcgctatgtttttgacatatcagctttggagaaggacggtctcctcggcgccgaactcagaatattacgcaaaaagccatcggataccgcgaaacccgctgcacctggagggggccgtgctgcacaactcaagctaagttcttgcccgtcggggcggcagcctgcatcgcttctagatgtcagatctgttccggggctagatgggagcggttgggaagttttcgacatctggaagttgttccgtaattttaagaattctgctcaactttgcctggaattggaagcgtgggagagggggagggccgtcgatctcagaggtctgggattcgatcgagcggcgcgacaggttcatgagaaggctctttttctggtattcggtcggactaagaaaagggacctcttctttaacgagataaaggcccgctctggtcaggatgataagactgtgtatgagtatctgttctcccagcggagaaagagacgagcaccactcgcaacacgtcagggtaaaagaccgagtaagaatctaaaagctcggtgctctcgaaaagccttgcacgttaacttcaaggatatgggatgggacgactggataatcgcaccgctcgaatacgaggctttccactgtgaaggcctttgtgaattccccttgcgttctcacctagaaccgaccaatcacgcagttatccagacactaatgaactccatggacccggagagcactccgccaacatgttgtgtccctacaaggttatctccaatatccatactcttcattgattctgccaataacgtggtctacaaacaatacgaggacatggtcgtcgaatcatgcggctgccga

SEQ ID NO: 250343 - DNA, 1503 bp, synthetic construct
  misc_feature 1..1503: note = Description of Artificial Sequence: Synthetic coding sequence
  source 1..1503: mol_type = other DNA
atgcgattaccgaaattattaacgtttttattatggtatttagcgtggttagatctagaatttatatgtacggttttaggtgcgccggatctaggtcaacgtccgcaaggtacgcgaccgggtctagcgaaagcggaagcgaaagaacgtccgccgctagcgcgtaatgtttttcgtccgggtggtcattcgtatggtggtggtgcgacgaatgcgaatgcgcgtgcgaaaggtggtacgggtcaaacgggtggtttaacgcaaccgaaaaaagatgaaccgaaaaaattaccgccgcgtccgggtggtccggaaccgaaaccgggtcatccgccgcaaacgcgtcaagcgacggcgcgtacggtaacgccgaaaggtcaactaccgggtggtaaagcgccgccgaaagcgggttcggttccgtcgtcgtttctactaaaaaaagcgcgagaaccgggtccgccgcgagaaccgaaagaaccgtttcgaccgccgccgataacgccgcatgaatatatgttatcgttatatcgtacgttatcggatgcggatcgaaaaggtggtaattcgtcggtaaaattagaagcgggtttagcgaatacgataacgtcgtttatagataaaggtcaagatgatcgaggtccggtagtacgaaaacaacgttatgtatttgatatatcggcgctagaaaaagatggtttactaggtgcggaactacgtatattacgaaaaaaaccgtcggatacggcgaaaccggcggcgccgggtggtggtcgtgcggcgcaactaaaactatcgtcgtgtccgtcgggtcgacaaccggcgtcgttattagatgttcgttcggttccgggtttagatggttcgggttgggaagtatttgatatatggaaattatttcgaaattttaaaaattcggcgcaactatgtttagaattagaagcgtgggaacgaggtcgagcggttgatttacgtggtctaggttttgatcgtgcggcgcgtcaagttcatgaaaaagcgttatttttagtatttggtcgtacgaaaaaacgtgatctattttttaatgaaataaaagcgcgttcgggtcaagatgataaaacggtatatgaatatttattttcgcaacgtcgtaaacgacgagcgccgctagcgacgcgtcaaggtaaacgtccgtcgaaaaatctaaaagcgcgatgttcgcgaaaagcgctacatgtaaattttaaagatatgggttgggatgattggataatagcgccgctagaatatgaagcgtttcattgtgaaggtctatgtgaatttccgttacgttcgcatttagaaccgacgaatcatgcggtaatacaaacgttaatgaattcgatggatccggaatcgacgccgccgacgtgttgtgttccgacgcgtttatcgccgatatcgatactatttatagattcggcgaataatgtagtttataaacaatatgaagatatggttgtagaatcgtgtggttgtcgt

SEQ ID NO: 250344 - DNA, 1503 bp, synthetic construct
  misc_feature 1..1503: note = Description of Artificial Sequence: Synthetic coding sequence
  source 1..1503: mol_type = other DNA
atgcggctgccaaagctcctcacttttcttctgtggtacctggcttggctcgatttggaatttatatgcaccgtgctgggagctccagatctgggacagcggccccagggcacgagacctggactcgccaaagcagaggcaaaggagaggcctccactggctcgcaacgtgtttaggccgggggggcactcctacggcggtggcgcgaccaatgctaatgcacgcgctaaggggggaactggccagaccggtggactgacacagccaaagaaggacgagcccaagaagctccccccaaggccaggtggacccgagccaaagcccggccaccctccccagacaaggcaggccactgctcggacagtgacaccaaagggacaactccccggcggaaaagctccccctaaggctggaagcgtaccctctagcttcttgctgaaaaaagcccgagagcccggcccccctcgcgaacccaaggaaccctttcgtcctcctcctattaccccccatgaatacatgctctcgctgtatcgcacactatccgatgccgatcggaaaggggggaattccagtgtgaaactggaagcaggcctcgctaacaccatcaccagttttatcgacaaaggccaggacgatcggggccccgtggtgcgaaaacaacgctacgtgttcgacatctctgctctggagaaggatggcttactgggagcagagttgagaatcctcagaaagaaaccttctgatactgcaaagcccgccgccccaggcggggggcgtgctgcacaactgaaattatcatcttgccctagcggccgacagcccgcctcactattagatgtgcggagcgtgcctggacttgacgggagtggctgggaggtcttcgacatctggaaactttttagaaactttaagaacagcgcgcagctgtgtttggagctagaggcttgggaacgaggaagagctgtcgacttacgcggactgggtttcgatagagccgcacgccaagtgcacgaaaaagccctgttcttggtgtttggccggacgaagaaaagagacctcttctttaacgagattaaagctagaagcggacaagatgataagaccgtgtatgagtatctattctcacagagacggaagagacgggcacctctggccacaaggcagggaaaacgtccgagtaagaatctgaaagctcgctgtagcaggaaagctctgcacgtaaattttaaggacatgggatgggacgactggatcatcgctccgctggaatacgaggccttccattgtgagggcctatgtgagttcccactccggtcgcacctagagccaacaaaccatgccgtgattcagactcttatgaattccatggatcccgagtccacacctcctacttgttgtgttcctaccagattgtcccccatttccatcttgtttatcgactccgctaataacgttgtttacaagcagtacgaagatatggtggtcgagtcttgtggctgcaga

SEQ ID NO: 250345 - DNA, 1503 bp, synthetic construct
  misc_feature 1..1503: note = Description of Artificial Sequence: Synthetic coding sequence
  source 1..1503: mol_type = other DNA
atgcggctgccgaagctcctgactttccttctgtggtacctcgcctggctggatctggagtttatctgcacggtgcttggtgcgcccgaccttggccagaggccacagggtacccgcccgggccttgccaaggctgaagctaaggagaggccgccgctggcccgcaatgtgttcagaccaggaggacactcctacggaggaggtgcgactaacgccaatgcccgcgctaaggggggaactgggcaaaccggaggactcactcaaccaaagaaggacgaaccaaagaagctgccgccccgccccgggggaccggaaccgaagccgggacaccctccgcagactaggcaggccaccgcccgcaccgtgacccctaagggtcaactcccggggggaaaagctcctcctaaggcggggtcggtgccttcctcattccttctgaaaaaggcccgcgaaccgggacctccccgcgaaccaaaagaacccttcagacccccaccgattactccgcacgaatacatgctgtcgttgtatcgcactctgtccgatgcagatagaaaaggcggaaattctagcgtgaaactggaagcgggactcgctaataccataacttcctttattgataagggacaagacgataggggtcccgtggtccggaaacaacgctacgtgttcgacatctcggccctcgaaaaggacggcctgctgggagcggaattgcggatcctgagaaaaaagccgtctgataccgccaagccggcggcaccaggaggtggtcgggccgcccagttgaagctctcgtcgtgtccgtcgggcaggcagccagcgtcgctgctcgatgtgcgcagcgtcccggggctggacggctcaggttgggaagtgttcgatatctggaaactgtttaggaatttcaagaactcagctcagctgtgcctcgagctcgaagcatgggaaaggggacgcgccgtggacctgcggggattggggttcgacagagccgcgcgacaggtgcacgaaaaagctctcttcctcgtattcgggcggaccaaaaagcgggatttgttcttcaacgagatcaaagcgcgctcaggtcaggacgacaagaccgtgtacgaatacctgtttagccaaagacgcaagaggagagctccgctggctactaggcagggcaagcggccttcgaaaaatcttaaggcccggtgcagccggaaggccctgcacgtcaatttcaaggacatgggctgggacgattggatcatcgccccacttgagtacgaggccttccactgcgagggactgtgcgaattcccgctgcgatcacacctggagccaaccaatcatgcggttatccagactctgatgaactccatggaccctgaatcaactccaccgacctgctgcgtgccgacccggctgagcccgatctccattctgttcatcgacagtgccaacaatgtggtctacaagcagtacgaggacatggtggtggagtcgtgcggttgccgg

SEQ ID NO: 250346 - DNA, 1503 bp, synthetic construct
  misc_feature 1..1503: note = Description of Artificial Sequence: Synthetic coding sequence
  source 1..1503: mol_type = other DNA
atgcgcctgcctaagctgctcactttcctgttgtggtacttggcttggttggaccttgagttcatctgcaccgtgctcggcgcccccgacctcggacagcgcccgcaaggaaccagaccgggactggcaaaggcagaggcaaaggagcggccgccgctggctcggaacgtgtttcggccgggaggacacagctacggcggaggggctactaatgctaacgcgagagcgaagggcggcaccggccaaactggcggactcacccaaccgaagaaggacgaaccaaagaaactgccaccccggccgggaggtccggagccgaagccgggacaccccccacagacgcggcaggcaactgctaggactgtcaccccgaagggccagctccctggcggcaaggctccaccgaaggctggctccgtgccatcgtctttcttgttgaaaaaggccagggaacctggacctccacgggagcctaaagagccgttccgaccgcctccgattactccacacgagtatatgctgtccttgtacagaactctctcggacgcggacaggaagggaggaaattcaagcgtgaagctcgaagccgggctggccaacacgattacgtccttcatcgataagggccaggatgaccggggaccagtggttcggaagcagaggtacgtgtttgacatctcggcgctcgaaaaggatggactgctgggagccgagctgcgcatcttgcggaagaagccgagcgacactgcgaaacccgccgcacctggaggcggaagggccgcgcagctcaaactgagcagctgcccatcgggacgccaaccagcctcgctgctcgatgtgcgctccgtcccgggcttggacggttctggctgggaagtgttcgacatctggaagctcttcagaaatttcaaaaactcggcacagctctgcctcgaactggaagcatgggagcgaggacgggcggttgatctgagaggactgggcttcgaccgggcagcgcggcaggtccacgaaaaggccctgtttctcgtgtttgggcggactaagaaacgcgacctcttcttcaacgagatcaaagctagatccggtcaagatgataagaccgtctacgagtacctttttagccagcggcgcaaacgacgagctcctcttgctactcgccaaggaaagcgaccctccaagaatctgaaggcccggtgtagccgcaaggccctgcatgtcaactttaaggatatgggatgggatgactggatcattgcacccctggaatacgaggcattccactgcgaaggactgtgcgaatttcctctgcgctcgcaccttgaacctacgaatcatgccgtcatccaaacgctgatgaatagcatggatccggagagcaccccaccgacttgctgcgtgccgacccggctcagcccgatcagcatcctgttcatcgactccgcgaataacgtggtgtacaagcagtacgaggacatggtggtcgaatcgtgcgggtgccgc

SEQ ID NO: 250347 - DNA, 1503 bp, synthetic construct
  misc_feature 1..1503: note = Description of Artificial Sequence: Synthetic coding sequence
  source 1..1503: mol_type = other DNA
atgcgtttgccgaagctgctgacttttctgctttggtacctcgcgtggctcgacctcgagttcatctgcactgtgctcggggcgccggacctgggacaacgcccgcagggcacgcggccagggctcgccaaggcagaagccaaagagcggccgccactggcacgcaacgtgttccgtccaggagggcattcgtacgggggaggcgcgactaacgcaaatgcgcgggccaagggagggaccggacaaacgggcggactcactcagcccaagaaggacgaacctaaaaagttgcccccgcggccgggcggtccggaaccgaaaccaggtcacccgccccaaactcggcaagccactgcacgaactgtgactccgaagggtcagttgccgggcggcaaggccccgcccaaggccggaagcgtcccgagctcatttctgctcaagaaggcacgggagccaggccctcctcgcgagcctaaggagccattcagaccgcccccaataaccccccacgaatacatgctctcgctgtaccggaccctgtcagacgctgacagaaagggaggtaattcatccgtcaaactggaagccggtttggccaataccatcacctccttcatcgacaaaggccaggatgacagagggcccgtagtcaggaagcaaagatacgtgttcgatatcagcgcgctggagaaggacggactcttgggtgctgaactgaggatcctgcgcaaaaaaccgtcggacaccgcaaagcctgccgcacctggaggcggaagggccgcccagcttaagctctcctcgtgcccgtcgggacgacaaccggcgtcattgctcgacgtgcgatcggtgccaggtctggacggatctggatgggaggtgttcgatatttggaagctgtttaggaacttcaagaacagtgcgcagctgtgtctcgaattggaagcctgggagcgggggcgggcggtggatcttcgcggtctgggattcgatcgcgcagcccgccaggtgcacgagaaggccttgttccttgtgtttggacgcacgaagaaacgagatctctttttcaatgaaatcaaagcacggagcggacaagacgacaaaaccgtgtacgaatatctcttctcccagcgccgcaagaggcgcgccccgctggcgacccgccagggaaaacgaccttccaaaaacctgaaagcgagatgcagccggaaggctcttcatgttaactttaaggatatgggatgggacgactggatcatcgcacctctggagtacgaggcgttccactgcgaaggcctctgcgaattcccactgcgcagtcacctcgaaccgaccaaccatgccgtgatccagaccctgatgaattcaatggatcctgaatcgactccgcctacctgctgcgtgccgacccggctgtcccccattagcatcctcttcattgattccgccaacaacgtcgtatacaagcagtacgaggatatggtcgtggaatcatgtggttgtagg

SEQ ID NO: 250348 - DNA, 1503 bp, synthetic construct
  misc_feature 1..1503: note = Description of Artificial Sequence: Synthetic coding sequence
  source 1..1503: mol_type = other DNA
atgcgacttccaaaactcttaacttttctgttatggtatttggcgtggttagatctggagtttatctgcacggtgttaggggcaccagatttgggacagcggccacaaggcacaagaccgggcctggctaaagctgaagcgaaagaacggccgcctctggctaggaatgtcttccggccaggtggtcacagttatggaggtggggcgaccaatgcgaacgctcgcgctaaaggcggcacagggcagacaggcggtctcacacaaccaaaaaaagacgaacctaagaaacttcctccacggcctggcggaccagagccgaaacccggacaccctccgcaaacacgacaagcaacagcacgaactgttaccccgaaggggcaacttcctggggggaaagcaccgccgaaggcggggagcgttccaagctcgttcttattaaaaaaagctagagagccggggccgccgagagaacctaaagaaccatttaggccgccccctatcacaccgcatgaatatatgttgagcctttatcggacattgtcagacgccgatcggaaaggcggcaactcttctgtgaaattagaagcgggactagctaacacgattacatcatttattgataaggggcaagatgatcggggcccggtcgtgcgcaaacaacggtatgtcttcgatatttccgcactggaaaaagacgggttattgggagcggaacttcgaatcctgcgtaaaaaaccgagcgacacagccaagcctgcagcgcctggcggtggacgggctgcacagttaaaattgtcaagctgcccgagcgggcgtcaaccggcgtccctgcttgatgttaggtccgtgccgggcttggacggatctgggtgggaagtctttgacatttggaaattattccgaaattttaaaaactctgctcagctgtgcttagaacttgaggcttgggagcgcggtcgagcggtggacctacggggattagggtttgatcgcgccgccagacaagtacatgagaaggccctgttcttagtctttggacgtacgaaaaaaagagacctgttttttaatgaaattaaagcgcgatcaggccaggacgacaaaacagtgtatgaatatttgttttcacagcgaagaaagcgtagggccccgctggcgacgcgccaaggaaagagaccgagcaagaatttgaaagcaagatgttcacggaaagccttgcacgtgaacttcaaagatatgggctgggatgactggattatcgctccgttagaatatgaagctttccattgtgaaggcttatgtgagtttccgctgcgctcacatcttgaaccgacaaaccatgcggtaatccagacactaatgaattcaatggatcctgaaagtacgcctcctacttgttgcgttccaacaagattgtcgccgatttctatcctgtttattgactccgcgaataatgttgtttataaacagtacgaagatatggttgtagagagctgtggatgtaga

SEQ ID NO: 250349 - DNA, 1503 bp, synthetic construct
  misc_feature 1..1503: note = Description of Artificial Sequence: Synthetic coding sequence
  source 1..1503: mol_type = other DNA
atgcgtttaccaaaattacttacatttctattgtggtatttagcctggcttgatttagaatttatttgtacagtattgggtgcacctgaccttgggcaaagaccacaaggaactaggcctggattagcaaaagcagaagctaaggaaagaccaccattagcaagaaatgtgttcagaccaggtggacatagttatggaggaggagctacaaatgcaaatgcacgtgctaagggaggaacaggacaaactggtggtttaacacaaccaaaaaaagatgaaccaaaaaaacttcctcctagaccaggagggccagaacctaaaccaggacacccaccacaaactagacaagcaacagcacgaacagtaactccaaaaggtcaacttcctggaggaaaagctccacctaaggctggatccgtaccatcatcatttttgttaaagaaagcaagagaaccaggaccacctagagaaccaaaagagccatttagaccaccacctattacaccacacgagtatatgttaagtttatatcgtacattaagtgatgcagatagaaaaggaggtaactcttctgttaaattagaagctggacttgctaatacaattactagttttattgataaaggacaagatgatcgtggtccagttgttagaaaacagcgttacgtttttgatattagtgcacttgagaaggatggattacttggagctgagcttagaattcttagaaaaaaaccatctgacactgcaaaaccagctgcaccaggtggaggaagagcagcacaacttaaacttagttcttgtccatcaggaagacaaccagcttcacttcttgatgtccgatcagttccaggacttgatggtagtggatgggaagtttttgatatttggaaacttttccgtaactttaaaaatagtgctcaattatgtttagaattagaagcatgggaaagaggaagagcagttgacttaagaggacttggttttgatagagcagcacgtcaagttcatgaaaaggccctttttttagtattcggaagaacaaagaaaagagacttattcttcaatgaaattaaagccagatctggacaagatgataaaacagtttatgaatatcttttttcccaaagaagaaaaagaagagcaccacttgcaactcgtcaaggtaaaaggccatcaaaaaatttaaaggctagatgttctaggaaggctttacatgttaattttaaagatatgggatgggatgactggattattgctccacttgaatatgaagcttttcattgtgaaggactttgtgaattcccactaagatcacatttagaaccaactaaccacgcagttattcaaactttaatgaattcaatggatccagaaagtactccaccaacttgctgtgttccaactcgtttgtctcctatttcaattttatttattgattcagctaataacgtagtttacaaacaatatgaagatatggtcgtagaatcatgtggttgtaga

SEQ ID NO: 250350 - DNA, 1503 bp, synthetic construct
  misc_feature 1..1503: note = Description of Artificial Sequence: Synthetic coding sequence
  source 1..1503: mol_type = other DNA
atgcggcttccgaaattgttgacgtttctgctttggtatttggcctggcttgacctcgaattcatttgcacggtcctgggcgcacctgatctgggtcaaagaccccaaggtacccgacctggtctggcaaaagcggaggcgaaagaaagacctccacttgcaaggaacgtttttagaccaggaggacactcatacggtggaggggcaacgaatgccaatgcacgagcaaaaggaggaaccggccaaactggtggtctgactcagccaaagaaggacgaacctaagaaacttccgcctagacccggaggtcccgaacctaagcccggacatccaccccagaccaggcaggccactgcaaggaccgtgaccccgaaaggacaattgcccgggggaaaggcgcctcctaaggcggggtcagtcccttcatcctttttgctgaagaaggcacgcgaacctgggccacctcgggaaccaaaagagccgttcagacctccccctatcaccccacatgaatacatgttgtcattgtaccggaccctcagcgacgcagataggaagggtggtaacagctcggtgaagctggaagctggcctcgcaaacaccattacttccttcatagataagggtcaagatgatcgcgggcctgtcgttcgcaaacaacggtacgtgtttgacatttcggcactcgaaaaggatggacttctcggagccgaactgagaatccttcgaaagaagcctagcgatactgcaaagccagccgcacctggtggcggccgcgctgcacaactcaagctgtcgtcatgcccgtcgggcagacaacccgcctccctgctcgatgtcagatccgtgccaggacttgacggcagcggttgggaagtatttgatatttggaagctctttcgtaacttcaagaattcggcacaactgtgccttgaattggaagcgtgggaacgcggacgggccgtcgacctgcgcgggctgggttttgatagggcagccaggcaagtgcatgagaaagcactgtttctggtctttggcagaaccaagaagagagatctcttctttaatgagatcaaggcccggtcaggacaagatgacaagaccgtctacgagtaccttttcagccagcgccgtaaaaggcgagccccacttgcgaccagacagggtaagcgtccgtccaaaaacctgaaagcacgctgtagcagaaaggccctgcatgtgaacttcaaagacatgggatgggatgactggatcattgctcctcttgagtacgaggcatttcactgtgaaggactttgcgaattccccctgaggtcacatctcgagccaacgaaccacgcagtgatccagactcttatgaactccatggatccagaatccactccaccgacttgttgtgtccctacgaggctttcaccaattagcatcttgtttattgactcagcaaataacgtcgtctacaagcagtacgaggacatggtcgtggaatcgtgcggatgccgc

SEQ ID NO: 250351 - DNA, 1503 bp, synthetic construct
  misc_feature 1..1503: note = Description of Artificial Sequence: Synthetic coding sequence
  source 1..1503: mol_type = other DNA
atgcggctgcccaaactgctcacctttcttctttggtatctggcgtggcttgacctggagttcatatgtaccgttcttggagctcctgatcttggccaaagacctcaggggacgcgccccgggctggcaaaggcggaggccaaagaaagaccaccattggccaggaacgtgttccgtcctggcggccattcctacggtgggggtgccactaacgcgaatgcaagggcaaagggtggtacgggtcagactgggggacttacccaaccaaagaaggacgaaccgaagaaactgccacctagacctggagggcccgaacctaagcccggacatccacctcaaactcgtcaggccactgcacggaccgtcactcccaaggggcagttgccgggaggaaaagcgcctcccaaggccggttccgtcccgtcctcatttctgcttaagaaggcaagggaaccaggacctccacgggaacctaaggaacctttccgccctccacccattacccctcacgagtacatgttgtccctttacaggactctgagcgacgcagatcgcaagggaggcaactcgtccgtaaaacttgaagcagggcttgctaacaccatcacgagctttatagataagggacaggatgatagggggcctgttgtcagaaaacaacgatacgtttttgacattagcgcattggaaaaggatggtctgcttggtgcagagttgcggattctccgcaaaaagccctcggacactgcaaaaccggcagccccaggagggggtcgagcagcacaacttaagctctcatcgtgtccttcagggcggcaacctgcttcgctgctggatgtgcggtccgtcccaggtctggacggctcgggatgggaagtgtttgatatctggaaacttttccgcaactttaagaattcggctcagctgtgccttgagctcgaagcatgggaaagagggagagcagtggacctcaggggtcttggattcgatcgggccgcaagacaggtccacgaaaaggcattgtttctcgtgtttggtagaaccaagaagagggacctgtttttcaacgagattaaggcgcgctccggccaagatgacaaaactgtttatgaatacctgttttcgcaaagacgcaagaggagggctcctctcgccacgagacaggggaagcgtccatcgaagaaccttaaagcgagatgctcgaggaaggcgcttcatgtgaactttaaggacatgggatgggacgattggattatcgcacctcttgaatatgaagcatttcattgcgaaggtctttgtgagtttcctctcagatctcatctggagcctactaatcacgcagtgattcaaacccttatgaactccatggatcccgaatcgacgcccccaacctgctgtgtgcctacccgtctctcgcctattagcattctgtttattgactcggccaataacgtggtgtacaaacaatacgaggacatggtggtcgagtcatgcggatgtcgc

SEQ ID NO: 250352 - DNA, 1503 bp, synthetic construct
  misc_feature 1..1503: note = Description of Artificial Sequence: Synthetic coding sequence
  source 1..1503: mol_type = other DNA
atgcggctgccaaaactccttacctttctcctgtggtacttggcctggctggatctggaattcatttgtactgttctcggagcacctgatctcggacagcgtccacaaggaactcggcctgggctcgccaaggccgaagcaaaggaacggccaccacttgcccggaatgtgtttcggccaggaggtcattcgtatggcggcggagccacgaacgccaatgccagagcaaaggggggaacgggacaaactgggggccttacccaacctaagaaagatgagcctaagaagctcccgcctcgacctggtggtccagagccaaaacctggtcaccctccccaaacccgacaggctacggctagaaccgttacccccaaagggcagcttcctggtggtaaggcacccccgaaagcggggtcggttccaagctcttttcttctgaagaaggctcgggaaccaggacctccacgtgagcctaaggaaccgtttcgcccacctccaataactcctcacgagtacatgctgtccttgtaccgaacccttagcgatgccgataggaagggtggtaactcgtcggtgaagctggaagcaggcctggcgaacacgatcactagctttatagataagggccaagatgatcgcggtccggtggtacgtaaacaaagatatgtttttgacatcagcgcgcttgagaaggacggccttctgggagcggagcttagaattttgagaaagaagccctccgatacggccaaacctgcagcacccgggggcgggcgggcggcacagctgaaactttcatcatgcccttcaggaaggcagccagcaagcctgcttgacgtgcggtcagtgcctgggctggatggaagcggttgggaagtctttgatatatggaagctgtttcgcaatttcaagaactccgcccagctttgtcttgaactggaagcgtgggagcgtggcagggccgtggatcttagaggactcggattcgaccgagcagcaagacaagtccatgaaaaagcactctttctggtgtttggaagaacgaaaaagagagacttgttctttaacgagataaaggcacggtccggccaagacgacaagaccgtgtacgagtacctgttttcacaaagaagaaaaagacgtgcaccgcttgcaacccggcagggaaagcggccatcaaagaacctgaaggctcggtgcagccgaaaggccctccacgtcaacttcaaagacatgggatgggatgactggattattgcacctctggaatacgaggcatttcattgcgaaggactgtgtgaatttccactcagaagccatcttgaaccaactaaccatgcagtcatacagaccttgatgaactctatggatccagagtcgaccccacctacctgttgcgtccccaccagactctcacctatttcaatcctgttcattgattccgccaataatgtggtctacaaacagtacgaagatatggtggtggaatcgtgtggttgtcgc

SEQ ID NO: 250353 - DNA, 1503 bp, synthetic construct
  misc_feature 1..1503: note = Description of Artificial Sequence: Synthetic coding sequence
  source 1..1503: mol_type = other DNA
atgcgcctgcctaagctcctcacgttcctgctgtggtacttggcatggctcgacctcgaatttatctgtaccgtactcggcgcccccgacctgggacagcgcccccaaggaaccaggcccggacttgccaaagctgaggccaaggaaagacctcctttggcacgcaacgtgtttagaccaggaggccattcttacggcggtggagccactaatgcaaatgcacgcgcaaagggtggtaccggccagactggcggactcacccagcccaaaaaggacgagcccaagaagctgcctcctagacccggaggccctgaacctaaacctggacatcctccccagaccaggcaagccacagccagaacagtgaccccaaagggacagctccccggaggcaaggcacccccaaaggctggatccgtgccttctagttttcttctcaagaaggctcgcgaaccaggaccaccccgcgaaccgaaggaaccattcaggccaccaccaattaccccacatgagtacatgctctccctgtaccgcacactgtctgacgccgaccgcaagggcggaaattctagcgtcaagcttgaagccggacttgccaataccataaccagcttcatagataagggccaagacgatagaggaccggttgtaaggaaacagcgctacgtattcgacatctctgcgttggagaaggacggtctgttgggagccgagcttagaatcctcagaaaaaagcctagtgacaccgccaaaccagctgcgcctggaggtggacgcgcagcccagctcaagcttagctcctgtccttccggtaggcagccagctagcttgctcgatgttagaagcgtgccaggcctggatggatcaggttgggaagtgttcgacatttggaagctcttcagaaactttaaaaactccgcgcagttgtgtctcgagctggaagcttgggaaaggggaagagctgtggacctgaggggactcggatttgacagagccgctaggcaggtccacgagaaagccctgtttctggtattcggtagaaccaagaagagggacctgttttttaatgaaatcaaagcccgctctggccaggacgacaagactgtgtacgagtatctgtttagtcagagaaggaagcgccgcgcaccactggctacacgccagggaaagcgcccatcaaagaacctgaaggcccgctgttcacgcaaggccttgcacgtgaacttcaaggacatgggatgggacgactggatcattgctccactcgaatacgaggccttccattgtgaaggtctgtgtgagttccctctgagatcacacctcgagccaacaaatcacgccgttatccaaactctcatgaattctatggatccagaatctacgccccccacatgctgcgtgcccactcgcctctctcccatcagtattctgtttatcgattctgctaataatgtcgtgtataagcaatacgaggacatggtagtggagtcttgcggctgccgc

SEQ ID NO: 250354 - DNA, 1503 bp, synthetic construct
  misc_feature 1..1503: note = Description of Artificial Sequence: Synthetic coding sequence
  source 1..1503: mol_type = other DNA
atgagactgcccaaactgcttacctttctgctctggtacctggcatggctcgacctggaattcatatgcaccgtccttggagcaccagatctggggcagcggcctcagggaaccagaccaggccttgcaaaagcagaggcaaaggaaaggccacctttggcgagaaacgtgtttcgacctgggggtcattcctacgggggcggcgcaactaacgcaaacgcacgggctaagggcggaactggacaaacgggaggtctgacgcaaccaaagaaggatgagcctaagaagctgccgcctcgacccggcggtcctgaaccgaagccaggtcaccctcctcaaaccaggcaggcaaccgcgagaactgtgaccccaaagggtcaacttcctggtggaaaagcaccccctaaggccggttccgtgccttcgtcgttccttctgaaaaaggcacgtgaacctggtcccccaagggagcctaaagagccatttagacctccacctatcactccgcacgagtatatgctgtcgttgtaccgaactctcagcgatgcagaccggaagggaggcaattcatccgtgaaacttgaagcaggcctggcgaacactattacctccttcatcgataaaggtcaggatgataggggccccgttgtgagaaagcagagatatgtgtttgacatttcggcgctggagaaggatggacttttgggagcagaactgaggattcttagaaagaagccgagcgataccgcaaaaccagcagcacctggaggggggagagcagcccagctgaaactttcgagctgtccatcgggtagacagcccgcatctctccttgacgtgcggtcagtgcccggactcgatggctcagggtgggaagtgttcgatatttggaagctgtttagaaactttaagaactccgcccagctctgtctggaacttgaggcatgggaaaggggaagggccgtggatctcagaggacttgggtttgatcgggctgccagacaagtgcacgagaaagccctgtttttggtctttggaagaaccaaaaagagggatctcttctttaatgaaatcaaagcacgatccggacaagacgataagaccgtgtacgaataccttttttcgcaacgtagaaagcgccgggcacctcttgcaacccggcaagggaagcgcccaagcaaaaaccttaaggctaggtgtagtagaaaagcactccacgtcaactttaaggatatgggttgggatgattggataatcgccccactggaatacgaagcattccattgtgaaggcctctgtgagtttcctctgcggtcgcaccttgagccgactaaccatgcagtcatccagaccctcatgaactcgatggatccagaatccacgccaccgacctgttgtgtccctaccagactgtcgccaatatcaatactgtttatcgattcggcaaacaatgtcgtgtacaagcagtacgaggatatggtggtcgagagctgtggctgcaga

SEQ ID NO: 250355 - DNA, 1503 bp, synthetic construct
  misc_feature 1..1503: note = Description of Artificial Sequence: Synthetic coding sequence
  source 1..1503: mol_type = other DNA
atgcggctccccaagcttctcaccttcctgctctggtacctcgcttggctcgatttggagtttatatgtacagttttgggagccccagacctaggccagcgcccccagggcaccagacctgggctggctaaggccgaggccaaggagcggccccctcttgcccggaacgtcttccgaccgggtggacattcctatggcgggggcgctaccaatgcaaacgcgcgtgctaagggcggtaccggccaaacaggcggcttgacccagccgaagaaagatgagccaaaaaaactcccccctcgccccggggggcctgagccgaaacccggtcatccaccccagactcgacaagccaccgctcgaactgttacccccaagggtcagttgcccggcggcaaggccccgcccaaggctggatctgtcccttctagcttcctcctgaagaaggcgagagagccgggaccgccccgcgagcctaaggaacctttccgccccccccctatcaccccacacgagtatatgctttctctctaccgaaccctgtctgacgctgatcgtaaggggggcaactcatccgtcaagttggaagctggcctcgccaacacaattaccagctttatcgacaagggccaggatgaccgcgggcccgtggtccgtaaacaacgctacgtgtttgacatctcggccctggagaaggacggcctgctgggggccgagcttcgcatcttacgcaagaagcctagtgacacagccaagcctgccgcgccaggtggcggtcgagcggcccagcttaagctgagctcttgcccgtcgggtcgccagccagccagcctcttagacgtcagatctgtccctggtctcgatggctccggctgggaggtcttcgacatttggaaattgttccgcaacttcaagaattcggcacagctctgccttgaactggaggcttgggaacgagggagagctgtggacctgcgcggtcttggattcgaccgcgccgcccggcaagtgcacgagaaagctctttttctcgtattcggtcgcaccaagaagcgggaccttttcttcaatgagattaaggcacgttcaggccaggacgataagaccgtctacgaatatctcttcagccagcgtagaaagcgccgcgctcccctggcaactcgccaaggaaagcgtcccagcaagaacctgaaggcccgctgttcccgcaaggccttacatgtcaacttcaaggacatggggtgggatgattggatcatcgctccgctcgaatacgaagccttccactgcgaaggtttgtgcgagtttcctctgcgctcccaccttgagcccaccaatcacgccgttatccagacgctgatgaactcgatggatcccgaatctactccgcccacctgctgcgttcccaccaggctctccccaattagcatcctattcatagacagcgcaaacaacgtggtctataagcagtatgaggacatggttgtggagtcctgcggatgccgc

SEQ ID NO: 250356 - DNA, 1503 bp, synthetic construct
  misc_feature 1..1503: note = Description of Artificial Sequence: Synthetic coding sequence
  source 1..1503: mol_type = other DNA
atgcggctgcctaaactgctgaccttcttgctctggtaccttgcatggctcgacttagaatttatctgcactgtgttgggagcaccagatctgggacagcgcccgcagggaactcgtcccgggttagcaaaggcggaagccaaggagcgccctcccctggcaagaaacgtatttcgcccgggcggccacagttacggtggtggcgctaccaacgctaatgcgcgagcaaagggtggcacagggcagacaggagggttgactcagcccaaaaaggatgagccgaaaaagctcccccctagaccaggggggcctgagccaaagcctggacaccccccgcaaacaaggcaggcaaccgcacgaacagtgactccgaagggccagctgccaggaggtaaagctccacctaaagcgggatctgtgccgtcctctttcctcctgaaaaaagccagagagcccggacctccaagggagcccaaggagccttttaggccgccccccataacgccccatgagtatatgctttctctctaccgaacactttcagatgcagaccggaaaggtggcaattcatccgtgaagctggaggcaggcctggccaacactattacctccttcatagacaaaggacaggacgataggggacccgtcgtccgaaagcagagatacgtttttgatattagcgctctggaaaaagacggattgttaggagctgagctgcgtatactgcgaaagaaaccgagcgacactgcaaagcccgctgccccaggcggagggagggcagcccagctgaaattgtcatcttgtccctcaggccgtcagcccgctagtctcctggatgtgcggtcggtgccgggcctcgacggctcaggttgggaggtgttcgacatctggaaattattccgcaacttcaagaattcggcacagctctgcctggagctcgaggcatgggagcgaggcagggcggttgatctccgggggctgggattcgacagagctgccagacaggtacacgaaaaagccctgtttttagtattcggacggacaaagaaacgggatctgttcttcaatgagattaaggcacgtagcggccaagatgacaagactgtgtatgagtacctgttctcacagcgcaggaaacgcagagcccctttagctaccagacaggggaaaaggccaagtaagaacttgaaagcaaggtgcagtagaaaagcgctgcatgtgaattttaaggacatgggatgggacgactggattatcgcacctctcgagtacgaggcattccactgtgagggcctttgcgagttcccccttcgttctcatctcgagcccacaaatcacgccgtgatccagacgctgatgaatagcatggatccagagtccacacctccaacatgctgtgtgcccacgagattgtcaccaatttcaatactttttatagactctgccaacaatgttgtgtataagcagtacgaggatatggtcgtggagtcgtgcggctgtaga

SEQ ID NO: 250357 - DNA, 1503 bp, synthetic construct
  misc_feature 1..1503: note = Description of Artificial Sequence: Synthetic coding sequence
  source 1..1503: mol_type = other DNA
atgcgacttcctaaactgctgaccttcctcctgtggtacctggcttggctcgatctggagttcatatgcacggtcctcggcgcccctgatctggggcagaggccgcaaggcacgcgcccggggctcgccaaagccgaagcgaaggaacgccccccgctggcccggaatgtattccgccctggtggacactcctacggaggaggagccaccaacgctaacgcgcgggctaaaggggggaccggccagaccggaggactcacccaaccgaaaaaggatgaaccaaagaaactgccgccgcgtcctggggggccggaacctaaaccgggacatcccccgcagaccaggcaagctacggcgcgcaccgtgacgccgaaaggacaactcccggggggaaaggcgcctcctaaagccggatcggtcccgtcctcgttcctgcttaagaaggcacgggaaccgggtccgccgagagaacctaaggagccattccggcctccacctatcaccccacatgaatacatgctctcgctgtaccgcaccctgtcggacgctgatcgcaagggcggaaactcgtctgtgaagctggaggccggactggctaatactatcacgagcttcatcgacaagggccaggacgaccgaggtcccgtggtgcgcaagcagcgctacgtctttgacatctccgcactggaaaaagatggcctcttgggagcagaactgagaatcctcagaaagaaacctagtgataccgccaagccggccgcccccggagggggacgcgcggcgcagctcaagctgtccagctgcccctccggacgccaaccggcgtcattgctggatgtgcgctcagtgcccgggctggatggatcggggtgggaggtgttcgacatttggaagctgttccggaatttcaagaactcggcacaattgtgtctcgagttggaggcttgggagcgcgggcgcgctgtggaccttaggggtctgggatttgaccgggccgcgcgccaggtgcacgaaaaagctctgtttctggtgttcggtcggaccaaaaagcgggatctctttttcaatgagattaaggcccggagcggtcaggacgacaaaaccgtgtacgagtatctcttctcgcagcgcagaaaaagacgcgcgccactggccactcggcagggaaaaagacccagcaagaacttgaaggcgagatgctcaagaaaggctctgcacgtgaactttaaagacatgggatgggacgactggatcatcgccccactggagtacgaagcgtttcattgcgaggggctgtgcgaattccctcttcgatcccacctggaaccaactaaccacgcggtgattcaaactctgatgaactcaatggatcctgaaagcaccccgccgacttgttgtgtccccacccggctgtcgccaatctcgatcctcttcatcgactcggccaacaatgtcgtgtacaagcagtacgaagatatggtggtcgagtcctgcggctgcaga

SEQ ID NO: 250358 - DNA, 1503 bp, synthetic construct
  misc_feature 1..1503: note = Description of Artificial Sequence: Synthetic coding sequence
  source 1..1503: mol_type = other DNA
atgagactgccaaaactgctcaccttcctcctttggtaccttgcttggttggacttggaattcatttgtactgtgttgggtgcaccggatttgggacagcgacctcaagggactagacccggactggccaaggcagaagcaaaggaaaggcctcccttggcaagaaatgtgtttcgtcctggcggtcattcgtacggaggaggcgcaaccaacgccaacgcaagagcaaaaggaggcactggacaaaccgggggtctgactcaacccaagaaagacgaacctaagaagctgccacctcggcccggtggacctgagcctaagcctggacaccctccacaaaccagacaagcgactgcccggaccgtcacccctaaaggccaactgcctggcggtaaagccccaccaaaggcagggtcggtgccaagctcttttttgcttaagaaggctagagagcccggtccacctcgagaaccaaaggagccttttcggccgcctccgatcactccccacgagtacatgcttagtctgtatcgtaccctgtcggacgcagaccgaaaaggaggaaatagctcggtgaaactggaggcaggactcgcaaatactattaccagctttattgataagggtcaggacgatcgtggacccgtggtcagaaaacaaagatacgtgtttgacatttccgctcttgagaaagatggtctgcttggcgcagaactgcgtattttgagaaaaaagcccagcgataccgcaaaacctgcagcacctggagggggtagagcggcccaacttaagctcagttcgtgcccatcagggcggcagcctgcatccctcctcgacgtgagatcagtcccaggtcttgacgggagcggatgggaagtatttgatatatggaagttgttcagaaacttcaagaatagcgcccagctttgccttgaactggaagcctgggaacggggtcgggcagtggatctcagagggcttggttttgatcgcgcagcaaggcaagtccatgaaaaggccctgttcctcgtgttcgggcgaaccaagaagagggacctgtttttcaacgagattaaggcacggtcaggacaagatgataagactgtgtatgagtacctttttagccagagacgcaagcgcagagcacccctcgcgactcgtcagggaaagcggccttcgaagaacctgaaggcacgttgttcaaggaaggcacttcacgtcaactttaaagacatgggatgggacgactggatcatcgcccctcttgaatacgaagcgtttcattgtgaaggactctgtgaattcccactgcggtcgcaccttgaacccaccaaccatgcagtgattcagacccttatgaactccatggatccagagagcactcctccaacgtgctgtgtcccaacccgtctgagccctatttccatcctgttcattgactcggccaataacgtggtgtacaaacagtacgaggacatggtcgtggaatcatgtggttgtagg

SEQ ID NO: 250359 - DNA, 1503 bp, synthetic construct
  misc_feature 1..1503: note = Description of Artificial Sequence: Synthetic coding sequence
  source 1..1503: mol_type = other DNA
atgagattgccaaagctgcttacttttctcctttggtaccttgcctggctggacctggaattcatttgtaccgtcctcggcgcaccggatcttggccagcggcctcaaggtactagacctggactcgcaaaggcagaagccaaggaaagacctccccttgcgcggaacgtgtttaggcccggggggcacagctacggaggcggggcaaccaatgccaacgcaagagccaaggggggtactggccagaccggcggattgactcaacctaaaaaggacgagcccaagaaactgcctccacgacctggaggacccgagccaaagcctgggcatcctccacaaacgcggcaagcaaccgcccggacggtgacccctaagggacaactccctgggggaaaggcgccacccaaggccggttccgtgccctcctctttcctgttgaaaaaggcacgtgaacctggcccacccagagagcctaaagaaccattcagaccaccccccattaccccacatgaatacatgctgtctctctaccggactttgtcggacgctgatcggaagggtgggaattcatcggtgaaactggaagcaggtctggcaaataccatcactagctttatcgacaaaggacaggacgatcgtggacccgtcgtcagaaagcaacgctacgtctttgatatatccgcacttgaaaaggatgggttgctgggtgcagaactccgaatactgagaaagaaaccatccgacaccgcaaagccagccgccccaggaggtggcagagccgcacagcttaaactgtccagctgccctagcggtaggcaacccgcaagccttctcgatgtgcgctcggtccctgggcttgatggctctggttgggaagtctttgacatttggaaactgttcaggaatttcaagaatagcgcacaactttgccttgagctggaggcttgggagagagggcgtgccgttgatctcagaggcctgggatttgaccgggctgcccgccaagtccatgaaaaggccctttttctggtgttcggtcgtactaaaaagagggacttgtttttcaacgagattaaggcgcgctctgggcaagacgataaaaccgtgtacgagtaccttttctcgcagagaagaaagaggcgagcacccctggccactcgtcagggaaagaggccttcgaagaacctgaaggcgaggtgctcgaggaaggcgcttcatgtgaactttaaggacatgggatgggatgactggatcattgcacctctggaatacgaggcatttcactgtgaaggcctttgtgaattccccctgcggtcacacctggaacccacgaaccacgcagtgattcaaactctgatgaactcgatggaccccgaatccactccccctacctgctgcgtccctacccggctttcgccgatttccattctgttcatcgattcagcaaacaacgtggtgtacaagcaatacgaagatatggtggtggagagctgcggatgtcga

SEQ ID NO: 250360 - DNA, 1503 bp, synthetic construct
  misc_feature 1..1503: note = Description of Artificial Sequence: Synthetic coding sequence
  source 1..1503: mol_type = other DNA
atgcgtctcccgaagctcttgactttcctgctatggtaccttgcttggctcgaccttgaatttatttgcacggtcctgggcgctcctgacctcgggcagaggcctcagggcacacggcccggactcgcgaaagccgaggcaaaggaacgtcccccactggcaagaaacgtattccgcccagggggccacagctatggtggtggggctacaaatgccaacgctagggctaaaggcggaaccgggcagactggaggcttgacccagcccaaaaaagacgagccgaagaaactcccacctcgaccagggggccccgagcctaaaccaggccacccgccccagacccggcaggctactgcacggactgtcactccgaagggccagctgccaggcgggaaggcaccacctaaggccggttctgtgccctcttcatttttgctgaaaaaagccagagagccgggcccaccccgcgagcctaaagagccttttagacctcccccgatcactccccatgaatatatgttgagcttatatcggaccctctcagacgctgaccgaaaaggtgggaactctagcgtcaagctggaggccggattagctaacaccataacttcgttcatcgataaaggtcaagatgaccgtggcccggtcgtaaggaaacagcggtatgtttttgatatatcggcgctggaaaaagatgggctgctgggagctgagcttcgtatactgagaaaaaaaccttcagacacagctaagccagccgcaccaggaggcggacgcgccgctcaactgaaactgagttcctgtccaagcggcaggcaaccagcaagcttgctggatgtccggtctgtaccgggtctagacgggagcggttgggaggttttcgatatctggaagctgtttcggaacttcaaaaattccgcccagctctgtttggagctggaggcttgggaacgaggccgggccgtggatctgaggggacttggatttgaccgggctgcccgccaggtgcacgagaaagccttgtttcttgtgttcggacgcactaaaaaaagagacctgttcttcaatgaaataaaagcgcgctctgggcaagacgacaagaccgtgtatgagtacctgttctcccaaagacggaagaggagggctccactggcgacccgccaaggcaaacggccaagtaaaaacctcaaagctcgttgctcccgcaaagcactccatgtgaatttcaaagacatgggatgggacgattggattatagccccactggagtatgaagcattccactgcgagggcctgtgcgaattccctctgcggtcacatctggaacccaccaatcacgctgtcatccagaccttaatgaactccatggatccagagtcaactccgcctacctgctgcgtgccgactcggctgtcccctatcagcattctgtttatcgacagcgctaacaacgtggtgtacaagcagtacgaggacatggtcgttgaatcctgcggctgtcga

SEQ ID NO: 250361 - DNA, 1503 bp, synthetic construct
  misc_feature 1..1503: note = Description of Artificial Sequence: Synthetic coding sequence
  source 1..1503: mol_type = other DNA
atgaggctccctaaactgctgacttttctcttgtggtatctcgcctggttagatctggaatttatatgcacagtcctgggagcgcccgatctaggacagaggccgcagggaacacgccccggactggctaaggccgaagctaaagaaaggcctcctctagcgagaaatgtatttcgccccggaggacattcttatggggggggagccactaatgcaaacgcccgagcaaaagggggaacagggcagacagggggactaacacagccaaaaaaagatgaaccaaagaaactgccacctcgccctggggggccagagcctaagccagggcatccacctcagactagacaagctacagctaggactgtgactccaaaaggacaactccctggaggaaaagctcctcctaaagccggatccgtcccttctagtttcctgctcaaaaaagccagggagcccgggcccccccgcgaaccaaaagaaccattccggcctcctccaatcacacctcatgaatatatgctatctctctataggacactcagtgatgctgaccgcaaaggggggaatagtagtgtcaaactagaagccgggcttgctaacactatcacttccttcatagataaggggcaagatgatagagggcctgtggtccgaaaacagcggtatgtgttcgacatatctgccttggagaaagatggacttttaggggctgaactgagaatcctacggaaaaaaccctctgatactgctaaaccagccgccccgggaggggggagggcagcccagctaaaactctcaagttgcccctcaggacgccagccggctagtttgcttgatgtcagatccgttccaggactcgacggatctgggtgggaagtatttgatatctggaagctgttcaggaatttcaaaaattctgcccagctctgtctggaacttgaagcatgggaaagagggagggctgttgatcttcgcggacttggattcgatcgagccgcccgacaggtgcacgaaaaagctctattcctcgtgttcggaaggactaaaaagagagatcttttttttaatgaaatcaaagcaagaagtggacaggatgataaaactgtttatgaatatctgttttctcagcggcggaaacgcagagcgcctttagccactcggcagggaaaaaggccctctaagaatttaaaagccagatgctccaggaaagccttgcatgtgaactttaaagatatggggtgggatgattggatcatcgctccccttgaatatgaggcttttcattgcgaagggctgtgtgaatttcctcttcggagtcatcttgagcctacaaaccacgctgtcatccagacacttatgaatagtatggatccagaatctacaccaccgacatgctgtgtccccactaggctgtccccaatctcaattctcttcatagactcggccaacaatgtggtctataaacagtacgaagatatggttgtggaaagttgcggatgcagg

SEQ ID NO: 250362 - DNA, 1503 bp, synthetic construct
  misc_feature 1..1503: note = Description of Artificial Sequence: Synthetic coding sequence
  source 1..1503: mol_type = other DNA
atgagattaccaaaactgctgactttcctcctgtggtacctggcttggctggacctggagttcatttgcactgtacttggtgcaccagacctgggccagcgaccacaaggcacacgcccagggctggccaaggccgaggctaaggagcgtcccccactggcaaggaacgtgtttagaccaggggggcattcctacggggggggagccacaaacgcaaatgccagggccaagggcggcaccggccagaccggaggcttgactcaaccaaaaaaagatgaacccaaaaaactccccccacgacccggcggcccagagcctaaacccggccacccaccacagacccggcaagcaactgctcgcactgtcacccctaaaggccagctgcctggtggtaaggccccaccaaaggcaggtagtgtgccctcttcttttcttctcaagaaagccagagagcctggtccacctagggagccaaaggaaccatttcgtccaccccccatcaccccccatgagtatatgctgtccctctaccgcactctctctgatgctgatcggaagggagggaacagctctgtcaaattagaagccggcttagcaaacaccatcacctccttcattgataaaggccaggacgatcgcggccccgttgtccgtaaacagaggtatgtgttcgatataagcgcactagagaaggacgggttactcggcgccgaattaaggatcttgcgcaaaaagccaagcgataccgccaagcccgccgcccctggtggcggccgcgcagcacagctcaaactgagtagctgtccatcaggccgacagcctgccagcctactcgacgttaggagcgtgcctggcttagacggttccggctgggaagttttcgatatctggaagctgttcagaaatttcaagaattctgctcaactgtgtcttgaactagaggcctgggaacgcggcagagctgtcgacctgagaggtctcggtttcgacagggctgctcgacaagtgcacgaaaaagccctgttcctggttttcggaaggacaaagaaacgagacctcttttttaacgagattaaggcaaggtctgggcaggacgataagaccgtgtatgaatacctcttttcccaaaggcgtaagagacgagccccattagctactagacaaggcaaaaggccatccaaaaacctgaaagcccgttgctccaggaaggccctgcacgtcaactttaaggacatgggttgggatgattggattattgccccactcgaatatgaagcattccactgtgaagggttatgtgaatttcctcttaggtcccaccttgagcccaccaatcatgctgtgattcagaccctgatgaacagcatggaccccgaaagcacaccccccacttgctgcgtgccaacaaggctttctcctattagtatccttttcatagactccgccaacaatgtcgtttacaagcaatatgaggacatggttgtggaatcctgcggatgtcgg

SEQ ID NO: 250363 - DNA, 1503 bp, synthetic construct
  misc_feature 1..1503: note = Description of Artificial Sequence: Synthetic coding sequence
  source 1..1503: mol_type = other DNA
atgcgcctgccgaaacttctgacgttcctcctgtggtacctggcctggctggacctggagttcatctgcaccgtgctcggagcaccggacctgggacaaagacctcaaggtaccaggccgggactcgcgaaagcagaagcgaaagagcggcccccgctggcccgcaacgtgtttcgtccgggcggtcattcgtacggaggcggggccactaacgccaacgcgagagccaagggaggaactggccagactggagggttgactcagccgaagaaagatgaacccaagaaactcccgccacggcccggcgggccagagcctaagccaggacacccgccgcagacccggcaagctaccgctcgtactgttactcctaagggtcaactgcctggagggaaagcccctccaaaagctggatccgtgccttcctcattcttgctgaagaaggccagggagccgggcccccctcgcgaaccgaaagaaccattccgccctccgcccatcaccccacatgagtacatgctcagcctttaccggaccctttcggatgcggatcggaagggcggaaattcctccgtcaagctggaagccggcctggccaacactattaccagctttatcgacaagggccaggacgatcggggcccggttgtgcgcaaacaaagatatgtgttcgacatctctgctctcgagaaggacggtctgctgggagcagaactgagaatcctccggaagaagccaagcgatacggctaagcccgcagcgccgggaggaggacgcgccgcgcaactcaagctgtcatcatgtccgtcgggccgacagcccgcgtcacttttggacgtgcgcagtgtgccggggctggacggaagcggatgggaagtgtttgacatctggaagctgttccgcaactttaagaactcggcgcagttgtgcctggaactcgaagcctgggaacgcggccgggcagtggacctcagagggttgggtttcgacagggcagctcggcaggtgcatgagaaagccctgttcctggtctttggacgcaccaagaaacgcgatctgtttttcaacgaaatcaaggcccggtcaggacaggatgacaagactgtgtacgaatacctgttctcccagagaagaaagaggcgcgcccctctggcaactaggcaggggaaaagaccgagcaagaatttgaaggcacgatgctccagaaaggccctccacgtcaatttcaaggatatgggttgggatgactggattatcgcgccactcgagtacgaagccttccactgcgaaggactgtgcgagttcccactgcggtcgcaccttgagccaaccaaccacgcggtcatccagaccctcatgaattcgatggatccggaatcgacgccaccgacctgctgtgtgccaacccggctctcgccgatctccattctgttcatcgactccgctaacaatgtggtctacaagcaatacgaggacatggtggtcgagagctgcggatgtcgc

SEQ ID NO: 250364 - DNA, 1503 bp, synthetic construct
  misc_feature 1..1503: note = Description of Artificial Sequence: Synthetic coding sequence
  source 1..1503: mol_type = other DNA
atgagactgccgaagttgttgactttcctcttgtggtatctggcctggctggacctcgagttcatttgtactgtgctcggcgcccccgacttgggacaaaggccacagggaaccagaccggggctcgccaaggccgaggcgaaggaacggcccccactcgcccgcaacgtgtttcgacctggtgggcattcgtacggaggaggggccaccaacgccaacgcacgcgcaaaagggggcaccggacagaccggcggacttactcagccgaagaaagacgagccgaagaagctgccccctcggccgggaggacctgagccgaaaccgggacacccgccccaaactcgccaagcaaccgcgcgcactgtgactccgaagggacagctgcctggtggcaaagccccacccaaggccggctccgtgccttcatcatttctgctcaagaaggccagagaaccgggacctcctcgggagccgaaggaacctttcaggccgcccccgattaccccacacgaatacatgctgtccctgtaccggactctctcagatgccgacaggaaaggaggaaactcgtccgtgaaacttgaggccgggctggccaacaccatcacgagcttcatcgacaaggggcaggacgatcgcggaccagtcgtgcggaaacaaagatacgtgttcgacatctcggctctggaaaaggacgggctgctcggagccgaactgcggatcttgcggaaaaagccctccgacaccgcaaagccagcggcgcctggcggaggacgggccgcacagctgaaactgagcagctgcccgtctgggcgccagccggcgagcctcctggacgtgagatccgtcccaggactggacggatcgggatgggaagtgttcgacatatggaaacttttccggaatttcaagaactcagcccagctttgcctggaattggaagcatgggagcggggcagggcagtggatctgcgcggactcggatttgaccgcgcagccagacaggtgcacgagaaggccttgttcctggtgttcggacggacgaagaaacgggacttgtttttcaacgagattaaagctcggtcaggacaagacgacaagactgtgtacgagtacctgttctcccagcggcggaaaaggcgggcgccactggccacgagacaaggcaagcgcccgtcgaagaacctgaaggccagatgctcgcgcaaggccctgcatgtgaactttaaggacatgggctgggatgactggatcatcgcgccactcgaatacgaagcattccattgcgagggattgtgcgagttccctctgcggagccaccttgagccgaccaaccatgcggtgatccaaaccctgatgaattcaatggatccagagtcgactcccccgacctgctgcgtgccgacccgcctgtcgcccatctccatcctgttcatcgattcggccaacaacgtggtgtacaagcaatacgaagacatggtcgtcgagtcctgcggctgccgg

SEQ ID NO: 250365 - DNA, 1503 bp, synthetic construct
  misc_feature 1..1503: note = Description of Artificial Sequence: Synthetic coding sequence
  source 1..1503: mol_type = other DNA
atgagacttcctaagctgctcactttcctgctctggtaccttgcttggcttgatctggaattcatttgcactgtgcttggtgcacctgacctcggccaaagacctcagggaactcgccctggccttgcaaaggcagaggcaaaggaacggcctccgctggcacgcaatgtgttccggcccggcggccactcctatggtggaggagcaactaacgccaatgcacgggcaaaaggtggaactggccagaccggcggtcttactcagcctaagaaagacgaacccaagaagttgcctccaagacccggcggtcctgaacctaagcccgggcaccccccacaaactcggcaagccaccgcccggaccgtgactcctaaaggacaactgcccggggggaaggccccgcctaaggccggatcggtgccgtcctccttccttttgaaaaaggcaagagagccaggaccacctagagaacccaaggagccctttcgtccgccacccattactccacatgaatacatgctgagcctgtaccgtaccctttcggatgctgatcggaagggagggaactcctccgtgaagctggaggcaggtctggccaacacgataacttcgtttattgacaagggacaggatgatcggggtcccgtggtccgtaagcaacgctacgtgtttgatatttccgcactggagaaggacggtctgcttggtgcagaacttagaattctccgcaagaaacctagcgatactgcaaagccagcagcacctggaggcggaagagcagcgcagctgaagctgtcgtcctgcccatccggccgacaaccagcctcgctgctggatgtgcgatccgtgcccggcctggatggttcggggtgggaagtgtttgacatctggaaactttttcgaaatttcaagaatagcgctcaactttgcctcgaactggaggcctgggaacgaggacgcgccgtggatctgaggggacttgggtttgatagggcggcgaggcaggtgcatgaaaaagcattgttcctggtgttcggtcgtaccaaaaagagggacctgttctttaacgagatcaaggcccggtccggccaggacgataagaccgtctacgaatacctcttttcccagcgtcggaaaagaagagcgcctctcgcaacccgccaaggtaaacgcccctcgaagaatcttaaagccaggtgttcgcgtaaagcgcttcatgtgaactttaaagatatgggttgggacgactggatcatcgcaccacttgaatatgaggcattccactgtgaaggtctgtgcgagttcccccttcgctcgcatctcgagccaactaaccatgcagtcatccaaaccctgatgaattccatggatccggaatcgactccccctacgtgttgcgtgccaacgaggctgagccctattagcatcttgttcatcgacagcgcaaacaacgtcgtgtacaaacaatacgaagatatggtggtagaatcgtgtggctgtaga

SEQ ID NO: 250366 - DNA, 1503 bp, synthetic construct
  misc_feature 1..1503: note = Description of Artificial Sequence: Synthetic coding sequence
  source 1..1503: mol_type = other DNA
atgagactccctaaattactgactttcctgctctggtatctggcgtggctggacttggagttcatctgtaccgtgctcggggctccagacctcgggcagaggcctcagggaaccaggccaggcctagcaaaggccgaagccaaagaacgcccgcctctggcacgcaacgtgttccgccctgggggacatagttatggcggtggtgccacaaatgcgaacgctagagccaagggtggcacagggcagacaggtgggctcacccagccaaaaaaagatgaacccaaaaaactcccacctaggcccggcgggcctgaaccaaagccgggccaccccccacagacaagacaggccacagcacgcactgtgactcccaagggacagctgccagggggtaaggcgcctccaaaggcgggatctgtgcccagttcttttctactgaagaaagcgagggagccagggcctcccagggaaccaaaggagcctttccgaccaccccccattactccacacgagtacatgctttccctctatcgcactttgtccgacgctgatcgaaagggcgggaactcttcagtgaagctggaagctggattggctaacaccatcacttcgttcatcgacaaaggccaagatgatcgtggtcccgtcgtgaggaaacagagatatgtcttcgacataagcgcactggaaaaagatggtctgcttggagccgagctccggatcctgcggaagaaaccaagtgacaccgctaaaccagctgcccccggaggtggcagagccgcgcaacttaagctttcaagctgcccaagcggacgccagcccgcgagtcttttggacgtgcggagtgtccctgggctggatgggtctggatgggaggtcttcgacatatggaagctctttaggaatttcaaaaatagcgctcaactttgcttagagctcgaagcctgggagcgtggacgcgccgtcgacttgagagggctaggattcgatagggccgctcggcaggtgcacgaaaaggctctgtttctcgtgttcggccggaccaaaaaacgagacctgttctttaatgagattaaggcccggagcgggcaagacgacaagaccgtatatgaatatctgttctcacagcggcgaaagagacgggccccactggccacccggcagggaaaacgaccctccaagaacctgaaagcccggtgctccaggaaggccttacacgtgaatttcaaagatatgggttgggacgactggatcatagcccccctggagtatgaggcctttcattgtgaaggactgtgtgagtttccactgaggtcacaccttgagccgaccaatcatgcagtgattcagacactaatgaactctatggatcctgaatccacccctcctacttgctgtgttccaacccgcttgagccccatttccattctgttcatagactctgccaacaacgtggtgtataaacagtatgaggatatggttgtggaatcttgtggctgtaga

SEQ ID NO: 250367 - DNA, 1503 bp, synthetic construct
  misc_feature 1..1503: note = Description of Artificial Sequence: Synthetic coding sequence
  source 1..1503: mol_type = other DNA
atgcggctgccaaaactgctgaccttccttctttggtacctggcctggctcgatctggagtttatttgcaccgtgctgggcgctccagacctcggacagagaccacagggtaccaggcctgggttagcaaaggctgaggcgaaggagagaccgcccttggccagaaacgttttccgcccaggtggacacagctacggtggaggtgccaccaatgccaatgcacgggccaagggaggcaccggtcagacagggggccttacacagcctaaaaaggatgaaccaaagaaactacccccacgcccaggaggtcccgagcctaagcccggtcatccacctcaaaccaggcaagcaaccgcccggacagtgacccccaaagggcagctgccaggtggaaaggcccccccaaaagctgggtctgtgccttccagttttctgctcaagaaggcccgcgagcccggaccacctagggaaccaaaggagccttttaggccgccaccgatcactccacatgagtacatgctgagcctgtatagaacactgagtgatgcagatcggaagggagggaactcatcggtaaaactggaagccggtctcgctaacacaatcacaagcttcattgacaagggtcaagatgaccggggacccgttgtcaggaagcagcgttacgtgtttgacatctcagcccttgagaaagacggtctgctcggggctgagctcaggatcctgagaaagaagccgagcgacacggcaaaaccggccgcacccggaggaggaagggctgcacagcttaagctgagctcttgcccctccggacgccagcctgcttcattgctggacgtccgttctgtgcctggccttgacgggtctggatgggaagtgttcgatatctggaagttgttccggaatttcaagaactctgcccaactctgccttgagctggaggcctgggaacgggggcgggcggtcgacttacgcggcctggggtttgacagggccgcccggcaggtgcacgagaaggctctattcctggtgttcggcagaactaagaagagggatctctttttcaacgagatcaaggcccgctccggacaggatgacaaaaccgtttacgaatacctctttagtcagagacgcaagcgccgcgctcctctggccacccgccaaggcaaacggcctagtaagaatctgaaggccagatgtagccggaaggccctgcacgtgaatttcaaggatatgggctgggatgactggattatcgccccgctcgagtatgaagcgttccattgtgaggggctatgcgagttcccactcagaagccacctcgagccaactaatcacgcggtcatacagactctgatgaacagcatggatcctgagagtactcctccgacttgctgtgttccaactaggttgtccccaatctccatcctctttatcgattctgccaacaacgtagtctacaagcagtatgaagacatggtggtcgagtcatgcgggtgtaga

SEQ ID NO: 250368 - DNA, 1503 bp, synthetic construct
  misc_feature 1..1503: note = Description of Artificial Sequence: Synthetic coding sequence
  source 1..1503: mol_type = other DNA
atgagactacccaaactcctgaccttcttgctatggtatctcgcgtggctggatctggagttcatctgcacagtcctgggcgcccccgaccttggacagcgtcctcaggggacacgcccaggcctggccaaggctgaagccaaagaaagacctccactggcaagaaatgtgtttcgtccagggggacattcctatggggggggggctacaaacgcaaatgccagagccaaaggaggtacggggcagacgggcgggctgactcaacctaaaaaagatgagcccaaaaaactgcctcctcgccctgggggacccgaacctaaacctggacacccgccacagacgcgccaggcaaccgccagaaccgtgacccctaaaggacaactacccggcggtaaggcccctcctaaagcagggtccgtgccttcctctttcctgttgaaaaaagcgcgcgaacctgggcctcccagagaacccaaggagccattccggccacctcccattaccccgcacgaatatatgctgtctctataccgaacgctgagcgatgcggaccgaaaaggcgggaattcctccgtgaagctcgaagccggattggccaataccattacatccttcattgacaaaggtcaggatgataggggccccgtcgtacggaagcagcgctatgttttcgacattagcgctctggaaaaagatgggctcctcggcgccgagctccggatcctgaggaaaaagccaagtgacacagcgaagccagccgctcccggaggcggacgggccgcccagctgaaactgtcatcctgcccgagcggacgtcaacctgcctcactgctggatgtgcgctccgtacctggcttagatgggagcgggtgggaggtgttcgatatctggaagctatttcggaactttaagaacagtgcgcagctgtgcctggagctggaggcctgggaaagagggcgggcagttgacctcagggggctaggttttgaccgggcggctaggcaagtacacgaaaaagctctgttcctcgtcttcggccggaccaagaagcgtgatcttttttttaatgagattaaggcccggtctgggcaggacgataagaccgtttatgaatacctcttttctcaacgccgaaaaaggagggccccattggcaactcggcaggggaaacggccctcgaaaaatctcaaggcacggtgttcccggaaagccctgcacgtaaacttcaaagatatgggatgggacgactggatcatcgccccactcgagtatgaagccttccactgcgagggattgtgtgaatttcctcttcgaagccacttggaacccaccaaccacgctgtcattcagacgttgatgaacagtatggatcccgagtctacaccccctacgtgctgtgtgcccactagactctccccgatttccattttgtttattgacagtgcgaataacgtcgtctataagcagtatgaggacatggtggtcgagtcatgcggatgtcga

SEQ ID NO: 250369 - DNA, 1503 bp, synthetic construct
  misc_feature 1..1503: note = Description of Artificial Sequence: Synthetic coding sequence
  source 1..1503: mol_type = other DNA
atgcgactgcccaaacttctaactttcttgctgtggtatttggcatggctcgatctcgagtttatttgcaccgtactgggtgcaccagatttaggtcaacgtccacagggaactcgcccagggttggctaaggcagaggctaaagaaagaccaccattggctagaaatgtttttcgaccaggaggccattcgtacggcggaggtgcaaccaatgctaatgcaagggccaaaggaggaactggacagactggaggcttgacacaaccaaaaaaagatgaacctaagaagttgcccccacgacccggaggaccggaaccaaaacctggacatccaccgcagacaagacaggccactgcaagaacagttacaccgaagggtcaattaccaggaggcaaggctccaccaaaggcgggctctgtcccatcaagcttcttgcttaaaaaagctcgggagccaggcccgccgagagaaccaaaagaaccttttcgaccgccaccaattacaccacatgagtatatgctctcattatatcgaactctgtcagatgctgatagaaaaggtggtaactctagtgttaaactcgaagcgggtcttgctaatacaataactagtttcatcgataaaggtcaggacgatcgaggaccagttgttcgtaagcaacgttatgttttcgatatctctgccttggagaaagatggactcttgggagccgagcttaggattcttagaaaaaagccttcagacaccgctaaaccggccgctcccggtggaggtcgagcagctcaactcaaactttcaagttgcccatcaggtagacaacctgcctcgcttctcgatgtccgctcagtgccaggattggatggctcgggttgggaagtttttgatatttggaagctcttccgaaactttaagaattccgctcagctatgtctggagctggaagcttgggaacggggccgtgctgtggacctgagagggcttggattcgatcgggctgctcgtcaagtgcatgaaaaagctctttttctcgtgttcggacgtactaagaaacgtgatctgttcttcaatgaaatcaaggcacggtcaggacaggatgacaagacagtatatgaatacctcttttcgcaacgtcgtaagcgtagagctccattggctacacgtcaaggaaaacgcccaagtaagaatttgaaggcgagatgttctagaaaggctcttcacgtaaattttaaagatatgggatgggacgattggattattgctcccctagagtacgaggcattccactgcgaaggactttgcgaattcccattgagatcccatttggaacctactaatcacgctgtgattcagacactcatgaatagcatggaccctgaaagtaccccaccgacttgttgtgtaccaacacgtctttctccaatctcaattttattcatcgattccgcaaataacgtcgtgtataaacagtatgaggacatggtggtcgaaagttgcggatgtagg

SEQ ID NO: 250370 - DNA, 1503 bp, synthetic construct
  misc_feature 1..1503: note = Description of Artificial Sequence: Synthetic coding sequence
  source 1..1503: mol_type = other DNA
atgcgactgccaaagctgctgacctttctcctgtggtacctggcctggctggacctggagttcatctgtactgttctcggggctccggacctgggacagcggccgcagggaaccagacccgggctcgccaaagcagaagcgaaagagaggcccccgctcgcgcggaacgtttttaggcccggaggacactcgtacggcggcggtgccaccaacgctaacgcccgcgctaagggtggaactgggcagactggtggccttacccagcctaagaaggacgagccgaagaaactgccgcctcgccccggaggcccggagccgaagccaggtcacccccctcaaactaggcaagctactgctcgaaccgtcaccccaaaaggacagttgcctggcggtaaggccccgccgaaggcaggctcggtcccatcgtcgtttttgcttaagaaagcccgagaaccgggaccgccgcgggaacccaaggaaccgttcagaccgcccccgattacccctcacgagtacatgctgtcgctgtatcgcaccctctcagacgcggatagaaagggtggtaattcgtctgtaaagctggaagccggactcgcgaacaccatcacctccttcatcgacaagggccaggatgataggggaccagtggtgagaaagcaacgatacgtgtttgacatctccgcgctggaaaaagacggactgctgggcgccgagctcaggatcctgcggaaaaagccaagcgataccgcgaaaccggcagcgccgggcgggggaagagccgcccagctgaaattgtcgtcatgtccttcgggacggcagcctgcgtcgttgctcgatgtccggtcggtccctggtctggacggatccgggtgggaagttttcgacatctggaaactctttcggaatttcaagaattcagcccagctttgtctggaactggaagcatgggaacgcggcagagccgtggatctgcgcggcctcgggtttgatcgggccgcccggcaggtgcatgaaaaggccctgttccttgtgttcggccgcactaaaaagcgggacctgttcttcaatgaaatcaaggcccgtagtggacaggatgacaaaaccgtgtacgagtacctgtttagccaaaggcggaagcgccgggctccgcttgccactcgccagggcaagcgcccgtccaagaatctgaaggcgagatgctcccgcaaagcactgcacgtcaactttaaagacatgggttgggatgattggattatcgccccgcttgagtacgaagccttccactgcgagggcctgtgcgaattcccactgcgctcgcatctggagccgactaatcacgccgtgatccagaccctcatgaactcaatggaccccgagagcacccctccgacctgctgcgtcccgacgcggttgtcgccgatttccattttgttcatcgactcggccaacaacgtggtgtacaaacaatatgaggatatggtggtggaaagctgcggctgtagg

SEQ ID NO: 250371 - DNA, 1503 bp, synthetic construct
  misc_feature 1..1503: note = Description of Artificial Sequence: Synthetic coding sequence
  source 1..1503: mol_type = other DNA
atgaggttgcccaaactgctgacatttttgctttggtacctggcgtggctcgacttagagttcatatgcactgttcttggcgcccccgatctgggccaaagaccccagggtacccgtcccggactggcgaaagccgaagcaaaagaacggcctcctctggccaggaatgtctttagacctggggggcacagttacggaggtggtgccactaacgctaacgcaagagcaaaaggcggaactggacaaacgggagggctgactcaacccaaaaaggacgagcctaagaagctgcctcctcggcctggaggtcccgagcctaagcctggccacccacctcagacgcgacaggccaccgctaggacagtgactccaaaagggcagctccccgggggaaaagctccacctaaggcaggcagcgtgccgagtagctttttgcttaagaaagccagagaacctggaccaccgagggagccgaaggaaccctttcggccacctccaatcaccccccacgaatacatgttgagtctttaccgcacactctctgacgccgacagaaaaggcggcaacagcagcgttaagctggaggctgggctggcaaacactatcactagtttcatcgataaggggcaggacgatagaggtcctgtcgtgaggaagcagcggtatgtttttgacataagtgctctagagaaagatggcctgttgggcgcggaacttaggattctccgcaagaagcctagcgatacagctaaaccagcagcacccggcggggggagggcagctcagctgaagctgtcatcgtgtcccagtggccggcaaccagcatccttgctcgatgttagaagcgtgcccggactcgacggttcaggatgggaggtgttcgacatatggaagctgttcagaaattttaagaactcagcacaactgtgtctggagctcgaagcctgggagcgcggaagggcagtcgatttgcgcggacttgggtttgatagagccgccaggcaggtccacgagaaggctttgttcctggtttttggacgcacgaagaagagagatttgttttttaacgagatcaaagcacgcagcggccaagacgacaagacagtgtatgagtacctcttctctcagcgcaggaagaggagggcccctttggctacacgccaggggaaacggccatcaaaaaatctgaaagcacggtgctctaggaaggcactgcacgtgaatttcaaagatatgggatgggatgattggattattgcacccctggaatacgaagcgttccattgtgaaggcttgtgtgaatttcctcttagaagccaccttgagccaacaaaccatgcagtcattcagaccctgatgaacagcatggaccccgaaagcacaccaccaacctgctgtgttcctaccaggctcagtcccattagcatcctgttcattgattctgctaacaacgtcgtatataagcagtacgaggatatggtggtcgaaagttgcggatgcagg

SEQ ID NO: 250372 - DNA, 1503 bp, synthetic construct
  misc_feature 1..1503: note = Description of Artificial Sequence: Synthetic coding sequence
  source 1..1503: mol_type = other DNA
atgaggttgcctaagctgctcactttcctcctgtggtacctggcatggttggacctggagttcatttgcaccgttcttggagctcccgatctcggacaaagaccgcaaggaactcgtccgggcctcgccaaggctgaagcgaaggaaagacctccactggctcgcaacgtctttcgccccggcgggcactcctacggtggaggagccacgaacgcaaatgctagggcaaagggcgggactggacagactggcggtcttacccagcccaagaaggatgagcctaagaagttgcctcctagacctggtggtccagaaccaaagcctggccatccaccacaaacccggcaagcaactgcacggactgtcaccccaaaaggtcagctccctggtgggaaagccccgccaaaggccggatcggtcccttcatcctttctgctgaagaaagccagagaaccaggtccacctcgtgagcccaaagaaccttttagaccaccccccattaccccgcatgaatacatgctttcgctctaccgtaccctttcggatgctgatcgcaagggcggaaattcatcagtgaagttggaggcagggcttgcaaacactattacctcctttatagataaaggccaagacgatcgaggaccagtagtccggaagcaaagatacgtattcgatatttctgcgcttgaaaaagatggcctgctgggtgccgaactgcgaattctgcgcaagaagccatccgacacggcgaagcctgccgcacccggaggcggaagagcggcccaattgaagttgtctagctgccctagcggtaggcagcccgcctctctccttgatgtgcgcagtgtgcccgggcttgatggaagcggctgggaggtgtttgacatctggaagctgttccgtaactttaagaactccgcacaactttgtctggaactcgaggcatgggaacgcggtcgcgcagtggacctcaggggactcgggttcgaccgtgcagcaagacaagtgcatgaaaaggcactttttcttgtctttggtcggactaaaaagagagatcttttctttaatgaaatcaaagcgcggtcaggacaggatgataagaccgtgtacgagtacctgtttagtcagcgtagaaagcggagggcaccacttgcgactcgtcaggggaaacgaccctccaaaaaccttaaggccagatgcagcaggaaagcgctgcacgtgaatttcaaggacatgggatgggatgactggattattgcacctttggaatatgaagcattccactgtgaaggattgtgtgagtttccattgaggtcccatttggagcctacgaatcatgcagtgatacaaaccctcatgaactcgatggaccctgaaagcacccctcctacctgttgtgtgccaaccaggctctcgccgatctcgatcctgtttatcgactccgcgaacaacgtggtgtacaaacagtacgaggatatggtcgtggaatcgtgcggatgtcgg

SEQ ID NO: 250373 - DNA, 1503 bp, synthetic construct
  misc_feature 1..1503: note = Description of Artificial Sequence: Synthetic coding sequence
  source 1..1503: mol_type = other DNA
atgcgactgcccaaactgctcaccttcctgctttggtacctggcatggctggaccttgaattcatctgcactgtgttgggagcgccggacctcggacagcggccacagggtacccggcccggacttgcgaaggcagaggcaaaagaaaggccaccactggctcggaatgttttccggccgggaggacactcctacggaggcggagccaccaatgcaaatgcgagagccaagggaggaaccgggcagaccggaggtcttactcagccgaaaaaggatgaaccgaaaaaactgccgccgcgtccaggcggacctgagccgaaaccaggacatccaccgcaaacccggcaggctaccgccaggaccgtgactcctaagggacaactgccgggtggaaaggctccccctaaagccggctccgtcccttcctcctttcttctgaagaaggcgcgggaaccgggcccccctcgggagccgaaggaaccattccggcctccgccaatcactccgcacgaatacatgctgtcactctaccgtacgctgtcggacgcagatagaaaggggggcaattcatccgtcaagctcgaagccggcctcgccaacactatcacttccttcattgacaaggggcaggacgatcgaggcccggtggttcggaagcagcggtacgttttcgacatctcggctctcgagaaggacggactcctgggcgcagagctccgaattctcaggaagaagccttcggataccgcaaagcctgccgccccggggggcgggcgtgcggctcagctgaaactctcctcgtgtccatcgggtagacagcccgcgtcattgcttgatgtgcggtctgtgccgggcctggacgggtcgggatgggaggtgttcgatatctggaaactgttccgcaacttcaagaattcggctcaactctgcttggaattggaagcgtgggagcgaggtcgcgccgtggatctgagaggactcggctttgatcgcgccgctcggcaagtccacgaaaaagccctttttcttgtgttcggacgcacgaagaagcgcgatctctttttcaacgagattaaggcacgttccggccaagatgacaaaactgtgtatgagtacctgttttcccaaagaagaaagcgccgggcgcccctggcaactcgccagggcaagcggccctcgaaaaacttgaaggccagatgtagcagaaaggctctgcacgtgaatttcaaagatatgggatgggacgactggatcatcgccccgttggaatacgaggcctttcattgcgaaggactgtgtgaattccccctgcgctcccacctcgaaccgactaaccatgccgtaatccagaccctgatgaacagcatggatcccgaatcgactcctccaacgtgctgcgtcccgacccgcctgtcgccaatctcaatccttttcatcgactctgccaacaacgtggtgtacaagcaatacgaggacatggtcgtggagtcatgcggatgcagg

SEQ ID NO: 250374 - DNA, 1503 bp, synthetic construct
  misc_feature 1..1503: note = Description of Artificial Sequence: Synthetic coding sequence
  source 1..1503: mol_type = other DNA
atgcggttgcccaagctgctcacgttcctgctgtggtacttggcttggcttgacctcgaattcatctgcactgttctgggagctccggacctgggacaaagaccacagggaacgcgccccggcctggcaaaggccgaagccaaagaaagaccgccactggcccgcaatgttttcaggcccgggggacactcatacggtggcggagccaccaacgcgaacgccagggcgaagggaggaaccggacagaccggaggcttgacccaaccgaagaaagacgaaccaaagaagctgccaccgcggccgggagggcccgaaccaaaaccaggacatcccccacagacccgccaagccaccgcacgcacggtcaccccaaaaggacaactgccgggcggcaaggcaccgccaaaggcgggaagcgtcccgtcgtcattcctgctgaaaaaggcccgcgaaccaggcccacctcgcgagccgaaggaaccgttccggcctcctccgatcaccccccatgagtacatgctgtcgctctacagaacgctctcggacgctgaccgaaaaggagggaacagctcggtgaaactcgaggccggccttgcgaacacgatcacctcgtttatcgataagggtcaggacgatcgcggcccagtggtccggaagcagagatacgtgttcgacatctccgccctcgagaaggatgggcttcttggagctgagctgcgtattctgcggaagaagccatcggatactgcaaagcccgccgcgcctggaggtggacgggcagcgcaactgaaactgtcctcctgcccatccggacgccagcctgcctcactgctcgacgtgcgcagcgtccctggcctggacggcagcggctgggaggtctttgacatctggaagctgttccgcaatttcaagaattcggcgcagctttgcctcgagctggaggcatgggaacggggaagggccgtggacctgcgcggcctcggattcgaccgagccgctcggcaggtgcacgagaaggccctgtttctggttttcggacgcactaaaaagcgggatcttttcttcaatgaaatcaaggctaggtcgggtcaagatgacaagaccgtttatgaatacctgttttcgcagcggcgcaagcgccgcgcgcccctggccaccagacaagggaagcggccttccaagaacctgaaagcccgttgtagcagaaaagcactgcacgtgaacttcaaagatatggggtgggatgactggataattgcgccgctggagtacgaagcatttcactgcgaaggcctgtgcgaattcccgcttcggagccatcttgagccgaccaatcacgccgttattcagactctgatgaactccatggatccggaaagcactcccccaacttgttgtgtgcccactcggctgtcgccgatcagcatcctgtttatcgacagcgccaacaacgttgtgtacaagcagtacgaggatatggtggtggaatcctgcggatgccgc

SEQ ID NO: 250375 - DNA, 441 bp, synthetic construct
  misc_feature 1..441: note = Description of Artificial Sequence: Synthetic coding sequence
  source 1..441: mol_type = other DNA
atggtccatctgactccggaagagaaatcagcggttaccgccctttggggaaaggtcaacgtggatgaagtcggaggcgaagccctgggtcgcctgctggtcgtgtacccatggactcaacggttcttcgaatcgttcggtgacctctccaccccagacgccgtcatgggtaacccgaaggtgaaggcccacggaaagaaggtgctgggggcgttttccgatggactggcgcatttggacaatctcaagggaactttcgccaccctgtccgagctgcactgcgataagctccacgtcgatccggagaactttcgcctgctcggaaacgtgcttgtgtgtgtgttggcccaccattttggaaaggagttcactccgcctgtccaagctgcctatcagaaggttgtggctggagtcgcgaatgccctggcccacaagtaccac

SEQ ID NO: 250376 - DNA, 441 bp, synthetic construct
  misc_feature 1..441: note = Description of Artificial Sequence: Synthetic coding sequence
  source 1..441: mol_type = other DNA
atggtgcacctgacccccgaagaaaagagcgccgtgaccgcgctttggggtaaagtgaatgtcgacgaagttggaggtgaagcgttggggcggctgctcgtggtgtatccctggactcagcgctttttcgagtctttcggagatctgtccacgccggatgctgtcatgggaaacccgaaggtcaaggctcatgggaagaaagtgctgggagcattctccgacggcctggcgcatctggacaatctgaagggcaccttcgccaccctttcggagttgcactgtgacaaattgcacgtggacccggaaaacttcaggctgcttggaaacgtgctcgtgtgcgtgcttgcacatcactttggaaaagagttcactccaccggtccaggcagcgtaccaaaaggtggtcgccggcgtcgccaacgcattggcacacaagtaccat

SEQ ID NO: 250377 - DNA, 441 bp, synthetic construct
  misc_feature 1..441: note = Description of Artificial Sequence: Synthetic coding sequence
  source 1..441: mol_type = other DNA
atggtgcatctgacccctgaggaaaaatcggcggttacggcgctgtggggaaaagtcaatgtggatgaggttggcggtgaagcactcggacgcctgcttgtcgtctacccgtggactcagcggtttttcgaatccttcggagatttgagcaccccggacgcggtgatgggaaaccccaaggtgaaggctcacgggaagaaggtgttgggagcattctcggacggcctggctcaccttgacaacctgaagggcacctttgccactttgtccgaattgcattgtgataagctccacgtcgacccggagaacttcagactcttggggaatgtgcttgtctgcgtgctggcacaccatttcggaaaagagttcactccacctgtgcaggccgcataccaaaaggtagtcgccggagtggcaaacgctcttgcccacaagtaccat

SEQ ID NO: 250378 - DNA, 441 bp, synthetic construct
  misc_feature 1..441: note = Description of Artificial Sequence: Synthetic coding sequence
  source 1..441: mol_type = other DNA
atggtgcacctgacgcctgaggaaaagtcagccgtgactgctctgtggggaaaggtgaatgtggatgaagtgggcggagaagcattgggccggctcctcgtggtctacccatggacccagaggttcttcgagtcatttggtgacctctcgaccccggacgccgtgatgggaaatccgaaagtgaaggcgcacggcaagaaagtgctgggcgccttctcagacggactcgcccatctcgataacctcaagggaacttttgcaaccctgagcgaactgcactgcgacaagctgcacgtggaccctgaaaacttccgcctgctcggtaacgtgctggtgtgcgtgctggcgcatcattttggaaaggaattcactccgccggtgcaggccgcataccaaaaagtcgtggcgggagtggccaatgccctggcacacaagtaccat

SEQ ID NO: 250379 - DNA, 441 bp, synthetic construct
  misc_feature 1..441: note = Description of Artificial Sequence: Synthetic coding sequence
  source 1..441: mol_type = other DNA
atggtgcatcttacccccgaagagaaatctgctgtcaccgcgctctggggtaaggtgaatgtcgacgaagtcggtggtgaggcacttggccgtttgcttgtcgtctacccgtggacacagcggttcttcgagagttttggggatctatctacacccgacgcagtcatggggaaccctaaggtcaaggcgcatggcaagaaagttttgggtgcattcagtgatggtctcgctcatttagataacctgaagggaaccttcgcaaccctgtcggaattacactgtgataaactgcacgttgaccctgaaaacttccgcctgctcggtaacgtcctcgtctgcgtcctggcacatcatttcggtaaagagtttacacctccagttcaggcggcatatcagaaggtagtggctggcgtggcaaacgccttggcacacaaatatcac

SEQ ID NO: 250380 - DNA, 441 bp, synthetic construct
  misc_feature 1..441: note = Description of Artificial Sequence: Synthetic coding sequence
  source 1..441: mol_type = other DNA
atggttcatctcacacctgaggagaagagtgccgtgacagctctctggggcaaggtgaatgttgatgaagtcggcggcgaggccttagggcgactgctggtggtgtacccctggacccagaggttcttcgaatcattcggggacctgagcaccccagatgccgtcatgggcaatcccaaagtaaaagctcatggcaaaaaagtgttaggggcattctctgatggcctcgcccacttggacaatctgaagggtacatttgccactctgtcagagctgcattgcgataagctacatgttgaccccgagaattttaggctgctcggcaatgtgctggtctgtgttttagctcaccactttggcaaggagtttaccccacccgtgcaggccgcctatcagaaagtggtggcaggtgtggccaatgctctcgcccataagtaccac

SEQ ID NO: 250381 - DNA, 441 bp, synthetic construct
  misc_feature 1..441: note = Description of Artificial Sequence: Synthetic coding sequence
  source 1..441: mol_type = other DNA
atggttcacctgaccccagaggaaaagagcgctgtgactgctctctggggcaaggtgaatgtggatgaggtcggtggggaggcccttggcaggctgctggtggtgtacccgtggactcaacgcttcttcgagtcttttggggacctctctacccccgatgccgttatggggaatccgaaagtgaaagcccacggcaagaaagtactaggcgccttctctgatggtttagcacacctggataacctgaagggcacatttgccacattgtcagagttgcactgtgataagctacacgttgatccagagaacttcaggctgctgggcaatgtcctcgtttgtgtactagctcatcattttggtaaagagtttaccccacccgttcaggcggcttaccagaaggtggtggctggcgtggccaatgcactagcacataaatatcac

SEQ ID NO: 250382 - DNA, 441 bp, synthetic construct
  misc_feature 1..441: note = Description of Artificial Sequence: Synthetic coding sequence
  source 1..441: mol_type = other DNA
atggtgcatctgaccccagaggagaagtccgcagtcactgcactttggggcaaggtgaatgtggatgaagtcggcggggaagcacttggacgactcctcgtggtgtacccttggacccaacgcttttttgaatcgtttggggacttgtccacccccgacgcggtaatggggaacccaaaggtgaaagcacacggcaagaaggtgcttggagcgttctcagatggactcgcacaccttgacaatctgaaggggacttttgccaccctctcagaacttcactgtgataagctgcatgtggatccggagaactttagactgctgggtaacgtgctggtgtgcgttcttgcgcaccatttcggtaaggagttcactcctccagtgcaggcagcctatcagaaggtggtcgcgggcgttgcaaacgcgctggcacacaaataccac

SEQ ID NO: 250383 - DNA, 441 bp, synthetic construct
  misc_feature 1..441: note = Description of Artificial Sequence: Synthetic coding sequence
  source 1..441: mol_type = other DNA
atggtccacctgactcccgaagaaaaatctgccgttaccgctctgtggggcaaggttaatgtagacgaggtagggggagaagcactggggagactactagtcgtgtatccctggactcagaggttctttgagtcctttggtgacctgtcaactccagacgccgttatgggaaatcctaaggtgaaggcacacgggaaaaaggttctcggcgctttttctgacgggttggcccacctggataatctcaagggcacttttgctacgctctcggagctccattgcgacaagctgcatgtggatccggaaaatttcagattgcttggcaatgtcctggtatgcgtgcttgcccaccacttcggcaaggagtttaccccaccagtgcaagctgcctaccaaaaggtcgtggcaggcgtggccaatgccctggcccataaatatcac

SEQ ID NO: 250384 - DNA, 441 bp, synthetic construct
  misc_feature 1..441: note = Description of Artificial Sequence: Synthetic coding sequence
  source 1..441: mol_type = other DNA
atggtccatttgaccccagaggagaagtccgctgttaccgcactctggggcaaggtgaacgtggacgaagttggaggagaagcgttgggaagactcttggtcgtatacccatggacgcagaggttctttgagtcgttcggggacctttcaactcctgatgcggtgatgggtaaccctaaagtgaaggctcacggcaagaaagtgctgggggccttctcggatggactggcgcatttggacaatctgaagggtaccttcgcaaccctgagcgaacttcattgcgataaacttcacgtagacccagaaaacttccgcctgctgggaaatgtcctcgtgtgtgttctcgcacaccacttcggcaaggagttcactccgccggtgcaagcggcctatcagaaagtggtcgccggggtggccaacgccctggcacataagtaccac

SEQ ID NO: 250385 - DNA, 441 bp, synthetic construct
  misc_feature 1..441: note = Description of Artificial Sequence: Synthetic coding sequence
  source 1..441: mol_type = other DNA
atggttcatctcacccccgaagaaaagtccgctgtgaccgctctgtggggcaaggttaacgtcgacgaggtcggaggagaagcccttggacggctgctggttgtctacccgtggactcagcgcttcttcgagagcttcggggacctgtccacgccagatgcagtgatgggaaatcccaaggtgaaagcgcacgggaagaaagtccttggcgctttctcagatggactcgcccaccttgataacctcaaaggaactttcgccaccctgagcgaactccactgcgacaagctccatgtggacccagagaacttcagactgttgggtaatgtccttgtgtgcgtgctggcgcaccattttggaaaggagttcacccctcctgtccaagctgcataccagaaggtggtcgctggtgtcgccaacgccctggcccacaaataccac

SEQ ID NO: 250386 - DNA, 441 bp, synthetic construct
  misc_feature 1..441: note = Description of Artificial Sequence: Synthetic coding sequence
  source 1..441: mol_type = other DNA
atggttcatctgacacctgaagaaaagtctgctgtgacagccttatgggggaaagtaaatgttgacgaggtcggaggagaagcactgggacggcttctggtagtctacccctggactcagagattttttgaatccttcggggacttatctacacctgacgccgtcatgggaaatcccaaagttaaagcacacggaaaaaaagtgctaggggctttctctgatgggctggcacacctggataatctcaaagggacattcgctacactatctgaattacactgcgataaacttcacgtcgatcccgagaatttcagattgctgggaaacgtgctcgtgtgtgtccttgcccaccacttcgggaaagaattcacacccccagtacaggccgcataccagaaagtggtcgcgggagtcgccaacgcattagcacataaatatcac

SEQ ID NO: 250387 - DNA, 441 bp, synthetic construct
  misc_feature 1..441: note = Description of Artificial Sequence: Synthetic coding sequence
  source 1..441: mol_type = other DNA
atggtgcacttaacaccagaagagaagtcggcagtgacagctctgtggggaaaggtaaatgtcgacgaggtgggcggcgaggctttaggacggctgcttgtggtgtatccctggactcagaggttttttgagtcctttggagacctgtcgacgccagatgcagtaatgggcaaccccaaggtgaaggctcatggcaagaaggtgctgggcgctttttctgacggcttagctcacttggacaatcttaaaggaacatttgctactctttccgagctgcattgtgataagctgcatgtagatccagaaaactttagactgctgggaaacgttctcgtctgcgttctggcccatcactttgggaaggagttcacaccgccggtccaggctgcctatcagaaggtggttgctggagtggctaatgcacttgcccacaaatatcat

SEQ ID NO: 250388 - DNA, 441 bp, synthetic construct
  misc_feature 1..441: note = Description of Artificial Sequence: Synthetic coding sequence
  source 1..441: mol_type = other DNA
atggtgcacttgacacctgaagagaagtccgccgtaacggccttgtgggggaaggtcaacgtggacgaagtgggcggcgaggctttaggccgtctgttggttgtctacccctggacacagagattcttcgagtcattcggcgatctgtcaacgcctgatgctgttatgggcaaccccaaagtaaaggcccacgggaaaaaagtactgggggccttctctgacggacttgcgcacctagataatctcaaagggacttttgcaacgctgtctgagcttcactgcgataaacttcatgtcgatcccgagaactttaggctgctcggcaatgtgttggtgtgcgttctggcccaccattttgggaaggaatttactccgcccgtgcaagcggcttaccagaaggtagtggcaggagtcgctaacgcgctggctcacaagtaccat

SEQ ID NO: 250389 - DNA, 441 bp, synthetic construct
  misc_feature 1..441: note = Description of Artificial Sequence: Synthetic coding sequence
  source 1..441: mol_type = other DNA
atggttcacttaacccctgaagaaaagtctgccgtaactgcgctctggggcaaagtgaacgtggatgaggtagggggtgaggctttaggacggctgctggtggtctacccgtggacgcagagattttttgaaagctttggcgatctgagtacaccagatgccgtgatggggaaccccaaggttaaggcccatggtaaaaaggtgcttggagctttttctgacggcctggcccatctggacaatttgaagggcacttttgccacactttcagagctgcactgtgataagctccatgtggatcccgagaacttccgcctgcttggaaacgtcctggtctgcgtactggcccaccacttcggtaaggaattcactcctcccgttcaggctgcataccagaaagtcgtcgctggagttgccaacgctctggcccataaataccac

SEQ ID NO: 250390 - DNA, 441 bp, synthetic construct
  misc_feature 1..441: note = Description of Artificial Sequence: Synthetic coding sequence
  source 1..441: mol_type = other DNA
atggtgcatctcacccccgaggagaagagcgctgtcaccgccctgtggggtaaagtgaatgtggacgaggtcggaggcgaggctcttggtcgtctcctggtggtatatccctggacacagcgtttcttcgaatcattcggagatctcagtaccccagatgccgtcatgggcaatcctaaggtgaaggcacatggtaagaaagtcctgggtgccttctccgacggcctggcccacttggacaacttgaagggcacatttgctacactgtctgaattgcactgcgacaagctgcacgtggatcctgaaaattttagactgctcggcaacgtactggtttgcgtccttgcccatcattttggtaaggaattcacccctcccgttcaggctgcataccagaaagttgtcgcaggcgtcgcaaacgccctggctcacaagtaccac

SEQ ID NO: 250391 - DNA, 441 bp, synthetic construct
  misc_feature 1..441: note = Description of Artificial Sequence: Synthetic coding sequence
  source 1..441: mol_type = other DNA
atggtacatctgaccccggaggaaaaatctgccgttacagctttgtgggggaaggtgaacgttgacgaagtcggaggtgaagcattgggcaggctcctcgtggtctatccatggacacagcgtttcttcgagtcttttggggacctgagcacccccgacgccgtgatgggaaatcccaaggtgaaggcgcacggcaagaaggttctgggggctttttcagacgggctagcccacctcgataatctaaaaggcacgttcgcaactctatccgaattgcactgcgacaaactgcacgtagaccctgagaacttccgactgctgggcaacgtcctggtgtgtgtgctggctcatcatttcggtaaggagttcacccccccggttcaggctgcctatcagaaagttgtcgctggcgtcgccaatgccctcgcccataaataccat

SEQ ID NO: 250392 - DNA, 441 bp, synthetic construct
  misc_feature 1..441: note = Description of Artificial Sequence: Synthetic coding sequence
  source 1..441: mol_type = other DNA
atggtgcatcttactccggaggagaagtcagctgtgactgcactctggggaaaggtcaacgtggacgaagtgggaggagaagcactcgggcgcctgctggtggtttacccttggacccaacgcttcttcgaatcgttcggtgacctctcgacccctgacgcagtgatgggtaacccgaaggtcaaggcccacgggaaaaaggtcctcggcgccttttcggatggcctcgcccatctcgacaacctcaaaggaactttcgctaccttgtctgaactgcactgcgacaaacttcacgtcgaccccgagaacttcagactgcttggtaatgtgctggtgtgtgtgctcgctcaccacttcggcaaggagttcaccccgccggtgcaggcagcataccagaaagtggtggccggggtggccaacgccctggcgcacaagtaccac

SEQ ID NO: 250393 - DNA, 441 bp, synthetic construct
  misc_feature 1..441: note = Description of Artificial Sequence: Synthetic coding sequence
  source 1..441: mol_type = other DNA
atggtgcacctgacccctgaggaaaagagcgcggttaccgcactgtggggaaaggtcaacgtggacgaagtggggggtgaagccctgggccgcctcctggtggtgtatccctggacacagcgattttttgagagttttggtgacctcagcacacccgatgcagtgatggggaatccaaaagtaaaagcacacggtaagaaggttctgggggcttttagtgacggactagcccatttggataatctaaagggaacgtttgctactctctcagagttacattgtgacaaactccatgtcgatccggagaatttccgattgctgggaaacgtgctagtatgtgtcctcgctcaccacttcgggaaagagtttacccctcctgtgcaagcagcataccagaaagttgtggccggggtcgcgaacgccctggctcacaagtaccat

SEQ ID NO: 250394 - DNA, 441 bp, synthetic construct
  misc_feature 1..441: note = Description of Artificial Sequence: Synthetic coding sequence
  source 1..441: mol_type = other DNA
atggtgcacctgactccggaagagaaaagcgccgtgaccgcactgtggggtaaggtgaacgtggacgaggtgggaggagaggcactgggacggttgctggtggtctacccgtggacgcagcggttcttcgagtccttcggcgatctctcaactccggatgccgtgatgggtaacccgaaggtgaaagcccacggaaagaaggtcctgggagctttttctgatggcctggcgcatctcgacaacctcaagggaactttcgcaaccctttcggaactccactgcgataagctccacgtggatcctgagaactttaggctgctggggaatgtgctcgtgtgcgtcctcgcccatcacttcggcaaggagttcaccccgccggtgcaggctgcataccagaaggtggtcgctggggtggccaatgccctggcgcacaaataccac

SEQ ID NO: 250395 - DNA, 441 bp, synthetic construct
  misc_feature 1..441: note = Description of Artificial Sequence: Synthetic coding sequence
  source 1..441: mol_type = other DNA
atggtccatttgacaccggaagagaaatcagctgtcacggcgctgtgggggaaggttaatgtggatgaagtggggggggaggctctgggcagactcttggttgtctatccgtggactcagcgattcttcgagtcttttggtgatttatcgactccggatgcagtgatgggaaatccaaaagtcaaagcccacggtaagaaagtgctgggggcattcagtgacggcctggcccatctcgacaatcttaagggcactttcgcaacactgtccgagctacactgtgacaaactgcacgtggatccagaaaacttcaggctcctgggtaatgtgctcgtgtgtgtgctagctcaccattttggaaaggaattcacgccccccgtgcaagctgcttaccagaaagtggtagccggagtcgccaacgccctcgctcataagtaccac

SEQ ID NO: 250396 - DNA, 441 bp, synthetic construct
  misc_feature 1..441: note = Description of Artificial Sequence: Synthetic coding sequence
  source 1..441: mol_type = other DNA
atggtgcacttgactccagaagagaagtccgctgttaccgctttgtggggaaaagtcaacgttgacgaggttggcggcgaggcgctgggccgtctgctggtcgtctacccctggacccagcgcttcttcgagtcctttggtgacctatccactcctgatgccgttatgggcaaccccaaggtcaaggcccacggtaagaaggtcctgggtgccttctccgatggactggcacacctggacaacctgaagggcacgtttgctaccctctcggagctccactgcgataaattgcacgtggaccctgagaacttccggctcctaggtaacgtcctcgtctgtgtgctggcgcaccacttcggtaaggagttcacgccgcccgtgcaggccgcttaccaaaaggtcgtggccggggtggccaacgcgctggcccacaagtaccac

SEQ ID NO: 250397 - DNA, 441 bp, synthetic construct
  misc_feature 1..441: note = Description of Artificial Sequence: Synthetic coding sequence
  source 1..441: mol_type = other DNA
atggtacatctgaccccagaagagaagagcgcagtgacagctctgtggggaaaggtcaacgtcgacgaggtgggtggcgaagctctgggacgtctgcttgtcgtctacccctggacccaacggttctttgaaagtttcggcgatttgtccactcccgacgctgttatgggaaaccccaaggttaaagctcatggcaagaaggtgctgggcgccttcagcgacgggctcgcccacttagacaatctgaaaggaactttcgccactctgagtgaacttcattgtgataaacttcatgtggatcctgaaaattttaggcttttaggcaacgttcttgtgtgtgtgctcgcacaccatttcggaaaggaattcaccccgcctgtgcaagcagcatatcagaaggttgtagctggtgtggcaaatgctctggcgcacaagtatcac

SEQ ID NO: 250398 - DNA, 441 bp, synthetic construct
  misc_feature 1..441: note = Description of Artificial Sequence: Synthetic coding sequence
  source 1..441: mol_type = other DNA
atggtgcatttgacacctgaggaaaaaagcgcagtcacagcattgtggggaaaagtgaacgttgatgaagtaggcggcgaagcattgggaagacttctagttgtatatccgtggacacaacgattctttgaatctttcggggatctttcaaccccggatgcggtcatgggcaatccgaaagtcaaagcccatgggaagaaggttctgggagcttttagcgacggtctggcgcatttggataacttgaagggcacgtttgccacattgtccgaattgcactgcgacaaattgcatgtcgatcccgagaatttccgtttattaggaaatgtccttgtgtgcgttttggctcatcattttggcaaagagttcacgcctccagtgcaggctgcttaccaaaaagttgttgctggagtagctaatgctctagcgcataaataccat

SEQ ID NO: 250399 - DNA, 441 bp, synthetic construct
  misc_feature 1..441: note = Description of Artificial Sequence: Synthetic coding sequence
  source 1..441: mol_type = other DNA
atggtgcatttgacacccgaagagaagagcgctgtaacagcattgtggggcaaagtaaacgttgacgaggtcggcggggaggccctgggaagactcctcgtggtgtatccttggacccagcgcttttttgagtcgttcggtgacctttctacaccagacgccgttatggggaaccccaaggtgaaagctcacggcaagaaagtgctaggtgcattttctgacgggctggcacaccttgacaacctgaagggaacctttgcgaccctgtcggagcttcattgtgacaaactgcatgtcgatccggaaaatttccgcttgctgggcaatgtgcttgtctgcgtgctggcacatcatttcggaaaggaatttacgccaccagtacaggcggcgtatcagaaggtcgtcgccggtgtggcaaacgcccttgcacataaatatcac

SEQ ID NO: 250400 - DNA, 441 bp, synthetic construct
  misc_feature 1..441: note = Description of Artificial Sequence: Synthetic coding sequence
  source 1..441: mol_type = other DNA
atggtacacttgactcctgaggaaaaatcagccgtgaccgctctctgggggaaggtgaacgtggacgaggtgggcggagaggctcttggtaggctcctcgtcgtgtatccttggacacaacgcttctttgagagtttcggcgatctctctacccccgacgctgtgatgggcaaccccaaggttaaagcccacggaaagaaagtgcttggggccttctctgacggcctggcacacctggataatcttaaggggacttttgccactctgtccgagctgcactgtgacaagctgcatgttgatcccgagaatttcagattgctgggtaatgtgctggtgtgcgtgctggcccaccatttcggcaaggagttcacccctccagtgcaggcagcatatcagaaagtggtagccggtgtggcaaacgcgctggcccacaagtatcac

SEQ ID NO: 250401 - DNA, 441 bp, synthetic construct
  misc_feature 1..441: note = Description of Artificial Sequence: Synthetic coding sequence
  source 1..441: mol_type = other DNA
atggtgcaccttacccccgaggaaaagtccgccgtgaccgcactgtggggtaaggtgaacgtggatgaagtgggtggcgaggccctgggtaggctgctggtggtctacccttggacgcagagatttttcgaatcctttggagatctcagcacccctgatgcagtgatgggaaaccccaaggtgaaagcacatgggaaaaaggtgttgggagccttctcggacgggcttgcacatcttgataacctgaagggtacctttgccacccttagcgaactgcactgtgataagttgcatgtggatccggagaattttcggcttctgggcaacgtgctggtgtgtgtgctggctcaccattttggtaaggagtttaccccgccagtccaggcggcctaccagaaagtcgtcgctggggtggcaaacgccctcgcacacaagtaccac

SEQ ID NO: 250402 - DNA, 441 bp, synthetic construct
  misc_feature 1..441: note = Description of Artificial Sequence: Synthetic coding sequence
  source 1..441: mol_type = other DNA
atggtgcacctcactcctgaggaaaagtccgcggtgaccgcgctgtggggtaaggtgaatgtggatgaggtgggaggcgaagccctgggtcggctgctggtcgtgtacccctggacccaacgcttcttcgaatctttcggggacctgtccaccccggatgctgtcatgggaaaccctaaggtgaaagcacacggcaaaaaggtgctcggagctttttcggacgggctcgcccatcttgacaatcttaagggcaccttcgctacgctgtcggaactgcattgcgataaactgcatgttgacccggagaactttaggctgctcggcaacgtgctcgtgtgtgtgttggcccaccactttggaaaggagttcaccccgcctgtgcaggccgcataccaaaaagtcgtggctggagtggccaacgccctggcccataagtatcat

SEQ ID NO: 250403 - DNA, 441 bp, synthetic construct
  misc_feature 1..441: note = Description of Artificial Sequence: Synthetic coding sequence
  source 1..441: mol_type = other DNA
atggttcacctgacccccgaggaaaaatccgcagtcacggccttatggggaaaggtaaacgtagatgaagtgggaggtgaggcattgggtagactactggtggtttacccatggacccagcgctttttcgagtccttcggggacctgtcgacccctgacgccgtgatgggtaatcccaaggtcaaggcccatgggaagaaagtgcttggggctttctcagacggattagcccatctcgataatctaaagggtacatttgctaccctttctgagttgcactgtgacaaattgcacgtggaccccgagaatttccggctgcttggaaatgtcctcgtgtgcgttctggcccaccattttggcaaggagtttacgccacctgttcaagctgcgtaccagaaagtggtggccggcgtcgcaaacgcactcgcacataagtaccac

SEQ ID NO: 250404 - DNA, 441 bp, synthetic construct
  misc_feature 1..441: note = Description of Artificial Sequence: Synthetic coding sequence
  source 1..441: mol_type = other DNA
atggtccatcttacccctgaagaaaagtccgcggtcacggctctgtgggggaaggtgaacgtggatgaagtcggaggagaagcactgggccgccttctggtggtctacccgtggacgcaacgcttttttgagagctttggagacttgtcaacccccgacgcggtcatgggcaaccctaaagtgaaagcccatggtaaaaaggtgctcggagcattctcggacgggcttgcacacctggacaatctgaaaggaaccttcgcaaccctcagcgaactgcactgcgacaagctgcacgtcgatcctgaaaactttcgacttctcggtaacgtgctggtgtgcgtgctggcacatcatttcggaaaagagtttactccaccggtgcaggcagcatatcaaaaagtcgtggcaggtgtggccaatgcactcgcacataagtaccat

SEQ ID NO: 250405 - DNA, 441 bp, synthetic construct
  misc_feature 1..441: note = Description of Artificial Sequence: Synthetic coding sequence
  source 1..441: mol_type = other DNA
atggtgcatctgactcctgaggagaaatccgcggtgacggcgctgtggggtaaggtgaacgtggatgaggttggcggtgaagccctggggcgcctccttgtcgtgtatccttggacccagcgcttcttcgagtctttcggggatcttagtacgccagacgcagtgatggggaatcctaaagttaaagctcatgggaaaaaagtactgggtgccttcagcgatgggttggcgcatctcgacaacctgaagggaacattcgctaccttatccgaattgcactgtgacaaactgcatgtggacccagagaattttcgtctcctgggtaatgtcctggtgtgtgtgttggcccatcactttggaaaggaattcaccccgccagttcaagctgcataccagaaggtcgtagctggagtagccaacgcattggcgcataagtatcac

SEQ ID NO: 250406 - DNA, 441 bp, synthetic construct
  misc_feature 1..441: note = Description of Artificial Sequence: Synthetic coding sequence
  source 1..441: mol_type = other DNA
atggtccacctgacgccagaggagaagtctgccgttaccgcgctgtggggcaaggttaatgttgacgaagtcggaggcgaagcgctcgggcggctgctggttgtgtatccttggactcaacgctttttcgagtcattcggggatctgtccacaccggatgcggtcatgggtaacccaaaggtcaaagcccacggtaagaaggttctgggcgccttcagcgacggcctagctcacctggacaacctaaagggaactttcgcaacactgtcagagctgcactgcgacaaactgcacgtcgatccggaaaacttccggctcctgggtaacgtcctggtctgtgtgcttgcgcaccattttggaaaggagtttactccaccagtgcaagctgcctatcagaaagtggtggctggggtggctaatgcgttggctcacaagtaccat

SEQ ID NO: 250407 - DNA, 441 bp, synthetic construct
  misc_feature 1..441: note = Description of Artificial Sequence: Synthetic coding sequence
  source 1..441: mol_type = other DNA
atggtacatctaacaccggaggagaagtctgcggtcacagctctgtgggggaaagtgaatgtggatgaagttgggggggaagccctggggaggctgctggtggtgtacccatggacacagaggttcttcgaatcctttggtgacctgtccacccctgatgcggtgatggggaatccaaaggtgaaggcccatgggaagaaagtgctcggtgccttcagcgacggactagcacatcttgataatctgaagggaaccttcgctacactaagtgagcttcactgtgataagctccacgtcgaccccgaaaacttccggctcctcggaaacgtattggtatgtgtacttgctcaccatttcggaaaggaattcactccacccgtgcaggctgcctaccagaaggtggtcgccggagtggctaacgcccttgcgcacaaatatcat

SEQ ID NO: 250408 - DNA, 441 bp, synthetic construct
  misc_feature 1..441: note = Description of Artificial Sequence: Synthetic coding sequence
  source 1..441: mol_type = other DNA
atggtgcacctgacccccgaggagaagtcagctgtgacggcgctgtggggtaaggtgaatgtcgacgaagtgggcggcgaagcactcggacggttgctcgtggtgtacccttggacccagagattcttcgagtccttcggtgacctcagcaccccagacgcggtgatgggaaatcctaaagtgaaggcccacgggaaaaaggttctcggcgccttttcagacggcctggcacacctcgacaaccttaaaggcactttcgcgaccctgtcggagctgcattgcgataaactgcacgttgacccagagaactttcgcttgctggggaacgttctcgtgtgtgttctcgcccatcacttcggaaaggagttcacgccacctgtccaggcggcctaccaaaaggtcgtcgccggcgtcgctaatgcactggcccataagtaccat

SEQ ID NO: 250409 - DNA, 441 bp, synthetic construct
  misc_feature 1..441: note = Description of Artificial Sequence: Synthetic coding sequence
  source 1..441: mol_type = other DNA
atggttcacttgactcccgaagaaaagtccgcagtcaccgccttgtgggggaaggtcaatgtagatgaggttgggggggaggctctcggacgactgctggtcgtttatccgtggactcagaggtttttcgaaagcttcggtgatctgagcactcccgacgctgtgatggggaaccccaaggtcaaggcacacgggaagaaagtcctgggagccttttcagacgggctggcccacctcgacaacctgaagggcacctttgccacactgtcagagttgcactgcgacaaactccatgtggaccccgaaaatttccgtcttctcggcaacgtgttggtttgcgtgcttgctcaccactttggaaaggaatttacacctcctgtacaggctgcctaccagaaagttgtggccggcgttgcgaacgcactggcgcataaataccac

SEQ ID NO: 250410 - DNA, 441 bp, synthetic construct
  misc_feature 1..441: note = Description of Artificial Sequence: Synthetic coding sequence
  source 1..441: mol_type = other DNA
atggtacatttaacgccggaagaaaaatcggcggttacggcgctatggggtaaagtaaatgtagatgaagtaggtggtgaagcgctaggtcgattattagttgtatatccgtggacgcaacgtttttttgaatcgtttggtgatttatcgacgccggatgcggttatgggtaatccgaaagtaaaagcgcatggtaaaaaagtactaggtgcgttttcggatggtttagcgcatctagataatttaaaaggtacgtttgcgacgttatcggaattacattgtgataaattacatgtagatccggaaaattttcgtttattaggtaatgtattagtatgtgttttagcgcatcattttggtaaagaatttacgccgccggtacaagcggcgtatcaaaaagttgtagcgggtgtagcgaatgcgttagcgcataaatatcat

SEQ ID NO: 250411 - DNA, 441 bp, synthetic construct
  misc_feature 1..441: note = Description of Artificial Sequence: Synthetic coding sequence
  source 1..441: mol_type = other DNA
atggtgcatttgactcccgaggagaagtctgcagttaccgcactctggggcaaggtcaacgtcgacgaggtgggcggagaggcccttggtagactcctggtggtgtacccatggacacagagatttttcgagtcttttggggatctgagcacacctgacgccgttatggggaaccctaaggttaaggcacacggaaaaaaagtgctgggagcattcagcgatggactcgctcacctggacaatctgaagggtacgtttgcaaccctcagcgaactgcattgcgataagctgcatgtggacccggagaatttcagactgctcgggaatgtattggtgtgcgtcctggcccaccatttcggcaaggaattcactcctcccgtccaggctgcttatcagaaggtcgtggcgggagtcgccaacgccctggcccataagtaccat

SEQ ID NO: 250412 - DNA, 441 bp, synthetic construct
  misc_feature 1..441: note = Description of Artificial Sequence: Synthetic coding sequence
  source 1..441: mol_type = other DNA
atggtgcacctgacccccgaggagaaaagcgcagtgaccgcactctggggtaaagtgaacgtcgacgaggtcggtggcgaggcactcggcagactgctcgtggtgtacccgtggacccaaaggttctttgagtcgttcggcgacctctctacgccggacgccgtgatgggaaacccgaaggtgaaagcccatggaaaaaaggtcctcggagccttctcagatggcctggcccatttggacaacttgaaggggacttttgccactctgagcgaactgcactgcgataagctgcatgtggacccagaaaacttcaggcttctgggcaacgtccttgtgtgcgttctcgcgcaccattttgggaaggagtttactccacctgtccaagctgcctatcagaaggtggtggcgggagtggccaatgcgttggcgcacaagtaccac

SEQ ID NO: 250413 - DNA, 441 bp, synthetic construct
  misc_feature 1..441: note = Description of Artificial Sequence: Synthetic coding sequence
  source 1..441: mol_type = other DNA
atggtgcatctgactcctgaagaaaaatccgcggtgaccgcactttggggtaaagttaacgtcgacgaagtgggcggggaagcactgggacgtctccttgttgtgtacccatggactcaacgcttctttgaatcctttggggatctgtcaactccggacgcagtcatgggaaaccccaaggtgaaagcacatggtaaaaaggtgctgggcgcattttcagacggactggcacacctggataaccttaaaggaacctttgcgactctgtcggaactgcactgcgataagctgcatgtggacccagaaaactttcgtcttttgggaaatgtccttgtgtgtgtgcttgcccatcacttcggtaaggagttcacccctcctgtgcaggcagcctaccaaaaagtcgtggcaggagtcgcgaatgccctggcacataagtaccat

SEQ ID NO: 250414 - DNA, 441 bp, synthetic construct
  misc_feature 1..441: note = Description of Artificial Sequence: Synthetic coding sequence
  source 1..441: mol_type = other DNA
atggtgcacctgacaccggaagaaaagagtgctgtgacggccctgtggggaaaggtgaacgtggatgaagttggaggtgaagcactcggtagactcttggtggtatatccctggacccagagattttttgagagctttggtgacctgagtacacccgatgccgtaatgggaaaccccaaagtgaaggcccatgggaaaaaggtgctgggggctttctctgatggtctggctcacctcgataatctgaaggggactttcgctacactgtccgagctgcactgtgacaagctgcatgtagatccagagaattttaggctgcttggcaacgtcctggtctgcgtgctagcccaccactttggaaaggagttcacaccgcctgttcaggctgcctaccaaaaagtagtggcgggcgtggcgaatgcgctggcacataaataccac

SEQ ID NO: 250415 - DNA, 441 bp, synthetic construct
  misc_feature 1..441: note = Description of Artificial Sequence: Synthetic coding sequence
  source 1..441: mol_type = other DNA
atggtgcatttgacccctgaggaaaaatctgcggtaaccgctctatggggcaaagttaacgtcgatgaagttgggggggaagctctgggaagacttctggttgtttatccgtggactcagcgtttctttgagagttttggagatctgagtaccccagacgctgtgatgggtaacccaaaagtaaaagctcatggaaagaaggttttgggagccttctcagatgggttggctcatctggataatttgaagggtacctttgccacactgtctgagcttcattgtgataagcttcatgttgatcctgaaaattttagactcttgggtaatgtcttagtttgcgttctcgctcaccattttgggaaggagttcacacctccggttcaagccgcctatcaaaaggttgttgctggggtggctaacgctttagcgcataagtaccat

SEQ ID NO: 250416 - DNA, 441 bp, synthetic construct
  misc_feature 1..441: note = Description of Artificial Sequence: Synthetic coding sequence
  source 1..441: mol_type = other DNA
atggtgcatctgactcccgaggaaaagtcagccgtgactgcactgtggggtaaagtgaatgtggacgaagtgggaggagaggcactgggcaggctgcttgtggtgtatccatggactcaaaggtttttcgagagcttcggagatctgtcgactccggatgctgtgatggggaaccctaaagtgaaagcccatggaaagaaggtgctcggagcattttcggacggacttgcccaccttgacaacctgaagggtacctttgccaccctctcggagctgcactgcgacaagctgcatgtcgatcctgagaactttcgccttctgggtaacgttttggtctgtgtcctggcccatcatttcggcaaggagtttaccccacctgtgcaagcagcgtaccagaaggtcgtggcaggagtcgcaaatgctctggcgcataagtaccac

SEQ ID NO: 250417 - DNA, 441 bp, synthetic construct
  misc_feature 1..441: note = Description of Artificial Sequence: Synthetic coding sequence
  source 1..441: mol_type = other DNA
atggtgcatttgactcccgaagagaaatccgcagttacagccctctggggcaaagtcaacgtggacgaggtcggaggggaggcgttgggacggctgttggtcgtgtacccgtggacacagcggttctttgagagctttggggacctttcgacgcctgacgcagtgatgggcaacccgaaggtaaaagcccacgggaagaaagtgctgggggccttttccgatggcctggcacacctagataacctgaagggaacatttgcgacgctgtctgaattgcattgcgacaaacttcacgtagatccagagaatttccgactgttgggcaacgtgctcgtctgtgtgctggcccatcatttcggaaaagaatttaccccacccgttcaggccgcctatcagaaagtggtagctggtgtggccaatgccctagctcacaaataccat

SEQ ID NO: 250418 - DNA, 441 bp, synthetic construct
  misc_feature 1..441: note = Description of Artificial Sequence: Synthetic coding sequence
  source 1..441: mol_type = other DNA
atggtgcatctgactccggaggaaaagagtgcagttactgctttatgggggaaagttaacgtagacgaagtgggcggggaagcattggggcgcctgttagttgtttatccatggacacaacggttttttgaatcattcggagatttaagcacgccggatgctgttatgggaaatccaaaagttaaagcacacggaaagaaggttttgggtgctttctcagatggattggctcacctggacaatttgaagggaactttcgcaaccctttccgaattgcattgtgacaagctgcatgtagatccagagaactttagattgctggggaacgttttagtttgtgttcttgcccatcatttcggaaaagagttcacacctccagttcaagctgcatatcaaaaagttgttgccggtgtcgccaatgcacttgcacacaagtatcac

SEQ ID NO: 250419 - DNA, 441 bp, synthetic construct
  misc_feature 1..441: note = Description of Artificial Sequence: Synthetic coding sequence
  source 1..441: mol_type = other DNA
atggtgcatctgacccctgaggaaaagtcagccgtcacggcattgtggggaaaggtgaacgtcgacgaagtgggcggcgaggcccttggacgccttttggtggtgtacccatggacccaaagattcttcgaatcttttggggatctgtccactcccgatgcagtgatgggtaatccaaaagtgaaggcacatggcaaaaaggtgcttggtgccttttccgacgggctggcacacctcgataatctcaaaggaacttttgcaactctctcggaacttcactgtgataagctccatgtcgaccctgagaatttcaggctccttggtaatgtcctcgtctgtgtgcttgcccaccattttggaaaggaattcactcccccagtgcaggcagcataccagaaagttgtcgcaggtgtggctaatgcattggcacacaaataccac

SEQ ID NO: 250420 - DNA, 441 bp, synthetic construct
  misc_feature 1..441: note = Description of Artificial Sequence: Synthetic coding sequence
  source 1..441: mol_type = other DNA
atggtgcatttaacgcccgaagaaaaatctgccgtgacagctctatgggggaaggtcaacgtcgacgaagttgggggggaagccctggggcgcttgcttgtcgtgtatccttggactcaaaggtttttcgaatccttcggggatttgtctactcctgatgcagtgatggggaatccaaaagtaaaagcacacggaaaaaaagtgttaggggcgttctccgatggacttgcacatctggacaacctgaaaggaactttcgccactctttcagaactccactgcgataaattacacgtcgatcccgaaaactttcgactgctgggaaatgtgcttgtgtgcgtccttgcacaccactttggaaaagaatttacacctcctgtacaggctgcctatcagaaagttgtggccggagtggctaatgccctggctcacaagtaccac

SEQ ID NO: 250421 - DNA, 441 bp, synthetic construct
  misc_feature 1..441: note = Description of Artificial Sequence: Synthetic coding sequence
  source 1..441: mol_type = other DNA
atggtccacctgactcccgaagaaaagtcagctgtgaccgcattgtggggtaaagttaacgtcgatgaagtgggaggggaagccttggggcggctcttggtcgtgtacccatggacacaacgcttctttgagtcctttggagacctatctactccggatgctgtgatggggaaccctaaagtgaaggctcatgggaagaaggtgctaggcgccttttcggacggcctggcgcacctagataatctgaaaggcacctttgcgaccctttccgagctccactgtgataagctgcacgttgatcccgagaattttcgtttgctgggcaatgtccttgtgtgcgtgttagcacaccattttgggaaggagtttacgccacctgtccaagcagcataccaaaaagtcgtagctggcgtggctaacgcgcttgcacacaaataccat

SEQ ID NO: 250422 - DNA, 441 bp, synthetic construct
  misc_feature 1..441: note = Description of Artificial Sequence: Synthetic coding sequence
  source 1..441: mol_type = other DNA
atggtgcatctcactcccgaggaaaagtctgcagtgaccgctctgtggggaaaagtgaacgtggacgaagtgggaggagaggctttggggcgtctcctggtggtgtacccttggacccagcgatttttcgaatcgtttggtgatctttccacccctgatgcagtgatgggaaatcctaaggtcaaggcccatggaaaaaaggtcctcggagcattttccgatggactggctcacctggataacctcaaaggcacttttgccactctgtccgaacttcattgcgataagttgcatgtggacccggagaactttcgcctgctgggaaacgtccttgtgtgtgtcctggcccaccactttggtaaggagtttacgcctcccgtgcaagccgcgtaccagaaggttgtggcaggtgtggcgaacgcgctcgcacataagtaccat

SEQ ID NO: 250423 - DNA, 441 bp, synthetic construct
  misc_feature 1..441: note = Description of Artificial Sequence: Synthetic coding sequence
  source 1..441: mol_type = other DNA
atggtgcatctcacccccgaagagaagtcagccgtgactgctctgtggggtaaagtcaacgtggacgaagtcggtggagaagcacttggacgcttgctggtggtttacccgtggacgcagcgattcttcgaatcctttggtgatctttcgactcccgacgcggtcatgggcaatcctaaggtcaaagcacacggaaaaaaggtgcttggagccttttcggatggcctcgctcatcttgataacttgaaaggaacgtttgcgaccctgagcgaactccattgtgataagctgcatgttgacccagagaattttcggcttctcgggaacgtactggtgtgcgttttggcacaccacttcggcaaggaatttacccctccagtgcaagcagcttaccaaaaggtagtggcaggagtggcgaatgccctcgcccacaaataccat

SEQ ID NO: 250424 - DNA, 441 bp, synthetic construct
  misc_feature 1..441: note = Description of Artificial Sequence: Synthetic coding sequence
  source 1..441: mol_type = other DNA
atggttcacttgacccccgaagaaaagtccgctgttaccgctctctggggtaaggtcaacgtcgatgaagtgggaggagaagctctgggtcggttgctcgttgtctatccctggacccagcgtttcttcgagtctttcggtgatctgtcgactcctgatgctgtgatgggtaatccaaaggtgaaagctcacggaaagaaagtgctgggcgccttttcagatggcctggcccatctcgacaacttgaaggggaccttcgcaacactctccgagctgcactgtgataaattgcatgtggaccctgagaacttccggcttctcgggaatgtcctggtatgtgttttggctcaccacttcggaaaggaattcaccccccccgtacaagctgcgtaccaaaaagttgttgcaggcgtcgccaacgctctggctcacaagtatcat

SEQ ID NO: 250425 - DNA, 441 bp, synthetic construct
  misc_feature 1..441: note = Description of Artificial Sequence: Synthetic coding sequence
  source 1..441: mol_type = other DNA
atggtccatctcaccccggaagagaagtccgcggtaaccgctctttggggaaaggtgaacgtggatgaagtgggcggagaagcactcggacggcttttggtggtctacccttggactcaaagattctttgagagctttggcgatctctcaacgccagacgcggtaatgggaaatcccaaagtgaaggcacacggtaagaaggtgctgggggcgttcagcgacggccttgcccatcttgataacctgaaaggtactttcgctaccctgtccgagctgcattgtgacaaactgcatgtggacccagagaattttcgtttgcttggcaacgttttggtttgcgtcctggcccaccatttcggaaaggaatttactcctccagtccaagcagcttaccagaaggtcgtcgcgggagtggcaaacgcacttgcacacaaataccat

SEQ ID NO: 250426 - DNA, 441 bp, synthetic construct
  misc_feature 1..441: note = Description of Artificial Sequence: Synthetic coding sequence
  source 1..441: mol_type = other DNA
atggtacatttgaccccagaggagaagagcgcagtgaccgccctgtgggggaaggtcaatgtggacgaggtgggaggtgaggcgttgggacgcctattggttgtgtacccatggacgcagcgcttttttgaatcattcggagacctgtccacgcctgacgctgtgatggggaacccaaaggtcaaagctcatggaaagaaagtgttaggtgcatttagcgacggcttggctcatcttgacaacttgaagggaacgtttgcaacgctgtctgagttacattgcgataagctacacgtagaccctgaaaattttcgcttactcggcaacgtccttgtgtgcgtgctagctcaccactttgggaaggagttcacacctcccgtgcaagccgcataccagaaagtggtggctggtgtggccaacgcgctggcacacaagtaccat

SEQ ID NO: 250427 - DNA, 441 bp, synthetic construct
  misc_feature 1..441: note = Description of Artificial Sequence: Synthetic coding sequence
  source 1..441: mol_type = other DNA
atggtccacttgacgccagaggagaagagcgctgtgaccgcactatggggcaaggtaaacgttgacgaggtgggaggagaggccctgggacggctcttggtcgtatatccttggactcagcgattcttcgagtcattcggtgaccttagtactccagacgcagttatggggaatcccaaggtgaaggctcacggaaagaaggtgctgggggcctttagtgatggtttagctcacctggacaacctgaagggtacgttcgcaacactttccgaattacactgtgacaagctgcatgtcgatcctgagaactttcgactgctaggcaatgtacttgtctgtgtcctggctcatcactttgggaaagaatttaccccccctgttcaggcagcctaccaaaaagtggtggccggagttgctaacgcattggcacataagtaccac

SEQ ID NO: 250428 - DNA, 441 bp, synthetic construct
  misc_feature 1..441: note = Description of Artificial Sequence: Synthetic coding sequence
  source 1..441: mol_type = other DNA
atggtgcacctgactccggaggagaagagcgccgtgacagctctttggggtaaggtaaacgttgacgaggtcggcggcgaggcccttggaaggctcctggtcgtgtatccctggacccagcggttcttcgagtcatttggcgatctctctacccccgatgcggtgatgggcaatcccaaagtgaaagcccacgggaagaaagtgcttggcgcgttttccgacggcctggcccacctggacaacttgaagggtacctttgcaacgctttctgagctgcattgtgataagctccacgtggacccagaaaattttagactgctgggtaatgtgctggtgtgtgtgttggcccaccatttcgggaaagagtttaccccccccgtacaggccgcttaccagaaggtggtcgcaggagtcgccaacgccctagcacacaagtaccat

SEQ ID NO: 250429 - DNA, 441 bp, synthetic construct
  misc_feature 1..441: note = Description of Artificial Sequence: Synthetic coding sequence
  source 1..441: mol_type = other DNA
atggtgcatctgacacccgaggagaagagtgcagtgactgctctgtggggcaaggtgaacgtggacgaggtgggaggagaagcgcttggacggctcctcgtcgtttatccctggacacagaggtttttcgagtccttcggcgatttgtctaccccagacgccgtaatgggcaaccccaaggtgaaagcacatgggaaaaaggtcctaggtgcgttttcagatggtctcgctcatcttgataacctaaagggaacgttcgcaaccttgtcagagttgcactgtgataaacttcacgtcgacccagagaatttccgccttttgggaaatgtgctggtgtgtgtccttgcgcatcatttcggcaaagaattcaccccccccgtgcaggcggcttaccagaaggttgtcgccggagtggccaacgccttagcgcacaagtatcat

SEQ ID NO: 250430 - DNA, 441 bp, synthetic construct
  misc_feature 1..441: note = Description of Artificial Sequence: Synthetic coding sequence
  source 1..441: mol_type = other DNA
atggtccacctgaccccagaagagaagagcgcggtcacggccctgtggggcaaggtcaacgtggatgaagtgggaggtgaagctctggggcggttgttggtggtgtacccctggacccaaagattcttcgagtcattcggtgacctgtccactccagacgccgtgatggggaaccctaaggtgaaggcgcacggaaaaaaggtgcttggagcattctcggatggactggcacatctcgacaacctgaagggaacttttgccactctctcggagctgcactgtgacaaactgcatgtggatccggaaaacttccgcctgctcggaaatgtgctcgtttgcgtgcttgcacatcactttggcaaagagttcaccccgccggttcaggcggcttaccagaaggtggtcgccggcgtcgccaatgctctcgcccataagtaccac

SEQ ID NO: 250431 - DNA, 441 bp, synthetic construct
  misc_feature 1..441: note = Description of Artificial Sequence: Synthetic coding sequence
  source 1..441: mol_type = other DNA
atggtccacctcacgccagaagagaaatcggctgttactgcactatggggaaaggttaacgtggatgaagtgggcggcgaggctttggggagattgttggttgtttatccttggacccagaggttcttcgaatcttttggcgatctgagcaccccagatgcagtgatgggaaaccctaaagtgaaagctcacgggaaaaaagttctgggcgccttttcagacggactggctcatctagacaatcttaaaggcacctttgctacactgtcagagctgcattgtgacaaactgcatgtggatcccgaaaacttcaggctgttaggcaacgtgctggtgtgcgtgctggcccaccacttcggaaaggaattcacccctcctgtccaggccgcatatcagaaggttgttgctggggtggctaacgcgctcgcacataaataccat

SEQ ID NO: 250432 - DNA, 441 bp, synthetic construct
  misc_feature 1..441: note = Description of Artificial Sequence: Synthetic coding sequence
  source 1..441: mol_type = other DNA
atggtgcatcttacacctgaggaaaagtccgccgtcaccgctctgtgggggaaagtgaacgtcgatgaagtaggaggagaggccctgggccgattactggttgtttacccatggactcaaagattctttgagtctttcggcgatctatcgacacccgatgctgtaatgggtaacccaaaggtgaaggcacatgggaagaaagtgctcggcgcattcagtgacggtctagctcatttggataatctaaaaggaaccttcgccacgctgagtgagttgcattgcgataaactgcacgtagatccagagaacttccggttgctcggtaatgtgttggtgtgcgtgctagctcaccacttcggaaaggagttcacccctcccgtgcaggctgcttatcaaaaggtggtggcaggcgtcgcgaacgcccttgcccacaaatatcac

SEQ ID NO: 250433 - DNA, 441 bp, synthetic construct
  misc_feature 1..441: note = Description of Artificial Sequence: Synthetic coding sequence
  source 1..441: mol_type = other DNA
atggttcacttaacccccgaggagaagtctgcagtgacagcactgtggggaaaagtgaatgtcgatgaagttggaggagaagctctgggaaggctgctggttgtttatccatggacccagaggttctttgagtccttcggtgacttatccaccccagacgccgtgatgggaaaccccaaagtgaaggcacacgggaagaaagtgctcggagcgttttccgatgggctggcccaccttgataacctgaaaggaacattcgcaaccttgagcgaactacactgtgataaactgcacgtcgacccggagaactttcggctgttaggaaacgtacttgtttgcgtgctagcgcatcacttcgggaaagagttcacacctccagtgcaagccgcataccagaaagtggtggccggcgtggcaaacgccctggctcataagtatcac

SEQ ID NO: 250434 - DNA, 441 bp, synthetic construct
  misc_feature 1..441: note = Description of Artificial Sequence: Synthetic coding sequence
  source 1..441: mol_type = other DNA
atggtccatctgactccagaggaaaagagcgcggtcacggccctctggggaaaggtgaacgtggatgaagtgggaggtgaagccctgggccgcctgctggtcgtgtacccctggactcagcgcttcttcgagtcgtttggagatctcagcacgccggacgcagtcatgggcaaccccaaggtcaaggcgcacgggaagaaggtgctcggggcattttcagacggactggcccatttggacaacctgaagggcacttttgccaccctgtccgaactgcactgcgataagctgcatgtcgaccctgagaacttcaggcttcttggtaatgtgcttgtgtgcgtgctggcacaccatttcggtaaggaattcaccccaccagttcaagcggcgtaccagaaggtggttgcaggggtggcaaacgcattggcccacaaataccat

SEQ ID NO: 250435 - DNA, 441 bp, synthetic construct
  misc_feature 1..441: note = Description of Artificial Sequence: Synthetic coding sequence
  source 1..441: mol_type = other DNA
atggtacacctgactcctgaagagaagagcgcagtaacggccctttggggtaaggtcaatgtggacgaggttggcggcgaggctttgggccgcctactggtggtgtatccctggacccagcggttctttgagtcctttggagacctgagtacacctgatgctgtcatggggaacccaaaggtgaaggcacatggcaagaaagttctcggggccttcagcgacgggttggcccatttagacaatctgaagggaaccttcgccacactgtccgaactgcattgtgataagttgcatgtcgaccccgagaacttcaggctgctagggaatgtgctggtttgtgtgctggcccaccactttggtaaggagttcacgccgcctgtgcaagctgcctatcagaaggtggtcgccggggttgccaacgctcttgctcacaagtatcac

SEQ ID NO: 250436 - DNA, 441 bp, synthetic construct
  misc_feature 1..441: note = Description of Artificial Sequence: Synthetic coding sequence
  source 1..441: mol_type = other DNA
atggtgcatttgacacctgaggaaaaaagtgcagtgaccgcactttggggaaaggtcaatgttgatgaagtgggtggcgaggcacttgggcgcctgcttgtggtgtacccttggacccagcgcttctttgaatcttttggcgacctatctacacctgacgccgtgatgggtaaccccaaggtcaaagcccacggtaagaaggtcctgggcgccttttcagatgggctcgctcatttggataacctgaagggtacattcgccaccctctctgaattgcattgcgataaactccacgtggatcctgagaatttcaggcttctcggcaacgtgctggtgtgcgtgctcgctcatcacttcggaaaggagtttactcctcccgtccaggcagcataccagaaggttgtggccggagtggctaacgctctggcacataagtatcac

SEQ ID NO: 250437 - DNA, 441 bp, synthetic construct; identical to SEQ ID NO: 250399
  misc_feature 1..441: note = Description of Artificial Sequence: Synthetic coding sequence
  source 1..441: mol_type = other DNA

SEQ ID NO: 250438 - DNA, 441 bp, synthetic construct
  misc_feature 1..441: note = Description of Artificial Sequence: Synthetic coding sequence
  source 1..441: mol_type = other DNA
atggtgcacctcaccccagaagagaagtcagcggtcactgctctctggggtaaagtgaatgtggatgaggtgggaggggaggcgcttggtcgcctgctggtggtgtacccatggacccaacggttcttcgagtccttcggagacttgtcgactccagacgcggtgatgggaaatccaaaagtcaaggcccacggaaagaaggtcctgggcgcatttagcgatggactggctcatctcgataacctcaagggaacctttgccacgctttctgagctccattgcgacaagctgcacgtggacccggaaaacttcagactgctgggcaacgttctggtgtgcgtgctggcccaccactttgggaaggagttcaccccgcccgtgcaagcggcctaccagaaggtcgtcgcaggagtcgcgaatgccctcgcgcacaaataccat

SEQ ID NO: 250439 - DNA, 441 bp, synthetic construct
  misc_feature 1..441: note = Description of Artificial Sequence: Synthetic coding sequence
  source 1..441: mol_type = other DNA
atggtgcacctgacacctgaagaaaagagtgcggtaacggctctttggggtaaggtgaatgtggatgaagtcggaggcgaagccctggggaggttgctggttgtatacccttggactcaacgtttcttcgaatccttcggggatcttagcacccccgatgccgtgatgggaaaccccaaagtgaaggcccacgggaagaaggtcctcggggccttctctgatggcctggcccaccttgataacctcaagggtaccttcgccacgctcagcgaactccattgtgacaagcttcacgttgaccctgagaattttagactcctgggaaacgtactcgtgtgtgttttggcccatcacttcggcaaggagttcaccccgcccgtgcaggccgcataccagaaagtcgtcgcaggggttgccaacgcccttgctcacaagtaccac

SEQ ID NO: 250440 - DNA, 441 bp, synthetic construct
  misc_feature 1..441: note = Description of Artificial Sequence: Synthetic coding sequence
  source 1..441: mol_type = other DNA
atggtgcacctcacaccagaagagaagagtgcagtcaccgctctctggggtaaagtgaacgtagatgaggtgggaggagaggctcttgggagactgttggtggtctatccttggactcagcgcttttttgaatctttcggtgacctatccacaccggatgccgttatgggcaacccaaaggttaaggcccatggcaagaaagtactgggagccttctccgacggcttggctcacctcgacaacctgaaaggaacctttgctacgctatctgagctgcattgtgataaactgcatgtcgaccccgagaactttcgactcttggggaatgtgctggtgtgtgtcttggcccatcacttcggcaaggagttcactcccccagtgcaggctgcctaccagaaggttgtggccggagtggcgaacgccctcgcccacaaatatcac

SEQ ID NO: 250441 - DNA, 441 bp, synthetic construct
  misc_feature 1..441: note = Description of Artificial Sequence: Synthetic coding sequence
  source 1..441: mol_type = other DNA
atggtccacctgactccagaggaaaagtctgccgtgactgcactctgggggaaggtcaatgttgacgaagtgggtggggaagcacttggccgactgctcgtggtgtatccctggacgcaaagatttttcgagtcattcggagatctttcgacccctgatgcagtgatgggcaacccaaaggtgaaggctcacggaaaaaaggtgcttggtgcatttagcgatggtctggctcatcttgacaacttgaaagggactttcgctaccctctccgagctccactgtgataagttgcatgtcgatccggaaaactttcggcttctcggaaatgtgcttgtctgcgtcctcgcacaccatttcggaaaggaatttaccccaccggtgcaagccgcataccagaaagtggtggcgggagtggcgaacgccctggcacacaagtaccac

SEQ ID NO: 250442 - DNA, 441 bp, synthetic construct
  misc_feature 1..441: note = Description of Artificial Sequence: Synthetic coding sequence
  source 1..441: mol_type = other DNA
atggtgcacttgactcctgaggaaaaaagcgccgttacggccctctgggggaaggtgaacgtggacgaggtcggaggagaagccctgggacgcctcctcgtggtgtacccatggacccaacggttcttcgaatcattcggcgacctgtcgactccggacgccgtcatgggcaatcctaaggtcaaggcgcatggtaagaaagtgctgggagcattcagcgatggtttggcgcatctcgataatctgaaagggactttcgcgaccttgagcgagctgcactgcgataagttgcatgtggacccggaaaacttcaggctgctggggaacgtgctggtgtgcgtcctcgcccatcatttcggcaaagagttcactccaccggtccaggcggcttaccaaaaagtggtcgccggggtcgccaacgcattggcacacaagtaccac

SEQ ID NO: 250443 - DNA, 441 bp, synthetic construct
  misc_feature 1..441: note = Description of Artificial Sequence: Synthetic coding sequence
  source 1..441: mol_type = other DNA
atggtgcatcttacccccgaagagaagtcagctgtgaccgccctctgggggaaagtgaacgtggacgaggtggggggagaagcactgggccggctccttgtcgtttatccttggacccaaagatttttcgagtcgttcggagatctgtcaactcctgatgctgtgatgggtaatccgaaggtcaaagcacatggaaaaaaggtgcttggagcgttttcggatggattggcacacctcgacaatctcaaagggaccttcgccacgttgtccgaacttcactgtgacaagttgcatgtggatccagagaactttcgactgctgggcaacgttctcgtgtgcgtgcttgctcatcactttggaaaggaatttactcctcctgtgcaggcagcgtaccaaaaggtcgttgcaggcgtcgcgaacgcacttgcccataagtaccat

SEQ ID NO: 250444 - DNA, 441 bp, synthetic construct
  misc_feature 1..441: note = Description of Artificial Sequence: Synthetic coding sequence
  source 1..441: mol_type = other DNA
atggtgcacttgacccctgaggaaaaaagcgccgtaactgcactctggggaaaggtgaatgtggacgaagtgggaggagaagcattgggtcggcttcttgtcgtttacccttggactcaaaggttcttcgagtcatttggagatctgtcgaccccagatgcagtcatgggtaatcctaaagtcaaggcacatgggaagaaggtcctcggtgcattttctgatggcctggcccatcttgataatcttaaaggaacctttgccaccctgtcggaacttcactgcgacaaactgcatgtggacccggaaaacttcagacttttgggcaacgtgctcgtttgtgtgctggcacatcatttcggaaaagagtttacgcccccagtgcaagccgcctaccagaaggtggtggctggggtcgcaaacgcacttgcgcacaaatatcat

SEQ ID NO: 250445 - DNA, 441 bp, synthetic construct
  misc_feature 1..441: note = Description of Artificial Sequence: Synthetic coding sequence
  source 1..441: mol_type = other DNA
atggtgcacctcacaccagaggaaaagtccgcagtgacagcgctttgggggaaggtgaatgtggacgaggtgggtggagaggccctgggcaggctgttggtcgtgtatccttggactcagcggttctttgaatccttcggagatttatcgacacctgacgcagtgatgggaaaccccaaggtaaaggcacacggcaagaaggtgctcggcgctttctctgatggactcgcacaccttgataatctgaaggggactttcgccacactcagcgaactacattgcgacaagcttcatgtggatccagagaactttaggctactaggaaatgtgttagtctgtgtcctcgcccatcattttggcaaggagttcacaccacccgtacaggcagcataccagaaagtggttgccggggtggctaacgcactggctcataaataccac

SEQ ID NO: 250446 - DNA, 441 bp, synthetic construct
  misc_feature 1..441: note = Description of Artificial Sequence: Synthetic coding sequence
  source 1..441: mol_type = other DNA
atggttcatctcaccccagaagaaaaatccgcggtgactgccctttggggcaaagtgaatgtagacgaggtgggtggggaagccctgggtagactcctcgtggtctacccatggacacagcgctttttcgagtctttcggagacctgtctacaccagatgctgtgatgggcaatccgaaggtgaaggcacatgggaagaaagtgctcggggccttctccgacggtcttgcccacctggacaatctgaaaggcacttttgctactctgagcgagctgcattgtgacaagctgcatgtggaccctgagaattttaggcttcttggcaacgttcttgtgtgcgtactggctcatcatttcggaaaagagtttacgccgcccgttcaggcggcatatcagaaggtggtagctggcgtggcaaatgccctggcccacaagtatcat

SEQ ID NO: 250447 - DNA, 441 bp, synthetic construct
  misc_feature 1..441: note = Description of Artificial Sequence: Synthetic coding sequence
  source 1..441: mol_type = other DNA
atggtgcatctgactcccgaggagaagtctgcggttaccgcgctttggggcaaggttaacgtggacgaggtaggtggtgaggcgctgggcagattgctggtggtgtatccatggactcagcgcttctttgaaagttttggtgacctctccacgcccgatgctgtaatgggaaaccccaaagtaaaagcccacggaaaaaaggtgctgggtgccttttccgacggcttggcccatctggataatcttaaaggtaccttcgccacgctgtcagagcttcattgcgataaactccacgtcgaccctgaaaatttcaggctgctcggcaatgtgctggtgtgcgtccttgctcaccactttggcaaggagttcacgcctcccgtccaagcagcctatcagaaggtggtcgccggtgtggccaatgcacttgcgcacaaataccat

SEQ ID NO: 250448 - DNA, 441 bp, synthetic construct
  misc_feature 1..441: note = Description of Artificial Sequence: Synthetic coding sequence
  source 1..441: mol_type = other DNA
atggtgcatcttactccagaagagaaaagcgcagtgaccgctctctggggcaaggtgaatgtggatgaggtcgggggcgaggctctcggtcgcttgctcgtggtctacccctggacccagcgcttcttcgagtccttcggagatctctcaactcctgatgccgtgatgggcaatccgaaggtgaaagcgcacggaaaaaaggtcctgggggcattctccgatggactggcgcacctggataatctgaaaggaaccttcgcaacgctttcggagcttcactgtgataagctgcacgtcgacccggaaaacttccgcctgttggggaacgtgctggtgtgcgttctggcgcatcattttggcaaggagtttaccccgcccgtgcaagccgcataccagaaggtggtcgctggtgtcgccaatgcgctggcccacaagtaccat

SEQ ID NO: 250449 - DNA, 441 bp, synthetic construct
  misc_feature 1..441: note = Description of Artificial Sequence: Synthetic coding sequence
  source 1..441: mol_type = other DNA
atggttcacctcaccccggaggaaaagtcggcagtgactgcgctgtggggcaaggtgaacgtggatgaggtcggaggcgaggctttgggaaggctcctggtggtttacccatggacccaacggttcttcgaatccttcggagatttgtcgaccccggacgcggtgatggggaatcctaaggtcaaggcccacgggaaaaaggtgttgggggcattttcagacggtctggcacatctcgataatctcaagggcactttcgccactctgagcgagctgcactgcgacaaacttcatgttgacccagaaaacttcagactgcttggtaacgtcctggtgtgtgtacttgcccaccatttcggaaaagaatttacgcccccggtgcaggcggcctaccagaaggtcgtcgctggagtagcgaacgccctcgctcataagtatcac

SEQ ID NO: 250450 - DNA, 441 bp, synthetic construct
  misc_feature 1..441: note = Description of Artificial Sequence: Synthetic coding sequence
  source 1..441: mol_type = other DNA
atggtgcatctgacccctgaagagaaaagtgctgtgacagcactgtggggtaaggtcaatgtggacgaagtcgggggcgaggccctgggacgcctgttggtagtgtatccatggactcaaaggttttttgagtctttcggcgacctgtcaactcccgacgccgttatggggaatcccaaggttaaagcgcacgggaagaaagtgctcggagccttctccgatggcttggctcacctggacaatctaaagggtaccttcgcgactctgtcagaacttcactgtgacaagctgcacgtagaccccgagaactttaggttactcgggaatgtgctggtgtgcgtgctcgctcatcactttggaaaagagttcactcctcccgtccaagccgcctaccagaaggtggttgcaggggtggctaacgctctggctcacaaataccac

SEQ ID NO: 250451 - DNA, 441 bp, synthetic construct
  misc_feature 1..441: note = Description of Artificial Sequence: Synthetic coding sequence
  source 1..441: mol_type = other DNA
atggttcacctgactccagaggaaaagtcagcagtcactgcactttgggggaaggtcaacgtagatgaggtcgggggggaggcgcttgggcgcctgttagtggtttatccttggacccagcgtttttttgagtcgtttggtgatctgtccacacccgacgccgtgatgggaaatcctaaggtgaaagcccatgggaagaaggtgctgggagccttttctgatggactcgctcacctggacaatttgaaaggaaccttcgctaccctgagcgaactgcattgcgataagctgcacgtggaccccgaaaactttcgtctgttaggtaacgtcctggtatgtgttctggctcatcatttcggaaaagaatttactcctcctgtgcaggcggcttatcagaaagtggtggccggagtcgccaacgcgctcgcccataagtatcat

SEQ ID NO: 250452 - DNA, 441 bp, synthetic construct
  misc_feature 1..441: note = Description of Artificial Sequence: Synthetic coding sequence
  source 1..441: mol_type = other DNA
atggtgcatctgactccggaagaaaaatcagccgtgactgccctgtggggaaaagtgaacgtggacgaggtcggaggcgaagctcttggccggctgctggtggtctatccatggactcagagatttttcgaatcctttggtgacctcagcaccccggatgctgtcatgggaaatcctaaagtgaaggcgcacggaaaaaaggtgcttggggcgttttcggatgggctggcgcaccttgacaacctgaaaggaaccttcgctactctgtcagaactgcactgtgataagctgcacgtggaccccgagaactttcggctgctgggcaacgtcctggtctgcgtgctggcccatcacttcgggaaggagtttactccgccggtgcaagccgcataccagaaggtggtggcgggagtggcgaacgccctggcgcataagtaccac

SEQ ID NO: 250453 - DNA, 441 bp, synthetic construct
  misc_feature 1..441: note = Description of Artificial Sequence: Synthetic coding sequence
  source 1..441: mol_type = other DNA
atggtccacctcacccccgaggaaaagagcgcagtcaccgccctttgggggaaggtgaacgttgacgaagttggcggcgaggccctgggaaggttgttagtggtgtacccctggactcagcgttttttcgagagtttcggcgacttgagtacacccgatgcggttatgggaaacccgaaagtcaaagcccatggaaagaaagtcctcggggcattttccgatggccttgcccacctggataaccttaaaggcacattcgcaacactgagtgagcttcattgtgataagctgcacgttgaccccgaaaactttcgtctgctgggcaacgtacttgtctgtgtgctggctcatcactttggtaaggagttcacccctcccgttcaagccgcatatcagaaggtcgtagccggtgtggcaaacgcattagcacataaataccac

SEQ ID NO: 250454 - DNA, 441 bp, synthetic construct
  misc_feature 1..441: note = Description of Artificial Sequence: Synthetic coding sequence
  source 1..441: mol_type = other DNA
atggtgcacctcacccctgaagagaagagcgctgtgaccgcattatggggtaaggttaatgtcgatgaagtcggcggtgaagctcttggccggctgctggtcgtgtatccctggacacaacgattcttcgaatcattcggagacctgtcaacccccgacgctgtcatgggcaacccgaaggtgaaagcccacggcaagaaggtcctgggggccttctcggacgggctagcgcatctggacaaccttaaaggaacattcgcaactttgtccgaactgcactgcgacaagctgcacgtcgaccccgagaacttccggctcctagggaatgttttagtgtgtgtgctggcacatcacttcggtaaagaattcaccccccccgttcaagctgcttaccagaaagttgtcgcgggagttgccaacgcgcttgcccataaataccac

SEQ ID NO: 250455 - DNA, 441 bp, synthetic construct
  misc_feature 1..441: note = Description of Artificial Sequence: Synthetic coding sequence
  source 1..441: mol_type = other DNA
atggtccatctgacgcctgaggaaaagtcagcagtgactgcgctctggggtaaggtgaacgtcgacgaggtcgggggagaggctctggggcgccttcttgtggtgtacccttggacccagcgcttctttgaatcgtttggcgatcttagcaccccagacgccgtgatggggaatcccaaggtaaaggcacacggtaaaaaggtcctgggtgccttttcggacggactggcccaccttgataacctgaagggaacttttgcaactttgagcgagctgcattgtgataaactgcacgtggatcctgagaacttccggctgctgggtaatgtcctcgtctgcgtcctcgctcatcattttggtaaggagtttacgcctcctgtgcaggcggcctaccaaaaggttgtggcaggtgtggcgaacgcacttgcccataagtaccac

SEQ ID NO: 250456 - DNA, 441 bp, synthetic construct
  misc_feature 1..441: note = Description of Artificial Sequence: Synthetic coding sequence
  source 1..441: mol_type = other DNA
atggtgcaccttactcccgaagagaaaagtgcggtgaccgcactgtggggaaaagtcaacgtggacgaggtcggtggtgaagcactgggacggctccttgtcgtgtatccatggacccaaagattctttgagtcgttcggtgatttgtcgaccccagatgcagtgatgggcaatcctaaggttaaagcgcatggcaagaaggtcttgggagccttttccgatggcctcgcccatctggataacctgaagggtacttttgcaactctgtcagaacttcactgcgacaagttgcatgtcgatccagaaaacttccgcctgcttggcaacgttctggtgtgtgttttggcgcatcattttgggaaggagtttacgcctcctgtccaagccgcataccagaaggtggtagctggggtggcaaatgcactcgcacataagtaccac

SEQ ID NO: 250457 - DNA, 441 bp, synthetic construct
  misc_feature 1..441: note = Description of Artificial Sequence: Synthetic coding sequence
  source 1..441: mol_type = other DNA
atggtccaccttactccggaggagaaatcggctgtgaccgccctgtggggcaaggtgaacgtggacgaagttgggggagaagccctgggacggctgctggtcgtgtacccatggactcagcggttctttgagagctttggcgacctttccactcccgacgctgtcatgggaaacccgaaggtcaaggctcacggcaagaaagtgctgggagctttctcggacggactggcgcatctcgataatctcaaggggacctttgcgactctcagcgaacttcactgtgacaagctccacgtcgacccagaaaactttagactcctggggaacgtgctcgtctgcgtcctggcccatcacttcggaaaggagttcactccgcccgtccaggcggcctaccaaaaggtggtggccggagtggccaacgcactggcgcacaaatatcac

SEQ ID NO: 250458 - DNA, 441 bp, synthetic construct
  misc_feature 1..441: note = Description of Artificial Sequence: Synthetic coding sequence
  source 1..441: mol_type = other DNA
atggtccacttgaccccagaggagaagagcgccgtcactgccctgtggggcaaggtgaatgtggacgaagttggcggagaagcgttggggcggctcctggtggtgtacccatggactcaaagattcttcgagtcctttggagacttgtcaactccggatgcggtcatgggaaacccgaaggtcaaagcacacgggaaaaaagtcctcggagcgttctcggacggcctcgcgcacctggataacctcaagggaaccttcgcgactttgagcgaacttcactgcgacaagctgcatgtggaccctgaaaacttccgactgctgggaaacgtgttggtgtgtgtgcttgcgcatcactttggtaaggagttcaccccaccggttcaggccgcgtaccagaaggtggtggctggggttgcgaacgccctcgcccataagtaccac

SEQ ID NO: 250459 - DNA, 441 bp, synthetic construct
  misc_feature 1..441: note = Description of Artificial Sequence: Synthetic coding sequence
  source 1..441: mol_type = other DNA
atggtgcacctgacccctgaagaaaagtcagccgttacggcgctgtggggtaaagttaacgttgacgaagtggggggagaggcacttggaagattgctcgtggtctacccttggactcaacggttttttgagtcattcggtgatttgtcgaccccggatgcggtgatgggtaatccaaaagtgaaagcccacgggaagaaggtgctgggtgctttttccgacggactggcccacctggataaccttaagggaacctttgctacgctgtcagagcttcattgtgataaactccacgtggatccagaaaacttcaggctcctgggaaacgtcctggtgtgcgtgctggcgcatcatttcggaaaggaatttactcctcctgtgcaagcagcttatcagaaagtggtcgcaggtgtggcaaacgcgcttgcacataagtaccat

SEQ ID NO: 250460 - DNA, 441 bp, synthetic construct
  misc_feature 1..441: note = Description of Artificial Sequence: Synthetic coding sequence
  source 1..441: mol_type = other DNA
atggtgcatcttacccccgaagaaaagagcgcagtgactgcactctggggaaaggtgaacgtggatgaagtcggtggagaggctctgggacggctgctggttgtgtatccatggacccaacgctttttcgagtcatttggagatcttagcactccagatgcggtgatgggaaaccccaaggtgaaggcacatgggaagaaagtccttggtgcctttagtgacggactcgcccatcttgataacttgaagggcacctttgcgacgctgtcagaactccattgtgacaagctgcacgtcgatcctgagaactttcgactgctcggtaatgtgcttgtctgtgtgcttgcacaccattttggcaaagaatttaccccaccggtacaagccgcgtaccagaaggtcgtggcgggggtcgcgaacgctctggcacacaaataccac

SEQ ID NO: 250461 - DNA, 441 bp, synthetic construct
  misc_feature 1..441: note = Description of Artificial Sequence: Synthetic coding sequence
  source 1..441: mol_type = other DNA
atggttcatttaactccagaagaaaagtcagcagtcactgctttatggggaaaagttaatgttgatgaagttggaggagaggcattaggaagattattagttgtttatccttggactcaaagattttttgaaagcttcggagatttatctacaccagatgcagttatgggaaatccaaaagtaaaggctcatggaaagaaagttcttggagctttttctgatggattagctcatttagacaatcttaaaggaacttttgctactttaagtgaattgcattgtgacaaattacatgttgatcctgaaaattttagacttttaggaaatgttttagtttgtgttttagctcatcatttcggaaaagaatttacacctccagttcaagcagcttatcaaaaagttgttgctggagtagctaatgccttagctcataaataccat

SEQ ID NO: 250462 - DNA, 1083 bp, synthetic construct
  misc_feature 1..1083: note = Description of Artificial Sequence: Synthetic coding sequence
  source 1..1083: mol_type = other DNA
atgtccggcaacggaaacgccgcagcaaccgccgaggaaaactcacccaagatgcgggtgatacgcgtgggcacgcggaagagccagctggcccggatccagactgactccgtggttgcgactctcaaagctagctaccccggccttcagttcgaaatcattgcgatgtcaaccactggcgacaagattctggacaccgcgctgtcgaagatcggagaaaagtcgctgttcaccaaggagttggagcacgctctcgaaaagaatgaagtcgacctggtggtgcacagcctcaaggacctgccaaccgtcctcccaccgggattcaccatcggggccatttgtaagagggagaaccctcacgatgcagtggtgttccaccccaagtttgtgggcaagactctcgaaaccttgccggagaaatcggttgtgggaacttcaagcctgcgccgcgcggcacaactgcaaaggaaatttccacatctggagttccgttcgatcagaggaaaccttaatacgcggctgcggaagctcgacgagcagcaggaattcagcgcgatcatcctggcgactgcgggcctgcagcgcatgggttggcataaccgggtgggacagatcttgcaccccgaagagtgcatgtacgcggtcggacagggagccctcggagtggaggtccgcgcgaaggaccaggacatcttggatctcgtcggagtgctccacgatccagaaactctgttgagatgcatagctgaacgagcgttcctgcgccacctggagggcggttgttcagttccagtggctgtgcacacggctatgaaggacgggcagttgtacctgaccggcggagtgtggagcctggacggatcagattcgatccaggagactatgcaggctactatccatgtgccagcccagcacgaagatggccctgaggatgacccccaactggtggggatcaccgcacgcaatatcccgagggggccgcagctggccgcccaaaacctcggaattagcctcgcgaatctgctcctgagcaagggagccaaaaacattttggacgtggcccgccaactgaatgacgcccat

SEQ ID NO: 250463 - DNA, 1083 bp, synthetic construct
  misc_feature 1..1083: note = Description of Artificial Sequence: Synthetic coding sequence
  source 1..1083: mol_type = other DNA
atgtcgggaaacggaaacgcagccgcaactgcagaagagaacagcccgaagatgagagtgatccgcgtgggcacgcgcaagtcgcagctggcaagaatccagacggactccgtggtggctaccctcaaggcgtcctacccggggctgcaattcgagatcatcgcgatgtccactaccggagacaaaatcttggacaccgccctctcaaagatcggagagaaatcgcttttcaccaaggaactcgaacatgcccttgagaaaaatgaggtcgatctcgtggtgcactccctgaaggatctcccgactgtgctgccaccaggcttcactatcggagccatttgcaagcgtgaaaacccccatgatgccgtggtgtttcacccgaagttcgtgggaaagaccttggaaacgctgccggaaaaatcagtggtgggaaccagctcgctccgccgcgctgcacagcttcaaaggaagttcccgcacctggagttccgctccattagaggaaatctgaacactaggctgagaaagctggacgaacaacaagaatttagtgcaattatcctcgctactgcggggctccagcgcatgggctggcataatagagtcggtcagattctgcatccagaagagtgcatgtacgcggtgggacagggagcgctgggcgtggaggtgcgcgctaaagatcaagatatcctggacctggtcggcgttttgcacgacccggaaaccctgctccggtgtatcgcagagagggcattcttgcggcacctcgaaggggggtgttctgttcccgtcgccgtgcacacggcaatgaaggacggtcagctgtaccttaccggcggagtttggagcctggacggatcggatagcatccaggagactatgcaggcaaccatccatgtgcctgcccagcacgaggacggacctgaggacgatcctcagctggtaggcatcactgcaaggaacatcccgcgtggaccacagctggccgctcaaaatctgggaatttctctggcgaatcttctcctttccaagggtgcgaaaaacatcttggacgtagcccggcaactcaacgatgctcac

SEQ ID NO: 250464 - DNA, 1083 bp, synthetic construct
  misc_feature 1..1083: note = Description of Artificial Sequence: Synthetic coding sequence
  source 1..1083: mol_type = other DNA
atgtcaggtaatgggaacgcggcagcgaccgctgaagaaaactccccgaagatgagggtaattcgcgtcggaacccggaaatcccagctggcgcggatccagactgactccgtggttgccaccctcaaggcatcataccctggcttgcagtttgagatcatcgcaatgtccactaccggcgacaaaatcctcgacacggcgctgtcaaagataggagagaaaagcctgttcactaaagaattggaacacgcgctggagaagaatgaagtcgacctcgtggtgcattcgcttaaggacttgcctactgtcctgccgcccggttttactatcggcgccatctgcaaacgtgaaaacccacacgacgcagtggtgtttcacccgaagtttgtgggaaagacccttgaaactttgccagaaaagagcgtcgtcggaaccagcagcctgagacgggctgcccaattgcaaaggaagttcccgcatctcgaattccgctccatccggggcaacctgaacacgcggctgcgcaagttggatgaacaacaggagttctcagcgatcattctggcgaccgcaggtctgcaacgaatgggatggcataatcgcgtgggacaaattcttcacccagaggagtgcatgtacgccgtaggacagggagctctgggcgtggaagtgcgagctaaagaccaggacatcctcgacctggtgggggtcctccatgatccggagacgctcctgcgctgtatcgcagagagagcgttcctccgccatctggaggggggatgcagcgtgccagtggccgtccacactgccatgaaagatggacagctctaccttaccggaggtgtgtggtccctggacggttcagattcaatccaagagactatgcaggctactatccacgttccggctcaacacgaggacggaccggaagatgatccgcaacttgtcggaattacggcacgcaatatcccgagagggccccaattggctgcccagaatcttggaatcagtctggccaacctcctgctgtctaagggagcgaagaacatcttggacgtcgccagacagctgaatgatgctcac

SEQ ID NO: 250465 - DNA, 1083 bp, synthetic construct
  misc_feature 1..1083: note = Description of Artificial Sequence: Synthetic coding sequence
  source 1..1083: mol_type = other DNA
atgagcgggaatggtaacgccgcagccactgctgaagaaaactcgcccaaaatgagagtgataagggtgggcactcgcaaaagccaactcgctcgtattcagactgattcagtggtggcaacactgaaggcaagttatccggggctgcagtttgagatcattgccatgagcaccaccggagataagattcttgatacagctctaagtaagattggtgagaagagcctgttcaccaaggaactagagcacgcactggagaagaatgaggtagacctagttgttcactcactaaaagatctcccaactgtcctgccgcccggatttactatcggagctatatgcaagcgggagaatccccacgatgctgttgtgttccaccctaagtttgtcggaaaaaccctggaaacgctgcccgaaaagagcgtggttggaacatctagcctgcgcagagcggctcagcttcaacgcaaattcccacaccttgagttcagaagcattagaggcaatctgaatacccggctccgaaaattagatgagcagcaggaattttctgctattatcctggctactgctggactgcagaggatggggtggcacaatcgagtcggccagatactccatccagaggaatgtatgtacgcagtagggcagggcgcccttggagttgaagtgcgggcgaaggatcaggatattctggacctagtaggggtgttgcacgatcccgagacccttctaagatgcatagctgaacgtgccttccttcgccatctggagggggggtgttcggtccccgtcgcagtgcacaccgcgatgaaagatggtcaattatacttaacagggggcgtgtggagtctcgacggctctgacagcattcaggagaccatgcaagccactatccatgtccccgcgcaacacgaagatggaccagaggatgatccccaactggtcggaattacagctagaaacatccctaggggaccccagctcgctgcccaaaacttaggcatatcactcgccaatctgctgttgtctaaaggtgccaagaatattctggacgtggcccggcagctgaatgatgcgcat

SEQ ID NO: 250466 - DNA, 1083 bp, synthetic construct
  misc_feature 1..1083: note = Description of Artificial Sequence: Synthetic coding sequence
  source 1..1083: mol_type = other DNA
atgtcgggaaatggaaacgctgctgcaaccgccgaagaaaactcgccgaaaatgagagtgatcagagtcggaactaggaagtcccagctcgcgcgcatccaaaccgacagcgtggtggcaacgctcaaggcgtcgtacccaggattgcaattcgaaatcatcgctatgagcactactggggacaagatccttgataccgcgctgtcgaagatcggagaaaagtccctgtttactaaggaactggaacatgcactggaaaagaacgaggtggacctggtcgtccactcactgaaggacctgccgaccgtgctcccgccgggattcacgatcggggcgatctgtaaacgcgaaaatccgcatgatgccgtggtgttccacccaaagttcgttggcaaaaccctcgagactctcccagagaagtccgtcgtggggacctcatcgctcaggcgggccgcccagctgcagcgcaagtttccgcacttggaattcagatccattcggggaaacctgaatactcggctgcgcaagctggacgagcagcaggaattttctgcgatcatcctcgctaccgcgggacttcagcggatgggatggcataaccgcgtgggacaaatactgcatcctgaggaatgcatgtacgccgtgggccaaggagcgctgggtgtcgaggtgcgggccaaagatcaggatattctggatttggtgggcgtgctgcacgaccctgaaactctcctgaggtgcatcgctgagcgcgccttcctccgccaccttgagggaggttgcagtgtcccagtcgcagtgcacaccgcgatgaaagacggacaactttacctgaccggcggagtgtggagcctcgacgggagcgattccatccaagagactatgcaggccacgatccacgttcctgcacaacatgaggatggcccggaggacgacccccagttggtgggcattaccgcccggaatatccccagaggcccacagctcgccgcccagaacctgggtatttcactggccaatcttctcctgtcgaagggtgcaaaaaacatcctggacgtcgcccgacagctgaacgatgctcac

SEQ ID NO: 250467 - DNA, 1083 bp, synthetic construct
  misc_feature 1..1083: note = Description of Artificial Sequence: Synthetic coding sequence
  source 1..1083: mol_type = other DNA
atgtctggaaatgggaacgccgcagctaccgccgaggagaactcacctaaaatgagagtaatccgcgtgggtaccaggaagagccaattggctcgaattcagacggattcggtggtggccacgctgaaagcctcttaccctggcctgcagttcgagattatagccatgtcaaccacgggggacaaaatcctcgacactgctctgagcaaaattggggagaagagtctgtttaccaaagagctagagcacgcattagaaaaaaacgaagtggacctggtagtgcattccctgaaagacctacctactgtgctgccgcccggttttacgattggcgcgatctgcaaacgagagaacccgcacgatgctgttgtgtttcacccaaaattcgtggggaaaaccctagagacgctgccggagaagagcgtagtgggtacctctagccttcggagagctgcgcagctgcagaggaaattcccccacctggagtttcgatcaataagaggtaatctcaacacacgactcaggaagctcgacgaacagcaggagttcagcgccatcatactcgccaccgccgggctgcagcgcatggggtggcacaatcgtgtggggcagatcttacacccagaagagtgtatgtacgctgtcggccaaggcgctttgggagtggaggtgagagctaaggatcaggacatcctcgacctagtaggggtgcttcacgatcccgaaaccttgctgagatgcatagccgaacgggcatttttacgccatttggaaggcggctgtagtgtgcccgtcgcagttcataccgccatgaaagatggtcagctgtacctgaccggtggtgtctggtccctggatggttccgacagtattcaagaaacgatgcaggctaccatccacgtccccgctcagcacgaagatggacctgaggatgacccccagttagtgggtatcaccgctcgcaatattcctcgaggccctcaactcgcagcccagaacctaggtatctccctggccaacctgctactcagcaagggcgccaaaaacatcctagacgtggcgcgccaattaaatgatgcccat

SEQ ID NO: 250468 - DNA, 1083 bp, synthetic construct
  misc_feature 1..1083: note = Description of Artificial Sequence: Synthetic coding sequence
  source 1..1083: mol_type = other DNA
atgtcgggcaatggtaacgccgccgctaccgccgaggaaaattcgcctaaaatgcgtgtgatccgtgtggggaccagaaagagccagctggcacgcatccagacagactctgtggtagcgactctgaaagccagctatcctggactccaattcgagatcattgctatgagcaccacaggagacaagatccttgacacagcgctatccaaaatcggcgaaaaatcactttttactaaagagctcgagcatgctcttgaaaagaacgaggtcgacctggttgtccacagtctgaaggacctccctactgttctgccgccagggtttaccattggagctatttgtaagcgggaaaatccccatgatgccgtcgtgttccatcctaagtttgtgggcaagactctcgagacactgccagagaaatctgtagtcggaacatcttcccttcggcgcgccgctcagcttcagagaaagtttccacacctagaatttaggagtattaggggcaatcttaacactagactacggaaattggacgaacagcaggaattcagtgccatcatcttggctaccgccggactgcagcgaatgggttggcataaccgagtcggacagattctacaccccgaggaatgcatgtatgccgtcggccaaggtgctctgggggtagaagttcgcgctaaggaccaggatattctagatctagtgggcgtcctgcatgaccctgagacactgctccggtgcatcgctgaaagggccttcttgcgacacctggaggggggctgttcagtgccagtggctgtgcatacagcgatgaaggatggccagctctatcttacagggggtgtgtggtcactcgacggaagcgatagcatccaagaaacgatgcaggccactattcatgtgcctgctcagcacgaggatggtccagaagacgatccacaactggtgggcataactgcccggaatatccccaggggcccacagctcgccgctcaaaatttgggcatctctcttgccaatctactgctgtcaaaaggagcaaaaaatattctcgatgtggcccgccagctcaacgatgcgcat

SEQ ID NO: 250469 - DNA, 1083 bp, synthetic construct
  misc_feature 1..1083: note = Description of Artificial Sequence: Synthetic coding sequence
  source 1..1083: mol_type = other DNA
atgtccgggaacggaaacgcagctgcaaccgccgaagaaaattcgccgaagatgagagtgattcgcgtgggtactcgaaagtctcagcttgcacgaatacaaactgactcggtggtggcaaccctcaaggcgtcctatccggggttgcaattcgagattatagcaatgtccactacgggcgataagattcttgataccgccctttccaaaatcggggaaaagagcctgtttaccaaagaattggaacacgcattggagaaaaatgaagttgatctggtggtgcattcccttaaggatctgccaactgtgcttcccccggggtttactataggagcaatttgtaagcgggagaacccgcatgacgccgtggtgtttcatccgaaatttgtgggtaagacgctggaaacccttcctgaaaagtccgtcgtgggaaccagctccttgaggcgtgcagcacaacttcagagaaagttccctcacctcgaattccgatcaatccggggtaacctcaatacccgcctgcgaaaactggatgagcagcaagaattctcagctatcattttggctacggccgggctccaacggatgggatggcacaaccgggtcggccagatccttcaccctgaagaatgcatgtacgccgtgggtcagggagctctgggagtcgaggtgcgcgccaaagaccaagacattcttgatctcgttggagtgctgcacgatccggagactcttctgagatgtattgctgagagagcgttcctgcggcatctggaaggcggctgttcggtccctgtggcagtccatactgcaatgaaggacggacagctttaccttaccggtggagtctggagccttgacgggtctgactcgattcaggagactatgcaggcaaccattcatgtgcccgcgcagcacgaggatggaccagaagatgacccccaactggtcggtattaccgcgcgcaacattccccgcggacctcaactcgcagcccagaaccttgggatatccctcgcgaacctgcttctgtcaaaaggtgccaagaacatcctggatgtggcacgccagctcaacgatgcacat

SEQ ID NO: 250470 - DNA, 1083 bp, synthetic construct
  misc_feature 1..1083: note = Description of Artificial Sequence: Synthetic coding sequence
  source 1..1083: mol_type = other DNA
atgagcggtaatggtaatgccgccgctacggccgaagaaaattccccaaaaatgagagtgatccgcgtcggcaccagaaagagccagttggcaagaatacagacggattcagtggtggccactctcaaggcatcctaccccggactccagtttgagatcatcgccatgtctacaaccggcgacaaaatattggacacagcactctccaagatcggtgagaaatctcttttcacgaaagagctcgaacatgccctcgaaaaaaacgaagtcgacttggtcgtgcactcactcaaggaccttccgactgtgttgccgccgggattcaccattggagcaatctgtaagcgcgagaacccgcacgatgctgtcgttttccacccaaaattcgtaggaaaaactttggagacgttgccggaaaagtcagtagtgggtacatcttctctccgccgcgccgcacagctgcagcgcaagttcccacatttggagtttaggtccattcgcggcaatctcaacacccgcctcagaaaactggacgagcagcaagagttttccgccattattttggccactgctggtctccagcgcatgggttggcacaatcgcgtgggacagattctccatcccgaggagtgcatgtacgcagtgggtcagggagcccttggcgtagaagtcagggctaaagaccaagatatccttgacctcgtcggagtgctgcacgatcctgagacactgctcagatgtatagccgagagggcttttctgaggcacctggaaggtggctgtagcgtgccagtcgccgtgcacacggcaatgaaagacggccagctctacttgacaggaggcgtatggagcctggacggatctgattcaattcaggaaaccatgcaggccaccatccacgttcccgcccagcatgaggacggcccagaggacgaccctcagctggtcggtatcaccgcccgcaacatccctcgcggtccccagcttgcagcgcagaatctcggtatcagcctcgccaatttgctcctgtccaaaggagctaagaacatccttgacgtggccaggcaactcaatgatgctcac

SEQ ID NO: 250471 - DNA, 1083 bp, synthetic construct
  misc_feature 1..1083: note = Description of Artificial Sequence: Synthetic coding sequence
  source 1..1083: mol_type = other DNA
atgagcgggaatgggaacgcagccgccacagcagaagaaaacagccccaaaatgcgcgtgatcagagtgggaactcggaagagccaactggcccggatccagaccgattccgtggttgccacacttaaagcttcatatcccggcctgcagttcgaaatcatagctatgtccaccacgggcgacaagatcctcgatacggcgctgtccaagatcggcgagaagagcctgttcaccaaggagttagagcacgctttggaaaagaacgaggtggatctagtagtccattctcttaaagacctgcccactgtactgcctcccggcttcacgatcggagcgatttgtaaacgggagaatccgcacgacgccgtagtttttcatcccaaattcgtgggcaaaactctggagacactgcccgagaaaagcgttgtcggaacaagttctctgaggcgtgctgcgcagctccagcgcaagtttccgcatcttgaatttaggtcaataaggggtaacctgaacacacgccttcggaaattggatgagcaacaggaatttagtgcgatcatcctggcgacagctggcctgcagagaatgggatggcataatcgggtgggccaaattctgcaccccgaggaatgcatgtacgctgtaggccaaggtgccctaggcgttgaagtcagggctaaagaccaggacatcctagacctggtgggggtgctgcatgatcccgaaacccttttacggtgcatcgctgaacgtgcatttctacgccaccttgagggcggatgcagtgtccctgttgccgtgcacactgctatgaaggacgggcaactctacctcaccgggggtgtgtggagtctcgacggctcggacagcattcaggagaccatgcaggccactatccatgtcccggcacaacacgaagacgggccagaggacgatccacaactggttggcatcaccgctcgcaatatccccaggggcccacaactcgctgcccagaatctcggaatttcacttgcaaacctcctcctcagtaagggtgccaagaacattcttgatgttgcccggcaactgaatgatgcacac

SEQ ID NO: 250472 - DNA, 1083 bp, synthetic construct
  misc_feature 1..1083: note = Description of Artificial Sequence: Synthetic coding sequence
  source 1..1083: mol_type = other DNA
atgtcgggaaacggaaacgcggccgcaaccgcagaagagaattctccaaagatgcgagtcatcagggtgggtacgcgcaaatcgcaacttgcccgtatccagactgatagcgttgttgcaactctgaaggcaagctaccctggattgcagttcgagattattgcaatgagcaccacgggcgataagatacttgacactgccctgtccaagattggcgaaaaatccctcttcactaaggaactggaacacgcactcgaaaagaacgaagtggatctcgtcgtgcattcgttgaaggatctgcctaccgtccttccaccaggctttacgatcggagcaatctgcaagagagagaaccctcatgacgcagtcgtgtttcaccctaagtttgtcggaaaaacccttgagactcttccagagaaatccgttgtgggaaccagcagcttgagaagggccgcacagctccaaagaaagttcccgcaccttgagtttcggtcaatacgaggcaatctcaatacgcggctgagaaagctggatgagcagcaagaattctcggcgattattctggcaaccgcgggcctgcaacgtatgggttggcataatcgggtgggtcagatccttcacccggaggaatgtatgtatgcagtgggacaaggagctctgggagtcgaagtgagggctaaggaccaggacatactcgatctggtgggggtcttgcatgatcctgaaactctgctccgatgtattgcagagcgtgcatttctgcgccaccttgagggtggatgttcggtgcctgtggcagtgcataccgctatgaaagacggccagctttaccttaccggtggtgtctggtccctggatgggtctgactccatacaagaaacgatgcaagcaactattcacgttcctgcccagcatgaggacggtcccgaagatgaccctcagttggtgggtataaccgctcggaatattcccagaggtccacagcttgcggcacaaaaccttggaattagcctcgccaatctcctgctgtcgaaaggtgctaagaacatcctggacgtggcacgccaactgaacgatgcccat

SEQ ID NO: 250473 - DNA, 1083 bp, synthetic construct
  misc_feature 1..1083: note = Description of Artificial Sequence: Synthetic coding sequence
  source 1..1083: mol_type = other DNA
atgtcaggcaacggcaatgctgctgcaaccgcggaggagaactcgcctaaaatgagagtgatccgagtggggacgaggaagtcacaactggcccggatccagaccgatagcgtggtggcaacccttaaggctagctacccaggccttcagtttgagatcatcgccatgagtaccaccggagacaagatcctggacactgccctctcgaaaatcggcgaaaagtcgctgtttactaaggaactcgaacatgcgctggagaaaaacgaagtggatttggttgtgcacagccttaaggacctcccaactgtcttgccgccgggattcaccatcggagcgatttgtaagagggagaatccgcatgacgcggtggtgttccatcctaagttcgttggtaagactctcgagactctgcccgaaaaatccgtggtgggaactagctccctcaggcgggccgcgcaattgcagcgcaaattcccgcatctcgaatttagatccattcgcggcaacttgaacaccagactgcgcaagctcgatgagcagcaggagttctcagccatcatcttggcaaccgcaggattgcagcggatgggctggcacaaccgcgttggtcaaatcctccaccccgaggaatgcatgtacgccgtcggacagggagccctcggagtggaggtcagagcaaaagaccaagatattcttgatctggtcggagtgctgcacgaccctgaaactcttctccgttgcatcgcggaacgtgctttcctccggcatctggaaggcggctgttccgtgccagtggccgtccatacggcaatgaaagacggccagctgtacctgactggcggggtctggtcacttgacggttcggactcgatccaggagactatgcaagcaacgattcatgtgcctgcgcaacatgaggacggtcctgaggacgatccgcagttggtcggcatcaccgccagaaacattccgaggggaccacagctggcggcgcaaaaccttggcatctccctggcgaatctgctgctttctaagggagccaagaatattctggacgtggccagacagctcaacgatgcacat

SEQ ID NO: 250474 - DNA, 1083 bp, synthetic construct
  misc_feature 1..1083: note = Description of Artificial Sequence: Synthetic coding sequence
  source 1..1083: mol_type = other DNA
atgagtggcaacggtaatgcggccgctaccgccgaggagaactcgccgaagatgcgggtcatccgcgtcggcacccgtaaatcccagctggcccgcatccaaactgactccgtggtcgcgaccctaaaggcatcatacccgggtctgcagttcgagattatcgcgatgagcacgaccggcgacaagatccttgacactgcactgtccaagatcggcgagaagtcactcttcacgaaagaactcgaacatgccctggagaagaatgaggtggatcttgttgtgcactccttgaaggatcttcctaccgtcctcccgccgggtttcaccattggtgcaatatgcaaacgggagaacccgcatgatgccgtggtgttccaccccaagttcgttggcaagacgctggagactctccccgagaagagtgttgttgggacctcatctctgcgtcgcgccgcccagctccaacgcaaattcccccacctggagttccgcagcattcgcggtaatcttaacacacgcctccgaaaactggatgaacagcaggaattttcggccattatcctcgcgacagcgggccttcaacggatgggatggcacaaccgcgttggccagatcctccacccggaggagtgcatgtacgcggtcggccaaggcgcgctcggagtcgaggttcgcgcaaaggaccaggacatcttggatcttgtaggtgtgctccacgaccccgagaccctgctccgctgcatcgctgagcgtgccttccttcggcacctcgagggaggttgcagcgtcccagttgctgtccacacggcaatgaaggacggtcagctgtatctcaccggaggcgtttggtccctggatggatccgattctattcaggagaccatgcaggcgaccatccacgtgccggcgcagcacgaggatggaccggaggatgacccacagctcgtaggcatcacggctcgtaacattccgaggggtccgcagctcgccgcgcaaaacctcggtatatcattggcaaacctgctcctgtccaagggagctaagaacattcttgatgtcgctcgtcagctgaatgacgctcac

SEQ ID NO: 250475 - DNA, 1083 bp, synthetic construct
  misc_feature 1..1083: note = Description of Artificial Sequence: Synthetic coding sequence
  source 1..1083: mol_type = other DNA
atgtcaggcaacggtaacgcggccgcgactgcggaagaaaatagcccaaagatgagggtgatccgcgtcggaacgcggaagtcgcaactggctcggatccaaaccgattcagtcgtggcaaccctcaaagcgtcgtaccccggactccagttcgaaatcatcgccatgtccaccactggcgataagatcttggacaccgctctgtccaaaatcggcgagaagtcattgtttaccaaggagttggaacacgccttggagaaaaacgaagttgacttggtggtgcattcgctgaaagacctccctaccgtcctcccgccaggattcacgatcggcgctatctgcaagcgggagaaccctcacgacgccgtcgtattccatccaaagttcgtaggaaaaacgctcgaaactctcccagagaagtcagtggtcggtacctcctccctgagaagagcggcccaactgcagagaaagttcccgcatctggagtttaggtcaatccgggggaacttgaataccaggctgcgaaaactggacgagcagcaggagttctcggcgattatcctcgccactgccggcctgcaacgcatgggatggcacaaccgggtgggacaaattcttcaccctgaagaatgcatgtacgcagtgggacaaggcgcactcggagtggaggtgcgcgctaaggaccaagatatcctggatctggtgggcgtgctccacgatccggaaactctgctgaggtgcatagctgaaagagcattcctccgacacttggaaggaggatgtagcgtgccggtcgccgtgcacaccgctatgaaagacggtcagctgtacctgaccggtggagtgtggtccctggatgggtcggatagcattcaggaaactatgcaggcgactatccacgtgccagcacaacatgaggatgggccggaggacgacccgcagcttgtggggattactgctcgtaatatccctcgcggtccgcagctcgcggcccagaacttgggcataagcctcgcgaatctcctgctgtctaagggtgctaagaatatactggacgttgcccgccagctgaacgacgctcat

SEQ ID NO: 250476 - DNA, 1083 bp, synthetic construct
  misc_feature 1..1083: note = Description of Artificial Sequence: Synthetic coding sequence
  source 1..1083: mol_type = other DNA
atgagtggaaacggcaacgcagcggccaccgccgaagagaatagtcctaaaatgagggtgatccgtgtcggtaccaggaagtctcagctggctcgcatacaaacagatagtgtggtggctactctgaaggccagctatccaggccttcaatttgagattatagccatgagcaccaccggggataagatccttgacaccgctttgtcaaagatcggcgaaaagtctctattcactaaggaactggaacatgcacttgagaagaacgaggtggacctcgtggtgcactctttgaaggatctgcctacagtgcttcccccgggatttactattggagcaatttgtaagcgcgaaaaccctcacgatgcagtggtgtttcaccctaaattcgtgggcaaaacattagagaccttgccagaaaagagcgttgtgggcacatctagcttgaggcgcgcagctcagctccaacggaagttcccacacctagagtttcggtccatcagagggaacctgaatacccgcctgcgtaaactcgatgagcagcaggagtttagtgcaataatcttggctaccgctggactccagcggatgggatggcacaacagggttggacagatcctgcatccagaagagtgcatgtatgccgtgggacagggagcactgggggtggaagtcagagccaaagaccaggacatcctcgatctggtgggtgtcctgcatgacccagagaccctgctcaggtgcatcgctgagagggcattcctgcggcatctggaagggggctgcagcgtgcctgtggctgtccatactgctatgaaggacggccagctgtatctaaccgggggcgtatggagcctggatggatccgacagtatccaggagacaatgcaggcaactatccatgtgccagcccagcacgaggatggacctgaagatgatccacagctcgtggggattacagcaaggaatatccctaggggaccacagcttgctgcgcaaaacctggggatctcactggcaaacctgcttcttagcaaaggagctaaaaatatactggacgtcgctaggcagctgaatgacgctcac

SEQ ID NO: 250477 - DNA, 1083 bp, synthetic construct
  misc_feature 1..1083: note = Description of Artificial Sequence: Synthetic coding sequence
  source 1..1083: mol_type = other DNA
atgtcgggtaatggtaatgcggcggcgacggcggaagaaaattcgccgaaaatgcgtgtaatacgagttggtacgcgaaaatcgcaattagcgcgaatacaaacggattcggtagtagcgacgctaaaagcgtcgtatccgggtttacaatttgaaataatagcgatgtcgacgacgggtgataaaatattagatacggcgttatcgaaaataggtgaaaaatcgttatttacgaaagaattagaacatgcgttagaaaaaaatgaagtagatttagtagtacattcgttaaaagatctaccgacggtattaccgccgggttttacgataggtgcgatatgtaaacgagaaaatccgcatgatgcggttgtatttcatccgaaatttgtaggtaaaacgttagaaacgttaccggaaaaatcggttgtaggtacgtcgtcgttacgacgtgcggcgcaattacaacgtaaatttccgcatttagaatttcgttcgatacgtggtaatttaaatacgcgactacgaaaattagatgaacaacaagaattttcggcgataatattagcgacggcgggtctacaacgtatgggttggcataatcgtgtaggtcaaatactacatccggaagaatgtatgtatgcggtaggtcaaggtgcgctaggtgtagaagtacgagcgaaagatcaagatatattagatttagtaggtgtattacatgatccggaaacgttattacgttgtatagcggaacgtgcgtttctacgtcatctagaaggtggttgttcggtaccggttgcggttcatacggcgatgaaagatggtcaactatatttaacgggtggtgtatggtcgttagatggttcggattcgatacaagaaacgatgcaagcgacgatacatgtaccggcgcaacatgaagatggtccggaagatgatccgcaactagtaggtataacggcgcgaaatataccgcgaggtccgcaattagcggcgcaaaatttaggtatatcgttagcgaatctattattatcgaaaggtgcgaaaaatatactagatgttgcgcgtcaactaaatgatgcgcat

SEQ ID NO: 250478 - DNA, 1083 bp, synthetic construct
  misc_feature 1..1083: note = Description of Artificial Sequence: Synthetic coding sequence
  source 1..1083: mol_type = other DNA
atgagcggaaacggtaatgctgcagctacagccgaggagaattcccctaagatgcgcgtgatccgcgtgggtacacgtaagagccagctggcacgcatccaaaccgactccgttgtggcaacactcaaggcctcctaccccggtcttcaattcgaaatcatagccatgagcaccactggcgacaaaattcttgataccgctctgtctaaaattggagaaaagagcctctttacaaaggagctggagcacgccctcgagaagaatgaggtggatctcgtcgtacactccctgaaggatttgcctacagtgcttcctcccggttttaccatcggagcaatctgtaaacgtgagaacccacacgatgctgttgtgttccatcccaaattcgtgggtaagacccttgaaacactgccagagaagagtgtggtcggtaccagttctcttcgtcgtgccgcacagctgcagagaaaattccctcacctggagtttcgctcaatccgcggcaacctgaatacccgtcttcgcaagctggatgaacagcaagagttttcagctattatcttggccacagccggcctgcagaggatgggatggcacaaccgcgtgggacagattctgcaccctgaggaatgcatgtatgccgttggccaaggagctcttggcgtcgaagttagagctaaggatcaggacatcttggacctggttggcgtgttgcacgacccagagaccttgctgagatgtattgcagaaagggcattcttgcgtcacctcgagggcggttgctcagttcctgttgcagtacacaccgctatgaaggatggccagctgtatctgaccggaggagtatggtccctggacggatctgactcaatccaagaaaccatgcaggctactatccatgttcccgcacagcacgaagatggcccagaagacgacccccagctggtgggcatcactgcaagaaatattcctagaggtccacagcttgctgcacagaacctgggaatcagcttggcaaatttgttgttgtccaaaggagcaaaaaatattctggatgtggctaggcaactgaacgatgctcat

SEQ ID NO: 250479 - DNA, 1083 bp, synthetic construct
  misc_feature 1..1083: note = Description of Artificial Sequence: Synthetic coding sequence
  source 1..1083: mol_type = other DNA
atgtccggtaacggtaatgcagccgcaactgcagaagaaaattcccccaagatgagggtcataagggtgggaaccaggaaatcccagctggcacgcattcagaccgatagcgtggtggcgacgctgaaggcctcctatccaggcctgcaatttgagattatcgcgatgagcactaccggtgataagatccttgacactgccctgtcaaagatcggagaaaagagtctttttacgaaggaacttgaacacgctctcgagaagaacgaagtggatcttgtggtgcattcactgaaggatcttccaaccgtcctgccgcctggcttcaccataggtgcaatctgcaagcgagaaaacccacatgatgccgtggtgtttcacccgaagtttgtggggaaaactcttgaaaccctgcctgaaaagtcagtggtgggaacgtcaagcctgcgtcgtgcagcacaactccagcgcaagttcccgcatctggaatttcgttccatacgaggtaaccttaacacgcggcttcgcaaactggatgagcaacaggaattcagcgcaatcattctggcgactgccggtctgcaacgtatgggatggcataaccgcgtgggacaaatactccaccctgaagagtgtatgtacgccgtgggacaaggggcattgggagtggaggtccgagcaaaggaccaagatattctggacctcgtcggcgtccttcatgacccagaaactctccttcggtgtatcgcagagcgcgcgttcctccggcatcttgaggggggatgttccgtccccgtcgcggtccacaccgcaatgaaagatggtcagctgtatctgactggtggggtgtggagcctcgatggctctgactcaattcaagagactatgcaagcaaccattcatgttcccgcacagcatgaggacggacctgaagatgatcctcaactggtgggcattaccgctcggaatattcctagaggcccacaattggcagctcagaacctgggtatctccctcgcaaatcttttgttgtctaaaggcgcaaaaaacattttggacgtcgcccgccagctgaatgacgctcat

SEQ ID NO: 250480 - DNA, 1083 bp, synthetic construct
  misc_feature 1..1083: note = Description of Artificial Sequence: Synthetic coding sequence
  source 1..1083: mol_type = other DNA
atgtccggaaacggaaacgcggcagcaaccgccgaagagaatagcccaaagatgcgagtgatcagagtcggtacccgtaagtcgcaactggcaagaatccagactgattcggttgtggccactctcaaggcctcatacccaggtttgcagttcgaaatcatcgcaatgtccaccactggagacaagatattggatactgccctcagtaagataggagaaaagagtctctttactaaagagctcgagcacgccctcgagaaaaatgaagtagaccttgtggtccatagcttgaaggatctgcctaccgtgttgcctccgggctttaccataggcgcgatttgcaaacgcgaaaatccccacgatgctgtggtgtttcacccgaagtttgtcggcaagacgcttgaaacgcttccagaaaagtcggtggtcggtaccagctccctccggcgagcagcccagctgcagaggaagtttccacacctggaattcaggtcgataaggggcaatcttaacactagactgagaaagctcgacgagcaacaagaattttccgcgatcattctggccaccgcaggtctgcagcgcatggggtggcataatcgcgtgggtcaaattcttcatccagaagagtgcatgtacgcggtgggccaaggcgcactgggagttgaagtccgagctaaggatcaagacatccttgatctggtgggagtcctccacgatcctgaaacccttttgagatgtattgctgagcgggcattccttcggcatctcgaaggtgggtgttcggtgcccgtggcagtccacactgcaatgaaggatgggcaactctacctcaccggcggagtgtggtcacttgatggttccgacagcatccaagaaactatgcaggctaccatccatgtgcccgcccagcatgaggatggtccagaagatgatccacaacttgttggtattacggcacgaaacataccccgcggtcctcagcttgccgcacaaaacctgggcatttccctcgcaaaccttctgcttagcaagggagctaaaaacattcttgatgtcgcacgacaactgaacgacgcccat

SEQ ID NO: 250481 - DNA, 1083 bp, synthetic construct
  misc_feature 1..1083: note = Description of Artificial Sequence: Synthetic coding sequence
  source 1..1083: mol_type = other DNA
atgagcggcaacgggaacgctgcggcgacggctgaagagaactccccaaagatgagagtcattagagtgggaacccgcaagtcgcagctggcaagaattcagaccgattcagtggtggccaccctgaaagccagctacccaggattgcaattcgagatcatcgccatgagcacgactggtgataagatccttgacactgccctgtcaaaaatcggggaaaagtcgctgtttaccaaagaactggagcacgcgttggaaaagaacgaagtggacttggtggtccattccctgaaggacttgccaaccgtcctgccacctggattcactatcggagcgatttgcaagcgcgaaaaccctcatgacgccgtggtgttccaccctaagttcgtcggcaagactctcgaaaccctgccggagaagagtgttgtgggcacttcctcgctgcggagagcggcccagcttcagagaaagtttccgcatctggaatttcgctcgatcagagggaacctcaacacccgcctgagaaagctggacgaacagcaagaatttagcgccatcatcctcgcgactgccggtctgcaaaggatgggatggcacaatcgggtgggtcaaatcctccacccagaggagtgcatgtacgcagtcggacaaggagccctgggagtggaagtcagagccaaggaccaggatatcctcgacctggtgggtgtgctccacgatcctgagactctgcttcgctgtatcgcagaaagggccttcttgcgacacctggagggaggatgttccgtgccggtcgctgtgcatactgccatgaaagatggccagctgtacctgacgggtggagtctggagcctggacggttccgactcgattcaggaaaccatgcaagcgactatccacgtgccagcgcagcatgaggacgggcctgaggacgatccgcaactcgttggcatcaccgcccgtaacatcccgagaggtccgcagctggccgcgcaaaacctcggcatttcgctggcaaatctcttgctctcaaagggagctaagaacatcctggacgtggctcggcagctgaatgacgcgcat

SEQ ID NO: 250482 - DNA, 1083 bp, synthetic construct
  misc_feature 1..1083: note = Description of Artificial Sequence: Synthetic coding sequence
  source 1..1083: mol_type = other DNA
atgtccgggaatgggaacgcagcagctaccgcagaagaaaacagtcccaaaatgcgcgtcatccgggttggcacaaggaagtcccagctagccaggatccagaccgacagcgtggtagcaacactgaaagctagctaccccggactgcagttcgaaatcatcgcaatgagtactactggcgataaaatactggacactgctttatcaaagattggcgaaaagtccctgttcactaaggaactggaacacgcactggaaaaaaacgaagtcgacctcgttgttcatagtctaaaagatctgcctacagttctgcctccaggttttactataggcgcaatttgtaaacgtgaaaatccccacgacgccgtggtctttcaccctaagtttgtgggcaagaccttagaaacactacctgagaagtctgtggtgggcacaagcagtttaagacgggcagcccagctccagcggaagttccctcacctggagtttagatcaatacggggcaacctgaatactcgactgaggaagcttgatgagcagcaggagttttccgctatcatactcgccacagcaggactgcagagaatgggctggcataatcgcgtcggtcaaatcctgcaccctgaggagtgtatgtatgccgtgggccagggcgccctgggtgttgaagttcgcgccaaagaccaggacatactcgatctcgtcggtgtcctgcatgaccccgaaacactacttcggtgtatcgctgagcgggcattcctccgtcacctggaggggggatgcagcgtgcctgttgctgttcacaccgcaatgaaggacgggcaactgtatctgactggaggcgtctggtctctcgacggctctgatagtatccaagaaactatgcaggctacaatccacgtaccagcccagcatgaagatggccctgaagatgaccctcaactagtggggatcacagcacgtaacataccaagggggccccagctggccgcacagaatctgggcataagtcttgccaacctgctcctctccaagggtgccaagaacatcctcgatgtcgcaagacaactcaatgacgcccac

SEQ ID NO: 250483 - DNA, 1083 bp, synthetic construct
  misc_feature 1..1083: note = Description of Artificial Sequence: Synthetic coding sequence
  source 1..1083: mol_type = other DNA
atgtccggcaatggaaacgccgctgcaacggcagaggaaaacagccccaaaatgcgcgtcattcgagtaggcacccgaaagagccagttggcccgtattcagaccgattctgtggttgccacattgaaagcgtcttatccgggattgcaattcgaaattatagctatgtctactactggagataaaatactggacaccgcactatctaaaatcggggagaaaagcctcttcacaaaggagctggagcatgccttggaaaaaaacgaggtggatctggtggtgcactccctaaaggacctgcctacagtgctgccacctggattcactatcggggccatatgtaaaagagagaatcctcacgacgccgtggtgttccacccaaaattcgtaggcaaaacgctcgaaacattgccggagaaatcagttgtgggaacttcgtctcttaggagagccgcgcagcttcagcgcaagttccctcatcttgagtttaggtcgatacgaggaaatctcaataccaggctgaggaagctggacgaacagcaggaattttccgccatcatcctggcaacggccggactgcagcgcatgggatggcacaatagagtgggacagattctgcaccctgaagaatgtatgtacgcagtgggacagggagcactcggcgtcgaggtgcgagcaaaggatcaagatattctggacctggtcggggtgcttcacgaccccgagaccttgctgcgctgcatcgcagagcgcgcttttttgcgtcacctggagggcggctgttcggtgccagtggccgtgcacaccgcgatgaaagatggccaactctacctcaccggaggagtatggagcctggatggaagcgatagtattcaggagacgatgcaggcgaccatacatgtaccggcccaacacgaggatggccccgaggatgacccacagcttgtaggaatcaccgcccgaaacatacctcgcggtccgcagctggcagcgcaaaatttaggcattagcctggcaaacctgctgctatccaagggagctaagaacatcctggacgtcgcgaggcagctcaatgacgcccac

SEQ ID NO: 250484 - DNA, 1083 bp, synthetic construct
  misc_feature 1..1083: note = Description of Artificial Sequence: Synthetic coding sequence
  source 1..1083: mol_type = other DNA
atgtcgggcaacgggaatgcagctgctaccgcagaggagaatagcccaaagatgagagtcattcgtgttggcacccggaagtctcaactggcacggattcagacggatagtgtagtggctactcttaaggcaagctaccccgggctacaatttgaaatcatcgctatgagtacaacgggtgacaaaattctggataccgccttatccaagattggcgaaaaaagtctgtttactaaggagctggaacacgcactggaaaaaaacgaggttgacctcgtcgttcactctctgaaagatctgcccacagtgctaccacccggcttcaccattggggcaatctgtaagcgagagaacccccatgatgctgttgtgttccacccgaagtttgttggcaagacattggagacgctgcctgaaaaaagtgttgtgggaacttcctcccttcggagagccgcccagcttcagcgcaagttcccacacttggagttccggtcaataagaggcaatttaaacacgcggctcagaaagttggatgagcagcaggagttcagtgcaattattcttgcgacagccgggcttcagcgaatgggatggcataacagagtgggccagattcttcaccctgaagagtgtatgtacgcggtaggccaaggcgcccttggcgtagaggtgcgtgctaaagaccaggatatcttggatctcgtgggtgtgctacacgatccggaaacattactcagatgtatcgcagaacgagccttcctgaggcacctggagggcggctgttcagttcccgtggccgtgcacaccgccatgaaggacggtcagctctacctgacggggggcgtttggtctcttgatggaagcgactctatccaggagacaatgcaagcgactatccacgtccctgcccagcacgaggacgggccggaggatgatccccagttggtagggattaccgccaggaacatcccgcgcggtcctcagctagccgcccaaaatctgggaatttctcttgctaatctgctgttatcaaagggtgccaaaaacattttggatgtggcaagacaactgaacgatgcccac

SEQ ID NO: 250485 - DNA, 1083 bp, synthetic construct
  misc_feature 1..1083: note = Description of Artificial Sequence: Synthetic coding sequence
  source 1..1083: mol_type = other DNA
atgtccgggaatgggaatgcagctgcgacggctgaagagaactctccaaagatgagggttattcgagtcggaacgcgaaaaagtcagcttgcgcggatccaaactgactcagtagtggctactcttaaggccagctacccgggactccaattcgagattatcgctatgtctaccacgggagataagatacttgatactgctctgagcaagattggcgaaaaatcgctgttcacaaaggagctggaacatgcactcgaaaagaacgaggtcgacctggtggtgcattcactcaaggatctacctacagtgttacccccaggttttacaattggggcaatatgtaaaagagagaatccccacgacgccgtagtttttcaccccaagtttgtgggcaaaacattagagaccttgccagagaaatcggtggtcgggacctccagcctgaggagagcagcgcaactccaacggaaattcccccacctggagtttagaagcataagaggcaaccttaacacacgactgcgaaagctagacgagcaacaggaattctcagctatcatcctggcaacggctggtcttcaaagaatggggtggcacaatcgcgtaggtcaaatcctccacccagaggagtgcatgtatgcagtgggccagggagcactgggagtggaagtcagggcgaaggaccaagacatccttgacctcgttggtgtgctgcatgatcctgagaccctcctgcgatgcatcgccgagcgcgcgtttctgcgtcacctggagggaggctgctcggtgcccgtggcggttcacactgccatgaaagacgggcagctgtatttgaccggaggcgtgtggtcattagatggctcggactccatccaggaaacgatgcaggctaccatccacgtgcctgcccaacatgaagatggaccagaggacgatccacagctagtgggaatcacagcgcggaatattccgcgcgggccccagcttgctgcccagaatctcgggatctcactggccaacctgctcttatccaaaggagctaaaaatatactggacgtggcccgccagttgaacgacgcacac

SEQ ID NO: 250486 - DNA, 1083 bp, synthetic construct
  misc_feature 1..1083: note = Description of Artificial Sequence: Synthetic coding sequence
  source 1..1083: mol_type = other DNA
atgagcgggaacggtaatgctgcggcgaccgctgaagaaaactctcctaaaatgagggtgatccgcgttggtactcggaagagtcaactggcgcgtattcaaaccgactctgttgttgctacgctgaaagcctcctaccccggcctgcaatttgagattatcgccatgagtaccacaggcgacaagattctggatacagctttgtctaagattggcgagaagagcctgttcacgaaagaactagaacatgcgctggagaaaaatgaggttgatttggtagtgcactccctcaaagaccttccaaccgtgctgcctccagggtttacaatcggtgcaatttgcaagcgcgaaaaccctcacgacgccgtcgtgtttcatcctaaatttgttggcaagaccctggagaccctcccagaaaaaagcgtcgtggggaccagttcactgagacgcgccgcccaattgcaacgcaagttcccccacctcgagtttcggtccatacgcggtaacctaaacaccaggctcagaaagcttgacgagcagcaggagttttctgccatcatcctcgcaacggctgggcttcagagaatgggatggcataaccgggtggggcaaattcttcatccggaagaatgtatgtacgccgtagggcaaggagctctcggcgtggaagttcgcgccaaagaccaggatattttggacctagtaggtgtgcttcatgatcctgagaccttactgaggtgcattgctgaacgtgctttcttaaggcacctggaggggggctgcagcgtgccggtagcggtccacacagctatgaaggatgggcaactgtacttgactgggggcgtttggtcattggatggatcagactcaatacaagagacaatgcaggccacaattcacgtcccagcgcagcatgaggatggtcctgaagacgaccctcagctggttggtatcaccgcaagaaacatcccgagaggcccccagcttgcagcccagaacctaggaatatcgctagccaacttgttgctgtctaagggcgctaagaatattctggacgtagcccgccaattgaatgatgctcat

SEQ ID NO: 250487 - DNA, 1083 bp, synthetic construct
  misc_feature 1..1083: note = Description of Artificial Sequence: Synthetic coding sequence
  source 1..1083: mol_type = other DNA
atgagtggcaacggcaatgcagctgcgaccgcagaagaaaactcacctaagatgcgagtgattcgagtcggtacaaggaaaagccaattggctagaatccagacagactctgtcgtggcgaccctcaaggcctcttaccctggcttgcaattcgagatcatcgcgatgtcaaccacaggcgacaagatcctcgatactgcgctgagtaaaatcggcgagaagagtctcttcaccaaggaactggaacacgccctggaaaaaaacgaggtggatttggtcgttcacagtctgaaagatttgccaacagtcctgccacctgggttcaccattggagcaatttgtaaaagagagaatccccatgacgctgtggtgttccaccctaagttcgtaggcaagacactggagacattgccagaaaagtccgtggtcggaacatcatcccttaggagggcggcccaattgcaacgcaagttcccccacttggagttccggtcaattcgagggaatctgaacacacgcctgaggaaactagatgagcagcaggaattctcagcgattattctagccacagccggcctacagcggatgggatggcataacagggtggggcaaatcctccaccccgaggagtgcatgtatgccgtagggcagggcgctttgggggtggaagtgcgggctaaggaccaggatatcctggacctggttggcgtgcttcatgaccccgagaccttgcttagatgcattgctgaacgagcttttctgagacacctcgaggggggctgctccgtgccagtggcggttcatacagccatgaaggacggccagctttacctcacagggggcgtgtggtctctggacggatccgattccatacaggaaaccatgcaggccactatccatgtccccgctcagcacgaagatggcccagaagatgatcctcaactcgtgggtatcaccgccaggaatattcctcggggaccgcagctagccgcccagaatcttgggatctccctcgctaatctactcctttccaagggggcaaaaaacatcttggacgtggctcgtcagctgaacgacgcccac

SEQ ID NO: 250488 - DNA, 1083 bp, synthetic construct
  misc_feature 1..1083: note = Description of Artificial Sequence: Synthetic coding sequence
  source 1..1083: mol_type = other DNA
atgagcgggaatggaaacgcagcggcgaccgccgaggaaaattctccaaagatgcgcgtgatccgagtggggacaagaaaaagccagctggccaggattcagacagattccgtagtggctacgctgaaagccagctacccagggcttcagtttgaaataatcgcaatgagtacaactggggacaagatcctggacaccgctctgagtaaaataggtgagaagtcgctttttactaaagaactggaacatgcgttggagaagaacgaagtggacctggttgtacattctctgaaagatctcccaacagtactgccccccggctttacaatcggtgccatctgtaagagggagaatccacatgacgccgtcgtgtttcacccaaaattcgtcgggaaaacgctggagacactaccggaaaaatcagtcgtggggacgagctcgctacggcgtgccgcgcagttacagaggaaattcccccatctcgagttcaggtctatccgagggaatctgaataccaggttgcgaaagcttgatgagcagcaagaattctcagctatcatattagcaacagccggccttcaaaggatgggctggcacaacagggttggccagattctgcaccctgaagagtgtatgtacgccgtggggcaaggggccctcggtgtagaagtgagggcgaaggaccaggacatcctagatttagtgggggtgctgcacgatcctgaaactttactacggtgtatcgcggagcgcgcttttctgagacacttggaaggcgggtgttctgtgcctgtcgctgtccacaccgctatgaaggatggacagctgtatctcactggcggcgtctggagcctcgatggctccgactcgatccaggagactatgcaggccacaattcatgttcctgcccaacacgaggacggacccgaagatgatccgcagctcgtgggaatcacagccagaaatatccccaggggaccacaactcgccgcacagaatcttggcatctccctggccaatctgctgctgtcgaaaggagccaaaaacatcttagatgtggccagacagctgaacgacgctcac

SEQ ID NO: 250489 - DNA, 1083 bp, synthetic construct
  misc_feature 1..1083: note = Description of Artificial Sequence: Synthetic coding sequence
  source 1..1083: mol_type = other DNA
atgtctggaaatggaaacgccgccgccaccgcggaggaaaactcaccaaagatgagagttatccgggtgggcacgcggaagagccagctggcgcgtatccagactgattcggtggtcgcaactctcaaagcgtcatacccgggacttcagtttgagataatcgccatgtcaacgactggagataagattctggacaccgctctgtcaaaaatcggcgaaaagtcgctgtttactaaagaactggagcacgctctcgagaaaaacgaagtcgatctcgtggtccattccctgaaggacctgccgaccgtcctcccacctgggttcacgattggggcgatttgcaagcgggaaaacccacatgacgctgtggtgttccaccctaagtttgtgggaaagactttggaaaccctccccgaaaagtccgtggtcggaacctcgtcactccgcagggcagcccaactgcaacgcaaattcccgcatctggaatttagatcgatccggggaaacttgaacactcggctgagaaaactggacgaacaacaggagttctcggccatcattctcgccactgccggtttgcaacggatgggttggcacaacagggttgggcagatcttgcacccggaggaatgcatgtacgcggtcgggcagggagccctcggagtcgaggtgcgggccaaggaccaagatatccttgacctcgtcggagtgctccatgaccctgaaacgctgctgcgctgcatcgcggagcgggctttcctccgtcacctggaaggaggctgctccgtaccggtggcggtccacaccgccatgaaagacggacaactctatctcacggggggagtgtggtcactggacgggtccgacagcatccaggagactatgcaggccaccattcacgtgccagcccagcacgaggatggaccagaggacgaccctcagctggtgggaattactgcgcggaatatcccgcgcggtccgcagctggcagcccaaaatctcgggatctcgcttgccaatctgctgttgagcaagggagcgaagaatatcctggacgtggcgcgccagctgaatgatgcacac

SEQ ID NO: 250490 - DNA, 1083 bp, synthetic construct
  misc_feature 1..1083: note = Description of Artificial Sequence: Synthetic coding sequence
  source 1..1083: mol_type = other DNA
atgagtggaaacggaaatgctgcagcaacagcggaagaaaactctccaaagatgagggtgataagagtcgggaccagaaaatcacagcttgctcgaatccagaccgattccgtcgtagcaacactaaaagcgtcctacccgggactccagtttgagatcatcgcgatgtctactaccggggacaagatcctggacaccgcactaagcaagattggggagaagagcctgttcaccaaggagttggaacacgcacttgaaaagaacgaggtcgaccttgtggtccactccctgaaggatctgcccactgtcctgccgccaggatttaccatcggggcaatatgcaaacgagaaaatccccatgatgcagtagtctttcatccaaagttcgtcggcaaaacactggaaacccttccagaaaaatccgtcgtgggcacatcctcactgcgcagggcggcccaattgcagcggaagtttccccacctggaattcagatctattcgaggcaaccttaatacacgtctcagaaaattggatgaacaacaggagttctctgccattatcttggccacggccggtctccaacgaatggggtggcataacagggtcggacaaatcctgcacccagaagagtgtatgtatgctgttggccagggcgctctcggtgttgaagtgagggctaaggatcaagacatcctggatctggtcggtgttctgcatgatccggaaacgctactccgatgcatcgctgaacgagcatttttgcggcacctggaaggtggatgctccgtccctgtcgctgttcataccgcaatgaaggatgggcagctctacctgacaggcggagtttggagcttggatggctctgactccattcaagagacaatgcaggctactatccatgtccccgcacaacacgaagatggacccgaggacgatccccagctcgtaggtattactgcaagaaatattccgagggggccacagcttgccgctcagaatctcgggatctcacttgcaaacctgctcctctccaagggggccaagaacatactcgacgtagccaggcaactaaatgatgcacat

SEQ ID NO: 250491 - DNA, 1083 bp, synthetic construct
  misc_feature 1..1083: note = Description of Artificial Sequence: Synthetic coding sequence
  source 1..1083: mol_type = other DNA
atgtccgggaatggcaatgccgccgccactgcagaagagaactcaccgaaaatgcgcgtcatcagggtcggaaccagaaaaagccagttggccagaatccaaactgatagcgtggtagcaactctcaaagccagctaccccggactgcagttcgagatcatcgcaatgagcactacgggggacaaaatcttggacaccgcactgtcgaaaatcggagaaaaatcactgttcactaaggagctggaacatgcactcgaaaagaatgaagtcgacctggtggtgcattcgctgaaggatctgccgaccgtgctgcctcctggtttcaccataggagcgatctgtaagagagaaaacccccatgatgcggtggtgtttcatccgaagttcgtcggaaaaaccctggagactctgccagagaaatcggtggtgggcacgtcgtcgctcaggagagccgcccaactgcagagaaagttcccccatcttgaatttcggtctatccgcggaaacctgaacactaggctccggaaattggacgaacaacaggaattctcggcgatcatcctggccaccgcaggactgcaacggatgggatggcacaatagggtgggccagatcctgcatccggaagaatgcatgtacgccgtgggccagggggccttgggggtggaggtgcgagccaaggatcaagacatcttggacttggtcggagtcctccacgacccggagacgctccttagatgtatcgccgagcgggcatttctgagacacctggaggggggctgctccgtccctgtggccgtccacaccgcgatgaaggatggacagctctacctcactggaggggtgtggtcattggacggatcggactcgatccaggaaactatgcaagcgactatccacgtgccggcccagcatgaggatggaccagaggacgacccgcaactcgtgggaattaccgcccggaacattccacgcgggccgcagctggcagctcagaatctgggcattagcctcgctaacctccttctgtcgaagggagcaaagaacatcctggatgtggcccgccagctcaacgacgcccat

SEQ ID NO: 250492 - DNA, 1083 bp, synthetic construct
  misc_feature 1..1083: note = Description of Artificial Sequence: Synthetic coding sequence
  source 1..1083: mol_type = other DNA
atgagtggaaacggcaatgctgccgccacagcggaggagaactcacccaaaatgcgggtaatcagggtgggaacgagaaagagtcaactcgcacgcatccagactgactctgttgtagccacgctgaaggcctcatacccggggctgcagttcgagatcattgcaatgtctacaacaggagataaaatcctcgacacagcgctctccaagataggtgagaagtcgctcttcacgaaagaactcgagcacgctctggaaaaaaacgaagtcgacttagtggtccattcactgaaggacttgccgaccgtgctcccacctgggtttacaatcggcgccatatgcaagagggagaacccgcacgacgcggtggtcttccacccaaagtttgttggcaaaaccctcgagacccttccagaaaaaagtgttgtggggactagtagtctccgaagggccgcacagctgcagcggaaattcccacacctggagttccggtctatccgcgggaatttgaacactcgtctccggaagctagatgaacagcaagagtttagcgctataattctcgccaccgctggcctgcaaaggatgggttggcacaatagggtagggcagattctacatccagaggagtgtatgtacgctgtgggacaaggagctctgggtgtggaggtgcgcgcaaaggatcaggacatactggaccttgtgggtgttttgcatgatccagagaccctgcttcggtgcatcgcagagagagcctttcttagacacctggaggggggttgctcggtccctgtggccgtgcataccgctatgaaggacggacagttgtaccttaccgggggtgtctggtctctggatggatccgatagtatccaggagaccatgcaggccaccatccacgtgcctgcacagcatgaggatggacctgaggacgaccctcagctggtcggcatcacggcgcggaacattccacgcggccctcagcttgcggcacaaaatctggggatttctctggccaatctgctactgtccaaaggagcgaaaaatatcctcgacgtggcacgacagctaaatgacgcacac

SEQ ID NO: 250493 - DNA, 1083 bp, synthetic construct
  misc_feature 1..1083: note = Description of Artificial Sequence: Synthetic coding sequence
  source 1..1083: mol_type = other DNA
atgagcggaaacggcaatgccgctgcaacagcggaggagaacagcccgaagatgcgagtcattagggtgggaactcggaaatctcagcttgctcgtattcagacagatagcgtggttgcaactttgaaagcctcatatcccggactccagttcgagatcatcgctatgagcaccactggagataagattctggacacagcgctaagcaagatcggcgaaaaaagcctgtttacaaaggagcttgagcacgccttagagaaaaatgaagttgacttagtcgtacactcactcaaggatctcccaactgtcctgcctccggggttcacgatcggcgcaatatgcaagagggaaaacccccacgatgccgtcgtgttccacccaaaattcgtgggcaaaactcttgaaactctacccgaaaaatctgtcgtgggcacatcctccctaagaagagcggcccagctccagcggaagttccctcatttggagttcagaagcattcgcggtaatctgaatacgaggttaaggaaactcgacgagcagcaagagttctctgcaatcatattggcaacggccggcttgcaacgaatgggctggcacaatcgcgtgggacagattcttcatcctgaagaatgtatgtatgctgtgggtcagggagccctcggtgtggaggtaagggcgaaggatcaagatatcctggacttggttggagtccttcacgacccagaaactctgttgcggtgcatagccgagcgtgcctttctcagacacctggagggtgggtgtagcgtaccagtagcagtgcacacagccatgaaggatgggcagctgtacctgaccggaggggtatggtctttggatggctcggactccattcaggagaccatgcaggccacaatccatgttccggctcagcacgaggacgggcctgaagacgacccccagctcgtcggtatcaccgctaggaatattcctaggggacctcagctggccgcccagaacctgggcatcagtctcgccaacctactgctctctaaaggggcaaagaatatcctggacgtcgccagacaactaaacgacgcgcat

SEQ ID NO: 250494 - DNA, 1083 bp, synthetic construct
  misc_feature 1..1083: note = Description of Artificial Sequence: Synthetic coding sequence
  source 1..1083: mol_type = other DNA
atgagcggaaacggaaatgccgcagcgacggccgaagaaaactccccgaagatgcgggtgattagagtgggaacccgtaagtcacagctggccaggatccaaaccgacagcgtggtggctactttgaaagcctcctaccccgggctgcaattcgagatcatcgcaatgtcgactactggagacaagatcctggataccgcattgtcgaagatcggtgaaaaatcgctgttcaccaaagagctcgaacacgcgctggagaaaaacgaagtagatctcgtggttcactcactgaaggacctgccaactgtcctgccgccagggttcactattggcgctatttgtaagcgcgaaaatccgcacgatgccgtcgtgttccacccaaagttcgtcggcaagaccttggaaaccctcccagagaagtccgtggtggggacctcttccctccgacgagccgctcagctccagcgcaaatttccgcacctggaatttcgcagcatcaggggaaatctgaacactcgccttagaaagctggacgagcaacaggagttcagcgctatcatccttgcgacggcggggttgcagaggatgggctggcataatcgcgtcgggcaaatcttgcatccggaagagtgcatgtacgcagtcggacaaggtgcgcttggtgtggaagtcagagcaaaggaccaggatatcttggatctcgtgggcgtccttcacgatcccgaaacgctgttgagatgcatcgccgagcgcgcattcctgcgacatctcgaaggtgggtgctcggtgccggttgctgtgcacactgccatgaaagatggccaactgtacctgactggaggcgtttggtccctcgatggatcggactccatccaagaaaccatgcaggccaccatacatgttccagcgcagcacgaggacggacccgaggacgaccctcagcttgtaggaattacggcgcggaacatccctaggggaccgcagctggccgcccaaaaccttggaatcagcctggccaatctgcttttgagcaagggagcgaagaacatcctcgacgtggcacggcagctgaacgacgcccat

SEQ ID NO: 250495 - DNA, 1083 bp, synthetic construct
  misc_feature 1..1083: note = Description of Artificial Sequence: Synthetic coding sequence
  source 1..1083: mol_type = other DNA
atgagtggaaacggtaatgcagctgcaactgccgaggagaactctcctaagatgcgggttatcagggttgggacgagaaagtctcagctggccagaattcagaccgattccgtagtggctaccttgaaggcctcttaccctggcctgcaatttgaaatcatagctatgagcacgaccggcgacaagatacttgacactgcccttagtaaaatcggcgagaagtcactttttacaaaagaactggagcatgcactggagaagaacgaggtagatctggtcgtgcattccctcaaagacctgcccacggttcttccacctggctttaccattggtgccatctgtaagcgggagaaccctcacgatgccgttgttttccaccccaaatttgtgggtaaaactctggaaacactccctgagaaaagtgttgtgggtacgtcgtcattgaggcgtgccgctcaacttcagagaaagttcccgcacttggaattccggtctatcaggggtaacttgaacactagacttcgtaaactcgacgagcagcaggaattctcggctattatcttggccactgctggactgcagaggatggggtggcataatcgggtgggccaaatcctgcacccagaggagtgtatgtatgccgtaggacaaggggctctgggcgttgaggtgcgggcgaaagatcaagacatcctcgaccttgtgggagtattacatgaccccgagacattgttgcgttgtattgcagagagggcctttttaagacacctggaaggtgggtgttcggtgcctgtagctgtccacactgccatgaaggatggacagttgtatctgactggtggtgtatggtcactggacggtagcgatagcatccaggagacgatgcaagcaaccatccacgtcccagcgcagcacgaagatggtccggaagacgatccacaactggttggcatcaccgcaagaaatatcccaaggggtccccagctggctgcccagaacctcgggatttcattggcgaaccttctcctgtctaagggggctaagaatattctggacgttgcacgacagctcaatgatgcccat

SEQ ID NO: 250496 - DNA, 1083 bp, synthetic construct
  misc_feature 1..1083: note = Description of Artificial Sequence: Synthetic coding sequence
  source 1..1083: mol_type = other DNA
atgtccggtaacggcaacgctgcggctacggctgaagagaacagcccaaagatgagggtaatccgcgtgggcacaagaaagagccagctagccagaatccagaccgacagtgtagttgccacactgaaggcatcttacccaggcctgcagttcgagatcatcgcaatgtccacaaccggcgacaagattctcgacacggctcttagcaaaatcggagagaagagcctgtttacaaaggaactggagcacgccctggagaagaatgaggtggatctcgttgtgcattcactgaaagacctgccgacagtcctgccaccgggctttaccataggggccatatgcaagagggagaacccacatgatgccgtcgtcttccatcccaagttcgtaggcaagactctggaaaccttgcctgagaaatctgtcgttggaacctcctcgctgcgtcgtgctgcacagctgcagaggaaatttcctcatctggaattcaggtcaattagaggaaatctgaacacccgcctgcgcaagctggatgaacagcaggaattttctgctatcatattagccacagccggactacaaaggatgggctggcacaaccgggtcggccagatcctgcatcctgaggaatgcatgtacgccgtgggccagggggctctcggggtcgaggttcgagcaaaagaccaggacatactagacctggtaggcgtcttgcacgaccctgagactctgctgcggtgtatcgctgagagagcttttctgcggcatctcgagggaggctgtagcgtccccgtggcagtacacactgccatgaaggacggtcagctgtatctgaccggcggcgtctggtctctggatgggtcagattcaattcaggaaacaatgcaggccacaatacatgttcctgctcagcacgaggacggcccggaggacgaccctcagcttgtgggcattacagcccgcaacattccgcgaggaccacagctggcagcacagaacttgggaatttccctcgcgaacctgctgctaagcaaaggagccaaaaatatcctggatgtggctagacagctgaacgacgctcat

SEQ ID NO: 250497 - DNA, 1083 bp, synthetic construct
  misc_feature 1..1083: note = Description of Artificial Sequence: Synthetic coding sequence
  source 1..1083: mol_type = other DNA
atgagcgggaacggaaatgcggcagcaacggcggaggagaactcgccaaaaatgcgggtcatcagggtgggaactcggaaaagccagctggcgaggatccagaccgattcggtggttgctaccctcaaggcctcgtaccccggactgcagttcgagatcatcgccatgtccactactggggacaagatcctggacaccgccctgtccaagattggagagaagtccctgttcaccaaagagctcgaacacgctctggaaaagaatgaggtcgacttggtggtgcactcactgaaagatctgccgacggtgttgccgccgggtttcaccatcggcgctatttgcaaacgggagaatccgcacgacgccgtggtgttccatccgaagtttgtgggaaagactctggagactctgccggaaaagagcgtggttggcacttcatcactcagaagggctgcgcagctccaacggaagttcccccatctggaattccgctcaatccgcgggaaccttaatacccgactgagaaaactcgacgagcagcaagagttttcggccataatcctcgctactgccggactgcaacggatgggatggcataatcgcgtgggccaaatcctccatccagaggagtgcatgtacgccgtgggccaaggagcactgggtgtggaagtccgcgctaaggatcaggatattctcgatctcgtgggagtcctgcatgacccggaaaccttgctgaggtgcatcgcagaacgggcattcctgcgccacctggagggcgggtgctcggtgccggtcgcggtgcataccgctatgaaggacggtcaactctacctgactggcggagtgtggagcctggacggatccgattcaatccaagaaacgatgcaggccactatccatgtgccagcgcagcacgaggacgggccagaggacgacccacagctggtcggaatcaccgcccgcaatattccccgcggcccgcagctggccgcacagaacctcggaatctcgttggcgaacctcctcctgagcaagggtgcgaagaatattctcgacgtcgcacgccaactcaacgacgcccac

SEQ ID NO: 250498 - DNA, 1083 bp, synthetic construct
  misc_feature 1..1083: note = Description of Artificial Sequence: Synthetic coding sequence
  source 1..1083: mol_type = other DNA
atgtccggtaatggaaatgcagcagctactgcggaagaaaactccccgaaaatgagggtgatcagagtgggtactcggaaatcgcagctggcaagaattcaaaccgattccgtggtcgcaactctcaaggcatcatacccaggccttcaattcgaaatcattgctatgtccactacgggcgataagattctggatactgcattgtccaagatcggtgagaaaagccttttcaccaaggaacttgaacatgccctcgaaaagaacgaggtggaccttgtcgtgcactcgctgaaggacctgcctaccgtccttcctcctggctttaccataggtgcaatttgtaaacgggaaaaccctcatgacgcggtcgtgtttcatcctaagttcgtggggaaaacccttgagacgctgcccgagaagtctgtcgtcgggacctcctcacttaggcgcgcggcacaactccaaagaaagtttcctcatctggaatttcggtcaatacgcgggaacctgaacactagactcagaaagctcgatgaacaacaagaatttagcgccatcatactggcaacggccggacttcagcgtatggggtggcacaatagggtgggacaaatactccaccccgaagaatgcatgtacgccgtgggtcagggtgcactcggagttgaagtccgcgcgaaagaccaagatatacttgacctggtgggagtgcttcacgaccccgaaaccctccttcgatgcatcgccgaacgagcatttctcagacatctggagggtggatgttcagtgcctgtggcagtccacaccgccatgaaagatggacagctctaccttaccgggggagtttggtcgttggacgggtccgattccattcaagaaactatgcaagcaaccattcatgtgcctgcacaacatgaagatgggcctgaagatgatcctcaacttgtaggaatcaccgccagaaacattcctaggggtccacaacttgcagcacagaatctcggaatttcccttgcaaatcttcttctttcaaagggtgccaagaacatcttggacgtggcaagacagttgaacgacgcccac

SEQ ID NO: 250499 - DNA, 1083 bp, synthetic construct
  misc_feature 1..1083: note = Description of Artificial Sequence: Synthetic coding sequence
  source 1..1083: mol_type = other DNA
atgagcggcaatggcaatgcagctgctacagctgaagaaaattcccctaagatgagggtcatacgagttggaacccggaagagccagctcgctaggatccagaccgactcagtcgtggcaaccctgaaggctagctaccccggcttacagttcgagatcattgccatgtcaacaaccggggataagatcctggacaccgccctttccaagatcggagagaaaagcttgtttactaaggagttggaacatgctctagagaagaacgaagtagacctggtcgtgcatagtctgaaggacctcccaactgttttgccaccagggttcacgattggggctatttgtaaaagggagaacccgcatgacgcagtagtctttcatcccaagttcgtgggcaagacgctcgagacgctgccggaaaagagtgtggtcggaacgtccagcctgcgtcgcgctgcgcaactgcagagaaaatttccacatttagagttcaggtcaatcaggggtaatcttaacaccaggctccgcaagctggacgagcagcaggaattctccgccataattctcgctacagccggactgcagagaatggggtggcataacagggtgggccaaatcttgcatccagaagagtgcatgtatgcggtggggcagggggcgcttggagtggaggtgagagccaaggatcaagacatccttgatctagttggggttctgcacgatcccgaaaccctcttaaggtgcattgctgaacgggcgttcctacgccatctggagggaggttgtagcgtgccagtggccgtgcacacggccatgaaagatggacagctttacctcacaggaggcgtctggtcattggatggttcagacagtatccaagaaacgatgcaggccaccatacacgtcccggcacaacacgaagacggcccagaagacgatccccaactagtcggcatcaccgcccgaaacatccctagagggccccaactggccgctcaaaaccttggcatctctctggccaatctgctacttagtaagggggcaaagaatattcttgatgtagcacgccagttaaacgatgcccac

SEQ ID NO: 250500 - DNA, 1083 bp, synthetic construct
  misc_feature 1..1083: note = Description of Artificial Sequence: Synthetic coding sequence
  source 1..1083: mol_type = other DNA
atgtctggcaatggtaacgcagcagcaactgcagaggaaaattcacctaagatgcgcgtcattcgcgttgggacccggaagtcccagctggcaagaatccagaccgattccgtggtggccactcttaaggcatcgtaccctggtctgcagtttgaaatcattgcaatgtccactactggagacaaaattctggataccgcactgtcaaagataggcgaaaagtcgcttttcaccaaagagctggaacatgcgctggagaagaacgaggtggatcttgtggtgcattcgttgaaggatttgcctactgtgcttccacccggatttactattggcgcgatctgtaagcgtgaaaaccctcatgatgcggtggtgtttcatccgaaatttgtgggtaaaacgctcgaaacccttcctgagaagtccgtcgtcggcacctcatcgttgcgacgagccgcacagctccaaaggaagttcccccatcttgaattcagatcaattcgcggcaatcttaacaccaggctcagaaagttggacgaacagcaggaatttagcgcaattatcctggccaccgcgggtctgcagagaatgggttggcataatcgagtgggacagatcctgcatccggaagaatgtatgtacgcagtcggacaaggagctctgggcgtggaggttcgcgcaaaggaccaggacatactggacctggtcggagtcctccacgacccagaaactcttctgcggtgtatcgctgaacgggcatttcttagacatctggagggagggtgttccgtccccgtggcagttcatactgctatgaaggacggccaactttatcttaccggaggagtgtggtcccttgatggaagcgacagcatacaggagactatgcaagcgactattcacgtcccagcccagcacgaagatggtcctgaggatgacccacagctggtgggaatcacggcaagaaatatcccacgagggccccaactcgcagcacagaatctgggaatctcactggccaacctcctgctttccaagggagcaaaaaacatcctggatgtcgcaagacaactcaacgatgcacac

SEQ ID NO: 250501 - DNA, 1083 bp, synthetic construct
  misc_feature 1..1083: note = Description of Artificial Sequence: Synthetic coding sequence
  source 1..1083: mol_type = other DNA
atgtcgggaaatgggaacgcagcggcaaccgctgaggaaaactcccccaaaatgcgcgtgatcagagtgggcactcgcaaatcacagctggcacggattcagactgactctgtcgtcgcaactctcaaggcaagctaccctggcctgcaatttgagattatagcaatgtcaaccaccggagacaagattttggatactgctctgtccaagattggagaaaagagcttgtttaccaaagaactcgaacatgccttggagaagaacgaggtggatctggtggtgcattcgctgaaggatcttcctaccgtgctcccgcctggatttacgatcggcgcaatttgtaagagggaaaaccctcatgacgcagtggtctttcaccccaaatttgttggaaagaccctggagactctgccagagaagtcggtggtgggaacttcatcactgcggcgggcagcacaactgcagcgcaagtttccccatcttgaatttcgatctatccgcggtaatctgaacacgaggctgaggaaacttgatgagcagcaagagttttcggcaataatccttgcaaccgcaggactccaacgaatggggtggcacaacagagtaggccaaatccttcatcctgaggagtgtatgtacgcagtggggcaaggcgctttgggtgtcgaagtgcgggccaaggatcaggatatccttgatctggtgggagttctccacgatccagaaactctgcttcggtgtatcgccgagagagcctttctccgacatcttgaaggtgggtgtagcgtgccagtcgcagtgcacaccgcaatgaaggacggtcagctgtaccttaccggtggtgtctggtcactggacggatccgatagcatacaagaaaccatgcaagccaccatacatgtgcctgcacagcatgaggacggaccggaggatgacccacagcttgtgggaattaccgcgcgcaacattcctagaggaccacaactcgctgcacagaatcttggaatttccctcgctaaccttttgctttccaagggtgcgaagaacattcttgatgtcgcaagacagttgaacgacgcacac

SEQ ID NO: 250502 - DNA, 1083 bp, synthetic construct
  misc_feature 1..1083: note = Description of Artificial Sequence: Synthetic coding sequence
  source 1..1083: mol_type = other DNA
atgtcaggaaatggaaatgcagctgctactgctgaagaaaattcaccaaagatgcgagttattcgagttggaactcgtaaaagtcaacttgcacgaattcaaacagattcagttgttgctacattaaaggcatcatatccaggtcttcaatttgaaatcattgcaatgtccacaacaggtgataaaattcttgatactgctttatcaaaaattggagaaaaatctctttttactaaagaattagagcacgcacttgaaaaaaatgaagttgatttagtagttcatagtcttaaagatcttccaacagttttgcctcctggatttactattggtgcaatttgtaaaagagaaaatccacatgatgcagtagtattccatccaaaatttgttggaaagaccttggaaacacttccagaaaaaagtgttgtaggaacttcatcattacgtcgagcagctcagttacaaagaaaatttccacaccttgaatttagaagtattagaggaaatcttaatacaagattaaggaaattagatgaacaacaagaattttcagcaattatcttagcaactgcaggtcttcagagaatggggtggcataatagagtaggtcaaatccttcatcctgaagaatgcatgtatgccgttgggcaaggggcattgggagttgaagtaagagcaaaagaccaagacattcttgatttagttggagttttacatgatcctgaaactttgttaaggtgtatcgctgaaagagcattccttagacatttagaaggaggatgtagtgttcctgttgctgtccatactgctatgaaagatggtcaactttatcttactggaggagtgtggagtcttgatggaagtgattcaattcaagaaacaatgcaagcaactattcatgttccagctcaacatgaagatggaccagaggatgatccacaattggttggaattacagctagaaacattcctagaggacctcaattagctgcacaaaatttaggaataagtttagctaatttattattatcaaaaggagctaaaaatattcttgatgtagctagacaattaaatgatgctcat

SEQ ID NO: 250503 - DNA, 1083 bp, synthetic construct
  misc_feature 1..1083: note = Description of Artificial Sequence: Synthetic coding sequence
  source 1..1083: mol_type = other DNA
atgtctggcaacggaaacgccgctgctactgctgaggagaactcacctaagatgcgcgttatccgtgtaggaaccaggaagtcgcaattggcacggatacagactgatagtgtcgtagccactctcaaagctagttatcctggactgcagtttgaaatcattgctatgagtacaactggcgataagattctggataccgccctctccaaaattggtgagaagtctctcttcaccaaggaattagagcatgctttggaaaagaatgaggttgaccttgttgtgcattccttaaaggatttgccgaccgtacttcctccgggtttcaccatcggtgcaatctgtaaaagagaaaatcctcacgatgcagtcgtattccaccctaaattcgtcgggaaaaccctcgaaacgttgccggagaaatcggttgtgggtactagctcactcagacgtgcagcccaattacaaagaaagtttccacatttagaatttcgaagtatccgcggcaacttgaacactcgcctccgaaaactagacgagcagcaggagttttctgctatcattttggctaccgctggccttcagagaatgggttggcataaccgggttggccaaatacttcatcctgaggaatgtatgtatgctgtaggacaaggagctcttggtgttgaagttagagctaaagatcaggatattctggacctagttggtgttctgcacgatcccgaaacgctccttagatgtattgctgagcgcgctttcctacgccacttagaaggtgggtgctcagttccggtggcagtgcatacagctatgaaagacggacagctgtatctcactggaggcgtctggtcactagatggttcagattcaattcaggaaactatgcaagctactatccatgtccccgctcagcatgaggatggacctgaagatgatccacaactggttggcattaccgctcgaaacatcccacgaggtcctcaactcgccgcccaaaacttgggaatctccctcgcaaaccttcttctctcaaaaggcgcaaagaacatacttgacgtagctcggcaacttaatgatgctcat

SEQ ID NO: 250504 - DNA, 1083 bp, synthetic construct
  misc_feature 1..1083: note = Description of Artificial Sequence: Synthetic coding sequence
  source 1..1083: mol_type = other DNA
atgtcgggaaacggcaacgctgcagcgactgcagaagagaactctcctaaaatgagagtgattcgagtgggaaccagaaaaagccaactcgctaggattcaaactgatagcgtggtggctaccctgaaggcctcgtaccctggacttcaatttgaaatcattgcaatgtcgacgacgggagataagattcttgacactgcactctccaagataggcgaaaagtctctttttaccaaggaacttgaacacgcacttgagaagaatgaggtcgatcttgtcgtgcactccctgaaggatctccctactgtgcttccgccaggttttacgatcggtgcaatttgcaagagggagaacccgcacgacgccgtggtatttcatcctaagtttgtgggtaagactcttgaaaccctgcctgaaaagtcggtcgtgggcacctcgtcgcttcgtcgcgcagcacaattgcagcggaagtttccacatctcgagtttcggtccattcgcggtaatcttaacactcgactcagaaaactggacgagcaacaagagttctcggccatcatactcgccactgcaggtctgcagcggatgggatggcataacagagtgggacaaattcttcatccagaagaatgtatgtacgcagtgggacagggtgccctgggagtggaggtccgcgccaaagaccaagacattcttgatctggtgggcgtgctccacgatccagaaacccttctgagatgcattgcagagcgggcctttcttagacatctggagggaggatgctcggtgcccgtggccgtgcatactgcgatgaaagacggacagctttacctgactggcggtgtttggtcgctcgatggatcagattccatacaggaaaccatgcaagcaaccatccacgtcccagcacaacatgaagatgggccggaggacgacccacagcttgtcggtattaccgcacgtaatatccccagaggacctcagcttgccgcacagaacctgggtatatcgctggcaaacctgctgctgtccaagggtgcaaagaacatcctcgatgtggcacggcaactgaacgacgcacac

SEQ ID NO: 250505 - DNA, 1083 bp, synthetic construct
  misc_feature 1..1083: note = Description of Artificial Sequence: Synthetic coding sequence
  source 1..1083: mol_type = other DNA
atgagcggcaacggaaacgccgcggcaaccgctgaggagaactccccaaagatgcgcgttattcgggttggtactcgaaagtctcaactcgcccgaattcagacagatagcgttgttgccactctgaaagcctcctatcctggcctccaattcgagatcatcgccatgtccactactggagataagatactcgacacagccctttctaagattggtgaaaaaagtctcttcacaaaagagctagagcatgcccttgagaagaacgaggtggacttggtagtccactcccttaaagacctgcctaccgttctgccccccgggtttactattggtgccatatgcaagcgtgagaacccgcacgacgccgtagtgtttcacccgaaatttgttggaaagacccttgagacattacccgagaaatcggttgtcggtacgagctcgttgcgccgagctgcccaattgcaaaggaagtttcctcaccttgagttcaggtcaattaggggaaatctcaacacgcgcctccggaaacttgacgaacagcaggaattttcggcaatcattcttgctaccgctggtctccagcgtatgggatggcacaacagggttggtcagatattgcaccccgaggaatgcatgtacgctgttggccagggcgcactaggcgtagaggtgagggcgaaggatcaggatattttggatctggtcggagtgcttcacgatcccgagacattgctgagatgtattgccgagagagcgtttctcagacatcttgagggcggttgcagtgtccctgtcgctgtgcatacggccatgaaagatgggcaattgtacttaactgggggcgtttggagcttggacgggtccgattctatccaagagactatgcaggcgacaatccatgttccggcccaacacgaggacggccccgaggatgacccacaacttgtcggcattactgcaaggaatattccaaggggcccgcagctagccgcccaaaatcttggcatcagtttggctaatcttctcctgagcaagggcgccaaaaacatcctcgatgtggcgcgacagcttaatgatgcccac

SEQ ID NO: 250506 - DNA, 1083 bp, synthetic construct
  misc_feature 1..1083: note = Description of Artificial Sequence: Synthetic coding sequence
  source 1..1083: mol_type = other DNA
atgtcagggaacggaaatgccgccgcaacggctgaagaaaactctccgaagatgcgagtcatacgcgtgggaacccgaaaaagccaacttgcaaggatccaaacagacagcgtcgttgcaacgttgaaagccagctatcccgggttgcagtttgaaattatagctatgagcaccacaggggacaaaatacttgacacagccctgtctaagataggagaaaagagcctgttcactaaagagttggaacatgctctcgagaaaaatgaggtggatctcgtggtgcactcactgaaggacttgcctacagtgttgcccccgggcttcaccatcggtgcgatttgtaagagagagaatccacacgacgccgtggtgttccaccccaaatttgtgggtaagaccctagagacattaccggaaaagagcgttgtgggcacctcttccctccgtcgcgccgctcagttgcaacgaaaatttccccaccttgagttccggtcgatcagaggaaacctgaacactaggctgagaaaacttgacgagcaacaggagttttctgctatcattctggctacggctggactccagaggatgggctggcacaatcgtgtgggccagatcttacacccggaagaatgcatgtatgccgtgggacagggcgctctgggtgtggaggtacgggccaaagatcaggatattctggacttagtaggggtccttcatgatccagagacactccttagatgcattgcggagagagctttcctacggcatttggaggggggatgctccgtgcctgtggcagttcacactgctatgaaggacgggcaactgtatctaaccggtggggtatggtcactggacggctccgatagcattcaagaaactatgcaggctaccatccatgttccagcgcagcacgaggatggtcctgaagatgatcctcagttagtgggcattactgccagaaatatcccaaggggcccacagctggccgcccaaaatcttggcatctccctggccaatttactattgtccaagggggccaaaaatatcttggatgttgcacgtcagcttaatgatgcccat

SEQ ID NO: 250507 - DNA, 1083 bp, synthetic construct
  misc_feature 1..1083: note = Description of Artificial Sequence: Synthetic coding sequence
  source 1..1083: mol_type = other DNA
atgtcaggtaatggaaacgcagctgcaaccgccgaggaaaacagccccaaaatgcgagtcatcagagtggggaccagaaagtctcagcttgcgcgcattcagacggatagtgtcgtggcaaccttgaaggctagttatcctggcctgcagtttgagatcatcgcaatgagcacgacaggtgacaagatcttagacaccgctctgagcaagattggcgaaaaatctttgtttacgaaggagctggaacacgctctcgagaagaacgaagtggacttggtggtgcactctttaaaggacctacctaccgttctaccccccgggtttaccattggagccatatgtaagcgggagaatccgcatgatgctgtagtgttccatcctaagttcgtcggcaagacgctagaaacgctgcccgaaaaatccgtggtgggcacaagcagcttaagacgcgccgcacaactacagcgaaagttcccacatttagaattcagatcaattagaggcaacctcaataccagactgcgcaaacttgacgagcagcaggagttcagcgcgattattcttgctaccgcgggtttgcagcgtatgggttggcataatagagtgggtcagatcctgcatccagaagagtgtatgtatgctgtcggtcagggggccctgggggtggaagtacgggctaaagatcaggacatcctcgacttggtgggtgtgctccacgatccagaaacgctgttaaggtgcatagctgaacgggcctttctccgccatctagaaggcggctgtagtgtcccagtggcagtccacacagccatgaaagatggtcagttgtatctcacgggcggagtgtggtctttagacgggagcgattcgatccaggaaaccatgcaggccacgattcacgttccggcacagcacgaggacggtcctgaggatgaccctcagttggtaggcatcactgcccggaatataccgaggggcccgcaactggccgcccaaaatctcggcatttccctggccaatctcttactgagtaagggcgccaagaatatcttggatgtggcaaggcagttaaacgatgcccac

SEQ ID NO: 250508 - DNA, 1083 bp, synthetic construct
  misc_feature 1..1083: note = Description of Artificial Sequence: Synthetic coding sequence
  source 1..1083: mol_type = other DNA
atgtctgggaatgggaatgctgctgctactgccgaggaaaactctccaaaaatgcgcgttatcagagtcggcacaagaaagagccaacttgccagaatccaaacagactccgtggtggcaacgctcaaggccagctatcctggccttcagtttgaaattatagccatgtcaaccaccggagataagattcttgacaccgcactcagcaagattggggagaagagtttgttcaccaaggagctggaacatgccctagagaagaacgaggttgatcttgtggtgcatagtctgaaggatttgcccacagtgctgcccccggggtttaccatcggtgcaatctgcaaaagggagaacccccatgacgccgtggtattccatccaaaattcgtcggcaagacactggagaccttgccagagaaatccgtcgtaggaacaagcagcttgaggcgcgccgcacagctccagagaaagttcccccatctggaatttagatctatccgtggtaatctaaacactaggttaaggaaactggacgagcagcaggagttctcagccatcatattagccaccgctggcctccagcgcatgggatggcataacagggttggtcagatcctccatccagaggaatgtatgtatgcggtgggccagggcgccctgggggtcgaagtccgtgcgaaggatcaagatatcctggacctggtcggagtcctccacgaccctgaaaccctccttaggtgtatcgctgaaagagccttcctccgccatctcgagggaggctgcagcgttcccgtcgcggtccacaccgctatgaaggacggacaactttatcttacaggaggtgtatggtcattggacggatcagatagtatccaagagactatgcaggcaacaattcacgtacccgctcaacatgaagacgggccagaagacgaccctcagcttgtcggcattactgctaggaacatcccacgcggcccacaactcgccgcacagaaccttggaatcagcctcgccaatcttttgctaagcaagggagcgaaaaacattcttgacgttgctaggcaactcaatgatgcgcat

SEQ ID NO: 250509 - DNA, 1083 bp, synthetic construct
  misc_feature 1..1083: note = Description of Artificial Sequence: Synthetic coding sequence
  source 1..1083: mol_type = other DNA
atgtccggaaatggaaatgccgcagccacagctgaagaaaattccccaaagatgagagttatccgtgtaggaactagaaaatctcaacttgctagaattcagactgactcagtggtggcaacgcttaaggcatcctatccgggactgcaatttgaaattattgcaatgtctacaaccggagataaaatcctcgatacggctttatcaaaaatcggagagaaatcattattcaccaaagaattggaacatgctcttgaaaaaaatgaagtggacttagttgttcatagtttaaaggatctaccaacagtactcccaccaggttttactataggagcgatttgcaaaagagaaaacccacatgacgcagtggtattccatcccaaatttgttggaaaaacacttgaaactctcccggaaaagtcagttgtcggaacaagttctttgcgacgagcagcacaacttcaacggaaatttccccacctggaatttcgtagtatacgaggaaatttgaatacacgccttcgaaaactcgacgaacaacaagaattttctgccatcattctcgccacggccggattgcagcgtatggggtggcataatcgggtgggacaaattctccacccagaagaatgtatgtatgctgtgggacagggtgccttgggagttgaggttcgggcaaaggatcaagatattcttgatcttgttggcgttttgcatgatccggaaactcttttgagatgtatcgccgagcgtgctttcctaagacatcttgagggagggtgttccgtgccagtcgccgttcatacagcgatgaaggatggacaactttaccttaccggtggagtctggtctttggatggaagcgatagtattcaagaaaccatgcaagcaacgattcacgtaccggcacaacatgaggatggccctgaggacgacccacaacttgtaggaatcacagctcgaaatattcctaggggacctcaattagcagcacagaacctaggaattagcctagcaaatctcttgctatcgaaaggagccaagaacatcttagatgtcgccaggcaattaaatgatgctcat

SEQ ID NO: 250510 - DNA, 1083 bp, synthetic construct
  misc_feature 1..1083: note = Description of Artificial Sequence: Synthetic coding sequence
  source 1..1083: mol_type = other DNA
atgagtgggaacggtaacgccgccgcaacagccgaggagaactcccctaaaatgcgagtaatccgtgttggtactcgaaaaagccaactagccagaatccagacagactctgtggtagccactttaaaagccagttatcccggcctgcagtttgaaattattgctatgagcacaactggggataagatcttggatactgcgctgtcaaagataggagagaagagtctgttcactaaggagttggagcacgctctcgagaagaatgaggtcgacctagtcgtgcactctcttaaagaccttccaacggtgttgcccccaggattcactattggcgctatttgcaagcgagagaacccacatgacgccgtcgtgttccaccctaagttcgtgggcaaaacccttgaaacactgccagaaaagagcgtggtgggcacgtcaagcctgcgccgggctgcccagttacaacggaagtttccacatttagagtttcggagcatacggggcaacttaaacacaagactgcggaaacttgatgagcagcaggagttcagcgccatcatacttgctaccgctgggcttcaacgtatggggtggcacaaccgggttggacagatcctgcatcccgaagaatgtatgtacgcagtaggccagggcgcgcttggagtcgaggtgagagcgaaggaccaggatatactggacttagtgggggtactccatgatcccgaaactctgcttcgatgtatagcggagcgggccttcctcagacacctcgaaggcgggtgttccgtgcctgtcgctgtgcataccgccatgaaagatggccagctgtatctgaccgggggggtgtggtcgcttgacggctcggactccatccaggagacaatgcaggccaccatacacgtacccgcgcagcacgaagacgggccagaggacgatccacagctggttgggataacagctcgaaacatacctagaggcccccagctggcggcacagaaccttgggataagcctggctaacctcctgctgtccaaaggagctaagaatattttagacgtggcacggcaattgaatgatgcccat

SEQ ID NO: 250511 - DNA, 1083 bp, synthetic construct
  misc_feature 1..1083: note = Description of Artificial Sequence: Synthetic coding sequence
  source 1..1083: mol_type = other DNA
atgagcggcaatggcaacgcagccgcgactgccgaggagaacagccccaaaatgagagtgatcagggtgggcaccagaaaatctcaacttgctcgcatccaaactgattcggtcgtcgccacattaaaggcgtcctatccaggcctccagttcgagataatcgccatgtcaacaactggggacaaaatcctggatacggccttgagtaaaataggcgaaaagagcttgtttacgaaggaactcgagcatgctctggaaaagaatgaggtggacctcgttgtacacagtctcaaagatctgcctaccgtcctgcctcctggcttcactatcggcgcaatttgtaagcgcgaaaacccacacgacgccgtggtgtttcatcccaaattcgtgggtaagaccctggagactcttccagagaagtccgtcgtgggcacgtcaagcctgagacgtgcagcacagttacagagaaaattcccccacctcgaatttagatcgatccgggggaacctcaacactcggcttcggaaactggatgagcagcaggagttttctgcgataatcctggcaaccgcgggcttgcagaggatgggatggcacaaccgggtgggccagatactccatccagaggaatgcatgtacgcagtgggacagggagctttgggcgtggaggtccgcgccaaggatcaggatatcttggacctcgttggcgtgctgcatgatcccgaaacactccttcggtgcattgccgaacgtgccttcctaagacatttagagggcgggtgttccgtccctgtagcagtgcacactgccatgaaagacggtcagctgtacctcactggtggggtgtggtctcttgacggttctgacagcatccaggagacaatgcaagccacaattcacgtccccgcacagcacgaggacggacccgaagacgatccccagcttgttgggatcactgcgcggaatatccccagggggcctcagctggccgcccagaacctgggcatctctctggcaaacttgctgcttagcaaaggagccaagaatatactggacgtggcccgacagctgaatgatgctcac

SEQ ID NO: 250512 - DNA, 1083 bp, synthetic construct
  misc_feature 1..1083: note = Description of Artificial Sequence: Synthetic coding sequence
  source 1..1083: mol_type = other DNA
atgtcaggcaatggaaacgccgcagctactgcagaagaaaatagtcccaaaatgcgagtcatcagagtgggaacacgtaagagccaactggcccggattcagacggatagtgttgtcgccacgctgaaggccagttatcctgggcttcagttcgaaataattgccatgtcaacgactggggataaaatcttagacacggctttatctaaaattggagaaaaatcactcttcacaaaagaacttgagcacgctttggaaaaaaacgaagttgatttagtcgtgcactccctaaaagacttaccgacagtattaccgccgggctttacaatcggcgctatttgcaaaagagagaatcctcacgatgccgttgtctttcaccctaaattcgttggcaaaacattggagacgctgcctgaaaaatctgttgtgggcacaagctccctgcgtcgtgcagcccagcttcagagaaaatttccgcatctagagtttcgttcaatcagaggtaacttgaatactcgtcttcgtaaattggatgagcaacaagaatttagcgctatcatcttggcaacagccggactgcagaggatgggctggcataatcgggtgggccagattttacatccagaagaatgtatgtatgcggttggacagggtgccctgggcgtggaagttagggctaaagatcaagatatcttagatttagtgggcgttctccatgatccagagacgttgttgagatgtattgcagaacgggcttttttgagacatttagaaggtggttgttcagttcctgttgcggttcatacggccatgaaagatggacagctttatttaacaggaggtgtttggtcgctggatggtagtgacagcattcaggaaactatgcaagctactattcatgtgccggcccagcatgaggacggacctgaagatgatccgcaattggtaggaatcacggctcgtaatatcccgagaggtccgcaattagccgcacaaaacctgggaatctcactcgctaatctgcttttatcaaagggagctaaaaatatactggatgttgcccggcagcttaatgacgcacat

SEQ ID NO: 250513 - DNA, 1083 bp, synthetic construct
  misc_feature 1..1083: note = Description of Artificial Sequence: Synthetic coding sequence
  source 1..1083: mol_type = other DNA
atgtcaggtaacgggaacgcagcagcgacggcggaggaaaattcccccaaaatgcgggttatccgtgtgggcacaagaaagtcccagttagcacgcatccagaccgactcagtggtcgctactctgaaggcaagctaccctgggctccaatttgaaattattgccatgagcaccacgggcgacaaaattctcgacaccgcactgagtaaaattggcgagaagtcactcttcacaaaggagctggagcacgccttggaaaagaatgaggtggaccttgtggtacatagcttaaaggacctgccaaccgtgctgccccctggatttaccatcggggccatttgcaaacgagaaaacccccatgacgccgttgtgtttcaccctaagtttgttgggaagaccctcgaaaccctaccggagaaatccgtggtcggaaccagctctctgcgccgtgccgcccagctccagcgcaagtttcctcacctcgagtttagatccatcagagggaatctgaataccagactgagaaaattggacgaacagcaggagttttctgccatcatactggcgaccgccggcttgcagagaatgggatggcataaccgcgtgggccagatactgcatcctgaggaatgtatgtacgccgtcggtcagggcgctctgggagtagaggtgcgggctaaggaccaggacatccttgatctagtgggagtgctgcacgatcccgagaccctcctccgatgtattgccgagcgggcatttctccggcaccttgagggaggctgttccgtccctgtggccgtccatactgctatgaaagacggccaactctaccttacaggaggagtctggagtctggatggatccgattccatacaagagactatgcaggcaaccatccacgtgccagcccaacacgaggacggcccagaagatgaccctcaactagtaggcataacggcacgaaacattcctcggggtccccagcttgccgcgcagaatctcgggatctccctagccaatctccttctgagcaagggtgccaagaatatactggacgtggcaagacagctcaacgacgctcat

SEQ ID NO: 250514 - DNA, 1083 bp, synthetic construct
  misc_feature 1..1083: note = Description of Artificial Sequence: Synthetic coding sequence
  source 1..1083: mol_type = other DNA
atgtcaggaaacggaaacgctgccgcaaccgcagaggaaaattcccctaagatgagagtgatacgggttggaacccgaaagtcgcagcttgctcgtattcaaaccgacagcgtcgtcgcgactcttaaagcatcgtacccggggctccagtttgaaatcatagcaatgagcaccactggagacaaaatactggatactgcactgagcaaaatcggggaaaagtcactgtttactaaggagttggaacatgcgctggagaagaacgaagtggatttggttgtgcattccctcaaggatctgcctaccgtcctgccacctggtttcaccataggagccatatgtaagagggagaatccccacgacgcagtggtgttccatcctaaattcgtcggaaagacgctggaaactcttccagagaagtcagtggtggggacctcctcgcttcgccgggcggcacagcttcagagaaaattcccccatctcgaattccggtcgattagaggaaatcttaatactaggctcagaaagctggatgaacaacaggaatttagcgcaatcatccttgcgacggccggcctgcagcggatgggatggcacaacagggtcggacagatcctccaccctgaggaatgcatgtacgcggtcgggcaaggtgcacttggagtggaggtgagggcaaaggatcaagatattctggatttggtcggcgtcttgcatgaccctgagactttgctccgatgtatagcggaacgggcatttctgcgtcatttggaaggaggctgcagtgtgccagtggctgtccataccgcaatgaaggatggtcaactttaccttactggaggggtgtggtcacttgatggttcggactcgattcaagagactatgcaagccaccatccatgtgcctgcacaacatgaagatggtccagaagatgatccccagctggtgggcatcaccgcacgcaatatccctcggggacctcagctggcagctcaaaatctgggtatctcgctggcaaacttgcttctctccaaaggagccaaaaacatccttgatgtcgccaggcaacttaatgatgcccat

SEQ ID NO: 250515 - DNA, 1083 bp, synthetic construct
  misc_feature 1..1083: note = Description of Artificial Sequence: Synthetic coding sequence
  source 1..1083: mol_type = other DNA
atgagcggaaacggaaacgccgccgcgactgctgaagaaaactcccctaagatgagggtgatccgagtggggactcgcaagagtcaactcgcccggatccagactgattcggtggtggccactctgaaagcctcatacccgggtctgcaatttgagatcatcgcaatgagcacgaccggtgacaagatcctcgatactgcgttgtccaaaatcggagagaagtccctgttcactaaagaactcgaacatgcgctggagaaaaatgaggtggacctggtggtgcattccctcaaggacctcccgaccgtgttgcccccagggttcaccatcggggcaatctgcaagcgggagaacccacatgatgccgtggtgttccacccgaagtttgtcggaaagactctggagacgctccctgaaaaatcggttgtaggtacttcatcacttcgccgcgccgcacaattgcagcgcaagttcccacatcttgagttccgtagtatcagaggaaatctgaacacccgccttcggaagctcgatgaacaacaggagttttcggcaatcatcctggccactgctggcctccaaagaatgggatggcacaacagggtggggcagatcctgcacccggaagagtgtatgtacgcggtgggtcagggagccttgggcgtcgaggtgcgcgccaaggaccaagatatcctggacctcgttggcgtccttcacgatccggagactctgctgaggtgcatcgccgaaagagcgtttcttcgccacctcgagggcgggtgctccgtcccagtggctgttcatactgccatgaaggatgggcaactctacctcaccggcggggtctggtcgctggacggctccgattccatccaggaaactatgcaggcaaccattcacgtcccagcacagcacgaggacggacccgaggacgacccgcaacttgtgggaattaccgcgaggaatatcccgcgcggacctcagctcgccgcccagaatttgggaatttcgctcgcgaacctgctcctgtcgaaaggagccaagaacatcctggacgtggctcggcagctgaacgatgcccac

SEQ ID NO: 250516 - DNA, 1083 bp, synthetic construct
  misc_feature 1..1083: note = Description of Artificial Sequence: Synthetic coding sequence
  source 1..1083: mol_type = other DNA
atgtccggtaacggcaatgcggcggccaccgcggaggagaatagtccaaagatgagggtcattagggtgggcacgagaaagagtcagctggcgcgaattcagactgattccgtcgttgccacgttgaaggctagctaccccgggctccagttcgaaattatagcaatgtctactacgggggacaaaatcctcgacacagctcttagtaagattggtgaaaagtctctgtttacaaaagaactcgagcacgcactggagaaaaacgaggtagacctggtcgttcattccctgaaggatcttcctaccgtactgcctcctggatttaccattggggcgatttgcaagcgcgaaaatccccacgatgccgtcgtgtttcatcccaagtttgttggcaagaccctcgagacccttcccgaaaagtccgtcgtaggtaccagttccttgcgccgagccgcacagttgcagcgcaaatttccccatctggaatttaggagtataagggggaatctgaacacaagactcagaaaactggatgagcaacaggaatttagtgcaatcatacttgcaaccgcagggctgcagcggatgggctggcataacagagtcgggcagatcctgcacccggaggagtgcatgtacgctgtcggccaaggcgctctgggggtggaggtgagggctaaagatcaggacattttggatctcgtcggggtactgcacgacccggaaacattgcttcggtgcattgccgagagagcctttctccgacaccttgaagggggatgtagtgtgcctgttgcggttcacaccgcaatgaaggatggtcagctgtacctgacgggcggagtttggtctttggacggaagtgactccatccaggagacaatgcaggccacaatccacgtcccagcccagcacgaagacggtcccgaagatgacccccaattggttggaatcacagcccgaaacattccccgcggaccccaactggcggcccagaacctgggaatatctttggccaacttgctgttgagcaagggcgcaaaaaacattctggacgtcgcccgacaactgaacgatgctcat

SEQ ID NO: 250517 - DNA, 1083 bp, synthetic construct
  misc_feature 1..1083: note = Description of Artificial Sequence: Synthetic coding sequence
  source 1..1083: mol_type = other DNA
atgtcgggaaatgggaatgcggcagcaactgcagaagaaaacagcccaaaaatgagagtcatcagagtgggtactcgcaagtcgcagctggctagaattcaaactgattctgtggtggcgacgcttaaggcatcataccctgggctgcagtttgagattatcgcgatgtcaactaccggagacaaaattcttgataccgctctgtccaaaattggcgaaaagtcactcttcactaaagagctcgaacacgcgcttgaaaagaacgaagtcgatctggtggtccatagcctgaaggatttgccaactgtcctgcccccagggttcactatcggcgcaatttgcaagagagaaaacccccacgatgcggtggtgtttcacccgaagtttgtggggaaaacccttgaaacgctccctgaaaaaagcgtggtgggtacttcgtcccttcgccgcgcggcacaactccaacgtaagttcccccacctggaatttagatcgattaggggtaatcttaatacgagacttagaaaactggacgaacagcaagagttttcggcaatcatccttgcaactgcgggtctgcagcggatgggatggcataaccgggtgggtcaaattctgcatcctgaggagtgcatgtacgcagtggggcagggcgccttgggagtcgaagtgcgagcaaaggaccaagatattctcgacctggtgggcgtcttgcatgaccccgaaactcttctgcggtgtattgctgagcgagcattcctgagacatcttgagggtggatgctcagtcccagtcgcagtacatactgcaatgaaggacggtcagctctatctcaccggaggcgtctggtcgcttgacgggtccgattccattcaggaaactatgcaagcaactatccatgtgcccgcacaacatgaggacggtccggaagatgatccccaactggtgggcattaccgcccggaatattcctcgtggacctcagctggcagcgcagaaccttggcatttcactggccaatcttctgctttccaaaggagcgaagaacattcttgatgtcgcacgacaactgaacgacgctcac

SEQ ID NO: 250518 - DNA, 1083 bp, synthetic construct
  misc_feature 1..1083: note = Description of Artificial Sequence: Synthetic coding sequence
  source 1..1083: mol_type = other DNA
atgtcagggaacggaaacgcagccgcgaccgccgaggagaattctcctaagatgcgggtcattcgggttggtacaaggaaatctcagctggccagaattcaaaccgactctgtggtcgcgaccttgaaggcctcataccccggacttcagttcgagatcattgctatgtcaactaccggcgataaaattctcgatactgccctcagcaaaattggagaaaagtctctgttcactaaggagctagagcacgccctcgaaaagaacgaagtggatttggtggtgcactccttaaaggatcttccaaccgtactgcccccaggctttaccatcggagccatctgcaagagagagaatccccacgatgctgtagtattccaccccaagtttgtggggaagacactggagactctcccggagaagtctgtcgttgggacatccagcttaaggagggcagcccagctgcagcgaaaatttcctcacctagaattcaggtctatcagggggaatttaaatactcgcctccgaaaactcgacgaacagcaggaattcagcgcaataatactggccacagcgggattgcagagaatgggctggcacaatcgcgtagggcagatcctgcatccggaagagtgtatgtatgccgttgggcagggggctttaggagtagaggtccgtgccaaggaccaggacattctggacctcgtcggggttctgcacgatccagaaacgttgctgcggtgcatcgcagaacgggcctttctccggcacctcgaaggtggttgctcggtgcccgtggccgtccataccgcgatgaaagacggtcagttgtatctgacaggaggcgtgtggtcactggatggatctgactctatccaggagactatgcaggcgacaatccacgtcccagcacagcatgaagacggccctgaagacgatccacagcttgtaggcatcacggcaagaaacatccccagggggccgcaactggcggcccaaaacttgggaatcagtctggcgaatctgttgctgtcaaagggggcaaagaatatcttggacgtcgcaagacaattgaatgacgctcat

SEQ ID NO: 250519 - DNA, 1083 bp, synthetic construct
  misc_feature 1..1083: note = Description of Artificial Sequence: Synthetic coding sequence
  source 1..1083: mol_type = other DNA
atgtctggcaacggtaacgctgcggcgacagctgaagagaactctcccaaaatgcgcgtaatccgtgtgggcacaaggaaatcccaattggcccgtatacagaccgattcggtggttgccaccctgaaggcgagttaccctggtctccagtttgagattattgctatgtcaacgacgggcgacaaaattctcgacaccgccttgtccaagatcggtgagaaaagcttgttcacaaaggagttagaacacgcgttagagaagaatgaagtcgatctggtagtacacagcctcaaggatctgccaaccgtcctgccgcccggattcacgattggagccatttgcaaacgcgagaacccgcatgacgccgtggttttccatccgaagttcgtcggcaagaccctcgagaccctgccggagaagtctgtggtaggaaccagtagtttgcgcagggctgcgcagctgcagcgtaaattcccacacttagaattccgctcgattcgcggcaacttgaatacccgtctaagaaaattggatgaacagcaggagttttcggccatcattctggcaaccgccggactccagcggatgggctggcacaatcgtgtgggccagatattgcacccagaagaatgcatgtatgcagtcgggcagggcgccctgggagtggaggtcagggccaaagatcaagatatcctggatctggtgggcgtgctgcatgaccccgagactcttctccggtgcatagctgagagagccttcctacgccatcttgagggaggctgctcagtgcccgtcgccgtgcacacagccatgaaggacggccaattgtacctaactggcggcgtttggtcgctggatggttcggatagcatccaggagaccatgcaggctaccattcacgtgccagcccagcacgaggatggccctgaagatgatccgcagcttgtgggaatcaccgcccgtaacattccacgaggaccccagctagcggctcagaatttaggcatttccctggccaatctcttgctgtctaaaggcgccaagaacatcctggatgtagcacgccagctgaatgatgcccat

SEQ ID NO: 250520 - DNA, 1083 bp, synthetic construct
  misc_feature 1..1083: note = Description of Artificial Sequence: Synthetic coding sequence
  source 1..1083: mol_type = other DNA
atgtccggaaacggcaatgcagctgcaaccgcagaagagaattcgcctaagatgcgcgtcatcagagtcggaaccaggaaaagccagctcgctaggattcagactgacagcgtggtggcaaccttgaaggcatcctatcctggccttcaatttgagattattgcaatgtctaccaccggtgacaaaattctggatacggccttgagcaagatcggtgaaaagtcactgtttaccaaggaactggaacacgccctcgaaaagaacgaagtggatcttgtcgtccattcgctgaaggatttgccgaccgtgctcccgccaggtttcaccataggggcgatatgtaaaagagaaaatcctcatgacgcggtggtgttccatcccaagtttgtgggaaaaacccttgagactctgccagaaaaatcggttgtgggcacctcctcgctgaggagggcggcacaactccagaggaagtttccacatctggagtttcggtcaattcgtggaaaccttaacacgagacttcggaagttggatgagcaacaggaattctcagcgattattctcgcaacggctggtctgcagcgaatgggctggcataatcgggtcggccagatacttcatccagaggaatgcatgtacgcagttggtcagggggcactgggagtcgaggtgcgcgcgaaagaccaagatatcctcgaccttgtgggtgtgctgcacgaccccgaaacgctcctgcgctgcattgcagagagagcattcctgagacaccttgaaggtggatgttcggtgccggtggcagtccataccgcgatgaaggatggacagctgtaccttactggaggcgtgtggtccctggatggctcagattcgatccaagagactatgcaagccactatacacgtccccgcacaacacgaagatggaccggaagatgatcctcaactggtgggaattacggcgagaaatatccctcgcggtcctcaactggccgcccaaaacctcggtatcagcttggcaaaccttctgcttagcaagggcgccaagaacatattggatgtggcgaggcaactgaacgacgcacat

SEQ ID NO: 250521 - DNA, 1083 bp, synthetic construct
  misc_feature 1..1083: note = Description of Artificial Sequence: Synthetic coding sequence
  source 1..1083: mol_type = other DNA
atgtctggcaatggaaacgctgcggcgaccgctgaagagaactcgccgaaaatgcgcgtgatccgcgtcggaactagaaagtcacaactggccagaatccaaaccgactcggtcgtggctaccctgaaagcgtcctaccccgggctgcagttcgagatcattgccatgtctactacgggtgacaagatcctcgacaccgcactgtcaaagatcggagagaagtcactcttcactaaggaactggagcacgccctggagaaaaacgaagtcgacctggtggtccactctctgaaagacttgccgaccgtgcttcctccaggattcaccatcggagcaatctgcaagcgcgaaaacccccacgatgcagtcgtttttcatccaaagttcgtgggaaagactctcgaaacgctccctgaaaagtcagtggtcggtacctcatccctgagacgagccgcccagctccaaaggaagttcccgcatctcgaattccgctcaatccgaggtaacctcaacacccgcctgcgcaagctggacgaacagcaggaattctccgctatcattctcgctaccgccgggttgcagcggatgggctggcacaacagagtgggtcagattttgcacccggaggaatgcatgtacgcagtgggacaaggcgccctcggggtggaagtgcgggccaaggatcaggatatcttggacctcgtcggagtcctgcacgacccggagactcttcttcggtgtatagcggaacgagcctttctcagacatttggagggaggttgctcggtcccggtggctgttcacactgccatgaaggatggacagttgtacctcactggaggcgtgtggagcttggatgggtccgattccatccaggagactatgcaagctaccatccatgtccccgcccaacatgaggacggccctgaagatgacccgcagctggtgggaatcaccgcccgcaacatcccgagaggaccacaactggccgcccagaacctgggtatctccctcgcaaatctcctgctcagcaagggcgccaagaacatcctggatgtcgcaagacaactcaacgatgcacac

SEQ ID NO: 250522 - DNA, 1083 bp, synthetic construct
  misc_feature 1..1083: note = Description of Artificial Sequence: Synthetic coding sequence
  source 1..1083: mol_type = other DNA
atgagtgggaatggtaacgcagcagctaccgctgaagagaacagccccaaaatgcgcgtaatcagggtaggaactcgcaaaagccaactggcccggatacaaaccgattcagtggtggccaccctgaaagcaagttaccccggcctgcaatttgagattatcgcaatgtcaaccacaggtgataaaatcctggacaccgctttgagcaagattggcgaaaagagtctgttcaccaaggaactcgagcatgcgctcgagaagaacgaggtggacctggtagtgcactccctcaaggacctgccgaccgtgctgccacccgggttcaccatcggcgcgatctgtaaacgcgagaacccccatgatgcggttgtgtttcaccctaaattcgtgggtaagaccttggagacactgccagaaaagagcgttgtcggaacctcaagcctgcgacgagcggctcagctccagaggaagtttcctcacctggaatttcgctctatcagagggaacctgaacacccgcctcaggaagctcgatgaacagcaagaattttcagcgatcattctggccacagcgggcctgcagcgaatgggttggcacaacagggtgggccagatcctgcatcccgaagagtgcatgtatgccgtgggacagggcgcactgggggtggaagtgagggccaaggaccaggatatcctggatctggtgggagtgctgcatgatccggagactctcctgcgatgcatcgcagagagggcatttcttaggcatcttgagggcggctgttccgtgcccgttgctgtgcacacagccatgaaggacggccagctctacctgaccggcggggtgtggtccctggacgggagtgactcaatacaagagaccatgcaggccactatacacgtgcccgcccaacacgaggacgggccggaagacgatccccagctggtcggaatcactgccaggaatatcccccgaggccctcagctggctgcgcagaatctgggaatcagcctggcgaatcttctgctgtcaaagggagccaaaaatatactcgatgttgcccgacagctgaacgatgcccac

SEQ ID NO: 250523 - DNA, 1083 bp, synthetic construct
  misc_feature 1..1083: note = Description of Artificial Sequence: Synthetic coding sequence
  source 1..1083: mol_type = other DNA
atgagcgggaatggaaacgcggccgcaaccgcagaggagaattcaccaaagatgcgggtgatacgggtgggaacgagaaagtcacagctggccagaatccagactgacagcgtggtggctaccctgaaggcctcctacccggggttgcaattcgagatcatcgctatgtctacgaccggagacaaaatcctggacactgcgctgtcgaagatcggagagaaatcattgttcactaaagagcttgaacacgcgttggagaaaaacgaggtggatctcgtggtccatagcctgaaagacctgcctaccgtgctgccaccaggattcaccattggagccatctgcaagcgcgaaaatccgcatgacgctgtcgtctttcacccgaagtttgtcggaaaaaccctggaaaccctgccagagaagtcggtggtgggtacttcgtccctgcggcgcgctgcccaactgcaaagaaagttcccccatctggagttccggagcattcgcggaaatctgaacactagactccgcaagctcgacgaacagcaggagttctcggccatcatcctcgcgacggccggtttgcagcgcatgggatggcacaacagagtgggacagatattgcatccagaagagtgtatgtacgcggtcggccaaggcgcgctgggtgtagaagtgagagctaaagaccaggacatcctcgacctcgttggagtgctgcatgatccggagactctgctgcggtgcattgcagaaagagcgttcctgcgccacttggagggaggctgcagcgtcccggtggcagtgcacaccgccatgaaagatggccagctctatctgaccgggggcgtttggtcacttgacggtagcgactccatccaggaaactatgcaagcgaccatccatgtcccggcgcaacacgaagatggacccgaggacgaccctcaattggtcggaatcactgcaagaaacatcccacgggggccgcaactggccgcacagaacctcggaatttcacttgcgaacctgctgctgagtaagggtgcaaagaatattctcgacgtggcccgccagctgaatgacgctcat

SEQ ID NO: 250524 - DNA, 1083 bp, synthetic construct
  misc_feature 1..1083: note = Description of Artificial Sequence: Synthetic coding sequence
  source 1..1083: mol_type = other DNA
atgagcggcaacggtaacgctgcagcaaccgcagaggaaaactcgccaaaaatgcgggttattagggtgggaacgcgaaagtcacagttggcgaggatccagactgattccgtggtcgctaccctgaaggcatcctaccctgggctccagtttgagatcattgctatgtcgaccactggagataagatactggataccgcactgagcaagattggcgaaaagtccctctttaccaaggaacttgaacatgcactggagaagaacgaggtggatctggtggtgcattccctgaaagacctccctacggtgctgccccccggcttcactattggagctatttgtaagcgcgagaatcctcacgatgcagtcgtgtttcaccctaagttcgtgggaaagactctggaaactctcccggaaaagtcggtggtggggacctcctcattgcggcgggcagcacaacttcagcggaaattcccacacctggaattccgtagtattcgcggtaatctgaacacccggctgcggaagctggatgaacaacaggaattttcggccattattctggcaactgcgggactccagcgcatggggtggcataacagggtggggcagattctccaccccgaggaatgcatgtacgccgtgggccagggcgcacttggagtggaggtgagggcaaaagatcaagatattctggatcttgtcggagtccttcatgaccctgaaaccctgctgcgatgtattgcagaaagagcctttctccgtcatctggaaggtggttgttcggttccagtggcagtccacactgccatgaaagacggacaactttacctcaccgggggcgtgtggtcgcttgacggtagcgactcgatccaagaaactatgcaagctaccatccatgtcccagctcaacatgaggatggcccggaagatgaccctcagcttgtgggaattaccgcacgcaatattcctagaggcccccaactggcggcacaaaaccttggtatatcactggcaaatctgctcttgtccaaaggagccaagaatatactcgatgtggcacgccagcttaacgatgcacat

SEQ ID NO: 250525 - DNA, 1083 bp, synthetic construct
  misc_feature 1..1083: note = Description of Artificial Sequence: Synthetic coding sequence
  source 1..1083: mol_type = other DNA
atgagcggcaacgggaacgccgccgctaccgccgaagagaactcacccaagatgagggtcatccgggtaggtaccagaaagagtcagctagcccgaatacagactgactcagtggtggccacgctgaaagcatcctatccaggcttacaatttgaaattatagctatgtcaaccaccggggataagattctggatacggccctgtcgaagataggagagaagtcactgttcactaaggagctggaacatgctctggagaaaaacgaggtggacctcgtggtgcacagcctaaaggacctgcctacagtattgccaccaggttttacaattggggccatttgtaagcgagaaaatccccacgacgctgtggtgttccaccctaagttcgtgggaaagaccctggagacactgcctgaaaagtctgtcgtcggaacaagctctctacggcgcgccgcgcaactccaaagaaagttcccccatctcgagtttcggagcatccgcggaaacctcaataccaggctgcgcaaactggacgagcagcaagagttttctgcgatcattctagcgacagccggcctccagcgcatgggatggcataacagggttgggcagatcctccaccccgaggaatgtatgtacgctgtgggccagggtgcactgggggttgaggtgagagccaaagatcaggatattttggatctcgtcggtgttctgcacgaccccgaaacccttcttaggtgcatcgctgagcgtgcattcttgagacacctcgaaggaggatgcagtgttcctgtggctgtgcacaccgcaatgaaagatggacagttgtatctcacaggcggtgtgtggtccctcgacggtagcgactcaatccaggaaacgatgcaggctacgatccacgtcccggctcagcacgaagatggcccagaagatgacccacagttggtcgggatcaccgcacggaacattcctcggggcccgcagttggccgctcaaaatctcggtatttcactggctaatttgctactgtccaaaggtgcaaagaacattctcgatgtggccaggcagctgaatgacgcccac

SEQ ID NO: 250526 - DNA, 1083 bp, synthetic construct
  misc_feature 1..1083: note = Description of Artificial Sequence: Synthetic coding sequence
  source 1..1083: mol_type = other DNA
atgtcgggtaacggaaacgcggcggccactgctgaagaaaactcaccgaaaatgcgcgtaatccgcgtgggaactagaaagtctcaactcgcaagaatccagactgactccgtcgtggctactttgaaggcctcctacccaggactgcaatttgaaatcatcgctatgtcgaccaccggcgataagattctcgacactgccctgagcaagatcggagaaaaatcgctgttcaccaaggagctggagcacgcgctcgagaaaaatgaagtcgacctggtggtgcattcgcttaaagatcttccgaccgtgctcccacccgggttcactatcggagccatctgcaagagggagaatccccacgacgcagtggtgttccacccgaaattcgtcggcaagaccctggagactctcccagaaaagtcggttgtgggtaccagttcgctgcggcgcgcagcacagctgcagcgtaaattcccacacctggagttcaggagcattcggggcaatcttaatactaggctccgcaaattggacgaacagcaggagttttcagccattattctggccacggcagggctgcaacggatgggctggcataatagagtgggacagatcctccatccggaagagtgcatgtacgcagtagggcaaggagccctgggggtggaggtccgggccaaggaccaagatatcctggacctggtgggcgtgctccacgacccggaaaccctcttgcggtgcattgccgaaagagcgttcctgcggcacctggagggaggttgttcggtgcctgtggcggtccataccgcaatgaaagacggccagctgtacctcactggcggcgtgtggtcactcgacggttcggattcaatacaggaaaccatgcaggctaccatccacgtgccggctcaacatgaggacggtcctgaggatgacccgcagttggtgggaatcaccgcgcgcaacattccgaggggaccgcaactggcagcccagaatctgggaatttccctggccaacctgctcctctcaaaaggtgcgaagaacatcctcgatgtcgctcgccaactgaacgatgcacac

SEQ ID NO: 250527 - DNA, 1083 bp, synthetic construct
  misc_feature 1..1083: note = Description of Artificial Sequence: Synthetic coding sequence
  source 1..1083: mol_type = other DNA
atgtcaggaaacggaaacgccgccgcgaccgctgaggaaaactccccaaagatgagagtcattcgcgtgggcactcggaaatcacagttggcccggatccagaccgactctgtggtggccacccttaaggcttcatacccaggcctgcagtttgaaatcattgccatgtcgaccacgggtgacaagatccttgacactgcgctgtccaagatcggagaaaagtctctgttcaccaaggagttggaacacgccctcgaaaagaatgaggtcgatctggtggtccattcactgaaggacctccctaccgtgctcccacccgggttcacgatcggagcaatctgcaaacgcgaaaatccgcacgacgccgtggtgtttcatccgaagtttgtgggaaagactttggaaaccttgccggaaaagtccgtcgtcggaacttcctcacttcggcgggcggctcagctgcagcgcaagttcccccaccttgagttcagatcgattaggggtaatctgaacactcgtctgcggaagttggacgagcagcaggaattctccgcgattatcctggcgacggccggtctgcaacggatgggctggcataaccgcgtcggacagatcctccacccagaagaatgcatgtacgctgtcgggcagggagcactgggggttgaagttcgcgcaaaggatcaagatatcctggacctcgtgggggtgctccacgacccggaaacgctgttgcgctgcattgcagaacgcgccttcctgagacatctcgagggtggatgttccgtgcctgtggctgtgcacaccgctatgaaagacggacagctgtatctcaccggaggcgtgtggtcgctcgacggatcggacagcatccaggaaacgatgcaggccaccatccacgtccctgcccaacacgaggacggacccgaggatgatccacagctggtcggaatcactgccagaaacatcccaaggggaccccagctggccgcgcaaaatctgggaatcagcctcgccaaccttctgctttcgaaaggagcgaaaaacatcctcgatgttgctcggcaactgaatgacgcccat

SEQ ID NO: 250528 - DNA, 1083 bp, synthetic construct
  misc_feature 1..1083: note = Description of Artificial Sequence: Synthetic coding sequence
  source 1..1083: mol_type = other DNA
atgtcagggaacggtaatgcagctgcgaccgctgaagaaaactctccaaagatgagagtcatccgagtgggaactaggaagtctcagctggcaaggatccaaaccgatagtgtggtagccacactcaaggcatcatatcctggactccagtttgagatcattgcaatgagcacaaccggagataagattctggacaccgctctgagtaaaatcggtgagaaatccctctttaccaaagagctggaacacgccctcgagaagaacgaagtggacttggtggtccattcactcaaagaccttcccacagtattgccgccaggattcacaatcggcgcgatttgcaaaagagagaaccctcacgacgcagtggtctttcacccaaaattcgtgggaaaaaccctggagactctgcccgagaagtccgtggtgggaacttctagcttgcggagagcagctcagctgcagaggaagtttccgcacctcgagtttaggtctatccggggaaatctgaatacgagactgcggaagcttgatgaacaacaagagtttagcgccattattttggctactgctggacttcagagaatgggttggcacaatcgggtggggcagatcctgcaccctgaggaatgcatgtatgcagtcggacagggcgccctgggcgtggaggtgagagctaaggatcaggatatccttgacttagtgggcgtcctgcatgatcctgagacacttctcagatgtattgccgagcgggcattcttacgacaccttgagggcgggtgtagtgtccctgtggctgtccatacagctatgaaagacgggcagctgtatctcacaggaggagtgtggagtctcgacgggtcagactcaatccaggagacgatgcaggccaccattcacgtgcctgctcagcacgaggatggtcctgaggatgatcctcagttggtgggtatcacagccaggaacatccctcgtggaccgcagctggccgcccaaaacctggggataagcttggctaaccttctgctgagcaaaggagctaaaaacatcctggacgtcgcccggcaactcaatgatgctcac

SEQ ID NO: 250529 - DNA, 1083 bp, synthetic construct
  misc_feature 1..1083: note = Description of Artificial Sequence: Synthetic coding sequence
  source 1..1083: mol_type = other DNA
atgagcgggaacgggaatgctgccgcaacagctgaggagaattccccgaaaatgagggtcatccgagtcggcactcgaaaaagccagctggcccgtatccagaccgattcggttgtagctactctaaaagcatcataccctggcttacagtttgagatcattgcaatgtcaacaaccggagataaaatacttgatacggccctctctaagatcggggagaagtcactgtttacaaaagagttggagcatgcactggaaaagaacgaggtggatctagtggtacacagtctgaaagatctgcccacagttctgcccccgggatttacaataggagccatttgcaagcgggaaaacccgcatgatgcggtggtcttccatccaaaattcgtcggaaagaccctagagacgctgccggaaaaaagcgttgtcggaacttcctcactgcggcgggccgcccaattgcagcgaaaattccctcacttagagttccggtccatccgaggtaacctgaacactaggttacggaagttggatgaacaacaagagttctcagccatcatcctcgccactgccggccttcaaaggatggggtggcacaatcgcgtgggtcagatactccaccccgaggaatgtatgtacgcagtcggtcagggagctctcggagttgaggttcgcgcgaaggatcaggatattctggatctggtcggagttcttcacgacccagagacactgttgcgctgtattgcggaacgggcgttcttacgacacctcgaaggcggctgctcagttcctgtcgcggttcacacggctatgaaagacggacagctttacctgacaggaggcgtttggtcactcgatggatcagacagcattcaggaaacgatgcaggcaacgattcatgttccagcccagcatgaggacggtcctgaggacgaccctcagctggtgggtattactgcacggaatattcccagggggccccagctggccgcccaaaatctaggcatatccctggcaaatctgctcctgagtaaaggcgcaaagaatattctcgacgtcgccaggcagctcaacgacgcacac

SEQ ID NO: 250530 - DNA, 1083 bp, synthetic construct
  misc_feature 1..1083: note = Description of Artificial Sequence: Synthetic coding sequence
  source 1..1083: mol_type = other DNA
atgagcggcaacgggaacgccgcggccacggctgaggagaattctcctaagatgcgcgtcattcgggtggggaccaggaaatctcagttggcccgcatccagacggactctgtggtcgcaacacttaaagctagctatcctggtctgcaatttgaaataatagctatgagcaccacaggcgacaagatactggacacagctctcagcaaaatcggcgagaaatctctgttcactaaggaactggagcacgccctcgagaaaaatgaggtggaccttgtggtgcacagcctgaaggacctgcctaccgtcctgcctccggggttcacaataggggctatctgcaagagggaaaatccgcacgatgccgttgtgttccacccaaaatttgtagggaagactctggagaccctgcccgagaagagcgtggtgggaactagttctttacggcgcgccgcccagcttcagaggaagttcccacacctagagttcagatcaatccgcggcaacctgaatacaagactgcgtaagctggatgagcagcaggagttctctgctataatactcgccactgctggcttgcagcggatggggtggcacaatcgcgtggggcagattctgcaccctgaagaatgcatgtatgccgttggacagggcgctcttggagtagaagtccgggccaaagaccaggacatcttggatttggtcggggtactgcacgatcccgagacgcttctgcgctgcattgcagaaagagcctttctgcggcacctggaaggcggctgttctgttcctgtcgcagttcacaccgccatgaaagatgggcagctctatctgacaggtggcgtgtggtccctagatggcagcgactctatccaggagaccatgcaggccacaatccatgtgcctgcccagcacgaagatggaccggaggacgacccacagttggtcggcattaccgccaggaacataccacgggggcctcagttagccgcccaaaatctagggatttccctcgccaatctattactgtctaaaggagccaagaatatactggacgttgcacgtcagctgaacgatgcacac

SEQ ID NO: 250531 - DNA, 1083 bp, synthetic construct
  misc_feature 1..1083: note = Description of Artificial Sequence: Synthetic coding sequence
  source 1..1083: mol_type = other DNA
atgagcggaaacgggaatgcagccgctaccgctgaggagaacagccccaaaatgagggtgatccgcgtgggtacccgtaagagtcagttagcccgcatccagactgattctgtcgtagccactcttaaggcctcttatcccggtttgcaattcgagatcattgctatgtctactacaggagacaagattctagacactgcattgtctaagataggagaaaagagccttttcaccaaggaactggagcatgccctggaaaagaatgaagtagacctggttgtccacagcctgaaggatctaccaacagtgcttcctcctggattcacaatcggtgctatatgtaagagagaaaacccacacgatgccgttgtgttccaccctaagtttgtgggaaagacactggaaaccctccccgagaaaagtgtggttggtacatcgtcattacgccgggccgcccagttgcagcggaaatttcctcatcttgaattcagaagtatccggggcaatttgaatactaggcttcggaagctggatgagcagcaggaatttagcgccattattcttgccaccgctggcctgcaacgcatgggttggcacaatagagtgggacaaatcttgcaccccgaggagtgcatgtacgccgttgggcaaggtgccctcggtgttgaagtgcgggcgaaggatcaggatattctggacttggtgggtgtattacatgacccggaaactctcctgagatgcatagccgaacgtgcctttcttagacatctcgaggggggctgcagcgtgccagtagccgtgcacacggctatgaaggacggacaactgtacctgactgggggcgtgtggagcttagatggatcagatagtatccaggaaactatgcaggctactatccatgtgccagcacagcatgaagacggtcctgaagacgatccacagctggtgggaatcacagcacgtaatatcccccgaggtccccagctggcggcccaaaacctgggaatcagtcttgccaatctgttgctgtctaagggcgcgaaaaacatcctcgatgtggctcggcaactcaatgatgcccac

SEQ ID NO: 250532 - DNA, 1083 bp, synthetic construct
  misc_feature 1..1083: note = Description of Artificial Sequence: Synthetic coding sequence
  source 1..1083: mol_type = other DNA
atgagcggaaacggaaacgcggccgctacggcggaagagaattcgccgaagatgcgcgtcatcagagtcggcactcggaagtcgcagctggctcgcattcagaccgactccgtcgtcgccactctgaaggcctcttaccctggcctgcagtttgaaattatcgccatgagcactactggagacaagatccttgacaccgctctctctaaaataggcgagaagtccctgttcacgaaggaactggagcatgccctcgagaagaatgaggtggatctggtcgtgcactcactcaaggacttgcctactgtgctcccgccgggatttaccatcggagccatctgtaaacgggaaaacccgcatgacgccgtggttttccatccaaaatttgtgggtaagaccctggaaactctgccggagaagtcagtggtgggaacctcgtccctgcgccgcgcggctcaactccagaggaagttcccccaccttgaattccgctccattcgcggaaatctgaacactcgcctgcgcaagctcgatgaacagcaggaatttagcgcgatcatcctggcgacggcgggactgcaacggatgggatggcataaccgggtgggacagatcctccatccggaggaatgtatgtacgctgtcggacagggagcgctgggagtggaagtcagagccaaggaccaagatatccttgatctcgtgggcgtgctgcacgatcctgaaaccctgctcagatgcatcgctgaacgcgcctttctcaggcacctggaaggaggatgctcggtgccagtcgctgtgcacactgcgatgaaggatgggcagctgtacttgaccgggggagtgtggtccctggacggcagcgactcgatacaagaaactatgcaagcaactatccacgtcccagctcaacatgaggacggtcctgaagacgacccccaattggtggggatcaccgcgcggaacatcccgcgcggaccgcagctggctgcccaaaatctcggcatctcacttgcgaatttgctcctgagcaaaggtgccaagaatatcctcgatgtcgcccggcagctcaatgatgctcat

SEQ ID NO: 250533 - DNA, 1083 bp, synthetic construct
  misc_feature 1..1083: note = Description of Artificial Sequence: Synthetic coding sequence
  source 1..1083: mol_type = other DNA
atgagtgggaatggaaacgctgccgctacagccgaagaaaattcacccaaaatgagggtgatacgggtggggactcggaaatcgcagctggctagaatccagactgacagtgtagtggccacattgaaagcctcttatcctgggctccagtttgagatcatcgcaatgtccactactggagataagatcctcgatactgccctttctaagattggagagaaatctttattcactaaagagcttgagcacgcactggaaaagaatgaagtagacctggttgtccatagtcttaaagatctgccaactgtacttccccctgggttcactataggagcgatttgtaaacgggaaaacccgcacgatgccgtggttttccatccaaaattcgtagggaaaacactcgaaacacttcctgagaaatccgtagtgggaacttcctcactaaggagggccgcgcagctccagcggaagttcccacatttagaattcaggagtattcgaggaaatttaaacacaagattacgcaaactcgatgagcaacaggaattttcagccatcatactcgccacagctgggctccagcgaatggggtggcataatcgggttggacaaattctacatcctgaagaatgcatgtatgccgtcgggcagggagcacttggggttgaagttagggcaaaagatcaggatatactggatctggttggagtgctacacgatccagaaacattacttagatgtattgctgaacgcgcctttctcagacacctagaaggggggtgttccgtccctgtggctgtgcatacagcaatgaaggacgggcagctttacctcactggaggagtgtggtctctagatggatctgattccatccaggaaacaatgcaggctacaatacacgtccccgctcagcatgaagatgggccagaagatgatcctcagctggtagggattactgcaagaaatatccccaggggaccccagcttgctgcccagaacctggggatcagtctggcaaaccttctgctaagtaaaggagccaagaatatcctcgacgtcgcacggcagcttaatgacgctcac

SEQ ID NO: 250534 - DNA, 1083 bp, synthetic construct; identical to SEQ ID NO: 250486
  misc_feature 1..1083: note = Description of Artificial Sequence: Synthetic coding sequence
  source 1..1083: mol_type = other DNA

SEQ ID NO: 250535 - DNA, 1083 bp, synthetic construct
  misc_feature 1..1083: note = Description of Artificial Sequence: Synthetic coding sequence
  source 1..1083: mol_type = other DNA
atgtcgggaaatggaaacgccgctgccacggccgaagagaattcacctaaaatgcgggtgatccgggtagggacgcgcaagtcccagctggcacggattcagactgactccgtggtggccactctgaaagcgtcgtacccgggtctgcaattcgagatcatcgctatgtcaaccactggcgataagattctggacaccgctctgtccaagatcggagaaaagagcctgttcactaaggaactcgagcatgctcttgagaaaaatgaggttgatctggtggtccactctctcaaggatctgccaaccgtacttccgccgggattcactatcggtgccatttgcaagagggagaacccacacgacgccgtggtgttccaccccaaatttgtgggcaagacgctcgagactcttcccgaaaagagcgtcgtgggaaccagctcactgagacgggctgcacagcttcaacgaaaattcccacatctcgagtttcgttccatcaggggtaatctgaacacccgcctgcgcaaacttgacgaacaacaggaattctctgcgatcatcctggccactgcgggactccagcgcatgggatggcacaacagagtcggacaaatcctgcatccggaggaatgcatgtacgccgtggggcagggcgctctgggcgtcgaagtgcgggccaaagaccaggacatcctcgacctggtgggagtcctccacgaccccgaaactttgctcagatgcatagcggagcgtgctttcctgcgacacctggaaggagggtgttccgtcccggtggccgtccataccgccatgaaggacggtcagctttaccttaccggaggcgtgtggagcctggatggatcggattcgatccaggaaacgatgcaggccacgatccatgtccccgcacaacatgaggatggccctgaggacgatccacagctggttggcatcaccgctagaaacatcccccggggtccgcaattggcggcccaaaacctcggaatcagcctcgcgaaccttctgctctcgaagggtgcgaaaaacattctggatgtggccaggcaattgaatgacgcgcac

SEQ ID NO: 250536 - DNA, 1083 bp, synthetic construct
  misc_feature 1..1083: note = Description of Artificial Sequence: Synthetic coding sequence
  source 1..1083: mol_type = other DNA
atgtcgggcaatggaaatgccgcagctactgctgaggaaaactcacctaagatgcgcgtgatccgggtgggaacaaggaaatctcagctcgcaagaatacaaactgacagcgtcgtcgctactctcaaggccagctatccgggcctacagttcgaaatcatagcgatgagcacgacgggagacaagattctggatactgcactcagtaagatcggcgagaagagcctgttcacaaaggagctggagcacgcgcttgaaaaaaatgaggtcgatctggttgttcactcattgaaagacctacccactgtccttccaccaggttttaccatcggcgccatctgtaaacgagaaaaccctcacgatgctgttgtgttccaccctaaattcgttggcaagactctggaaacacttccagaaaagagcgtggtgggaacatcaagtctcaggagagccgcacaactgcagagaaagtttccacatttagaattccgcagcattcgcgggaacctgaataccagactgcgcaagcttgatgagcagcaggagttttccgctatcattctggcaacggcaggcttacagcggatgggttggcacaaccgagtaggccaaatcctccacccagaggagtgtatgtacgccgtcggccaaggggcccttggggtcgaggttcgcgccaaagatcaggacatcctcgacctggtgggtgtcctgcacgatcccgaaacattgcttagatgcatagcggagcgcgcgttcctccgtcacctggaaggcggttgctccgtgcccgtggcagtgcatactgcaatgaaagatggtcagctctatttaaccggcggtgtctggagcctcgatggctcagattctattcaggaaacaatgcaggcaaccattcacgtgccagcccagcacgaagatggccccgaggacgatcctcaactggtgggcatcacagcaaggaacatcccgaggggaccacagctggccgcccaaaacctgggtattagccttgcaaatttgctcctctcaaaaggggccaaaaatattcttgacgtcgcaagacagcttaatgatgcacac

SEQ ID NO: 250537 - DNA, 1083 bp, synthetic construct
  misc_feature 1..1083: note = Description of Artificial Sequence: Synthetic coding sequence
  source 1..1083: mol_type = other DNA
atgtcgggcaatggtaacgctgcagcaaccgcggaggaaaactcaccgaaaatgagagtgatccgggtcggaacgcgcaagagccagcttgcacgcatccagaccgatagcgtcgtggcaaccttgaaggcaagctaccctgggctgcagttcgagattatagccatgtcgaccactggcgacaagatacttgataccgccctcagcaaaatcggtgaaaagtcactcttcaccaaagaacttgaacacgcactggagaagaacgaggtggatctggttgtgcattcacttaaggacctccccaccgtgcttcctcctggattcaccattggagcaatttgtaagagagagaatcctcacgatgccgtggtgttccatcctaagtttgtagggaaaacgctcgaaaccctgccagagaaatcggttgtgggaactagctcccttcggcgcgcggcacaactgcagcgtaagttcccccatcttgaatttagatcgattagaggaaatcttaatacccgtctgcgaaagctggatgagcagcaagaattcagcgcaattatcctggccaccgcaggtctgcaacgcatgggatggcacaacagagtgggccagattctgcatccagaggaatgtatgtacgcggtgggtcaaggggcactgggggtggaagtgagagcgaaggaccaggatatcctcgatttggtcggagtcctgcatgatcccgaaaccttgctgcgctgtatcgcggagcgggcatttttgcggcatctggaaggcggatgcagcgtgccagtggcggtccatactgcaatgaaggatggacagctttacctgactggtggggtctggtcgctggacggtagcgattccatccaggagactatgcaggcgaccatccatgtcccggcccagcacgaagatggaccagaggacgatccccagctggtggggattaccgcacgcaacataccccgcgggcctcaacttgcagcacaaaacctcggcatttcccttgcaaatctgctgctgtcaaagggagcaaagaacatacttgatgtcgcaagacaactgaatgacgcccat

SEQ ID NO: 250538 - DNA, 1083 bp, synthetic construct
  misc_feature 1..1083: note = Description of Artificial Sequence: Synthetic coding sequence
  source 1..1083: mol_type = other DNA
atgtcaggaaacgggaacgcagcagcaaccgcagaagaaaactcaccaaagatgcgggtgatccgagtgggcaccagaaaatcacaactggcacggatccagaccgattccgtggtggccaccctgaaagcaagctacccgggcctgcaattcgaaatcattgccatgtcgaccactggtgataagatcctggacaccgccctgagcaagatcggggaaaaatcactgtttaccaaggaacttgaacacgctcttgaaaagaacgaagtggaccttgtggttcacagcctcaaggatcttcctaccgtcttgccacccggatttactattggagcaatctgtaagcgtgaaaacccacacgatgcggtggtgtttcatccaaaattcgtgggaaagactctggagactcttcctgagaaatcggtggtgggcaccagctccctccgaagagcagcacagcttcaaaggaagtttccacatctggaatttcgctcaattcggggtaatcttaacacgagactccggaagctcgatgaacaacaagagttctcggccattattctggcaaccgcagggctgcagcgtatgggatggcataatagagtgggtcagatacttcatcccgaagagtgtatgtacgccgtcggtcaaggagcacttggtgtcgaagtgcgggcaaaggaccaagatattctggacttggtgggtgtgctccatgatccagaaaccttgttgagatgtatcgcagaacgcgcattcctgaggcatctcgaaggcgggtgctcggttcctgtggcggtgcacaccgctatgaaagacggacaactgtacctgaccgggggtgtctggagcctggatggatcggattccatccaagaaactatgcaagccactatccatgttcccgctcaacatgaggacggtcctgaggatgaccctcaactggtgggtatcaccgcaaggaacatcccacgcgggccacagctggcagcacagaatctgggaatttcgcttgccaaccttctgctctccaaaggtgcaaagaatatcctggacgtggcgaggcaactgaatgatgcacat

SEQ ID NO: 250539 - DNA, 1083 bp, synthetic construct
  misc_feature 1..1083: note = Description of Artificial Sequence: Synthetic coding sequence
  source 1..1083: mol_type = other DNA
atgtcgggaaacggtaacgcagccgccaccgcagaagaaaatagccctaagatgagagtgattcgggtcggcactcggaagtcacagctcgcgcggattcaaactgattccgtcgtcgcaaccctgaaggcatcttatccaggacttcaatttgaaatcatcgcaatgtccaccaccggtgataagattcttgatactgcactgtcgaagattggtgagaagtcactgttcacgaaggagctggagcacgctcttgagaaaaacgaggtggatctggtggtgcatagcctcaaggaccttccaaccgttttgccacctggttttaccatcggagcaatttgcaaaagagagaacccgcatgatgctgtagtgttccaccccaaatttgtgggaaaaacccttgaaaccctgcccgagaagagcgtggtcggcacttcaagccttagacgcgcagcacaacttcaacgaaaattcccccatcttgagtttagatcaattaggggtaatttgaacacccgactgaggaagttggatgaacagcaggaattctcggcaataatcctcgccaccgcaggtttgcagcgaatgggctggcacaaccgcgtggggcagatcctccacccagaagaatgtatgtatgcagtgggtcagggagcacttggcgtcgaggtgagagcgaaggaccaagacattcttgatttggtcggagtgctccatgacccagagactctcctgagatgtatcgcggaaagggcatttctgaggcatctggagggcggttgtagcgttcctgtggccgtccacactgccatgaaggacggacagctttaccttactggtggagtgtggtccttggacggttccgattcgattcaagaaaccatgcaagcgactatccatgtgcccgcccaacatgaggatggacctgaagatgacccccaacttgtcgggatcactgcaaggaacattccacgtggaccacaattggcagcacaaaatctgggtattagccttgcaaatctgcttctgtccaagggagccaagaatatcctcgacgtcgcacgccaactcaacgacgctcat

SEQ ID NO: 250540 - DNA, 1083 bp, synthetic construct
  misc_feature 1..1083: note = Description of Artificial Sequence: Synthetic coding sequence
  source 1..1083: mol_type = other DNA
atgtcggggaacggtaatgccgcggccaccgcagaggaaaactcacctaaaatgagggtgataagggtgggaaccagaaagtcgcaactcgcacgtattcaaactgattcggtggtggcaaccctgaaagcctcataccctggactccaatttgaaatcatcgcaatgagcactactggcgataagattctggatacggccctctccaaaatcggagagaagtccctctttaccaaggaacttgaacacgcactcgaaaagaacgaagtggaccttgtcgtccattctctcaaggacttgcctactgtgttgcccccaggtttcactattggtgccatttgtaagcgggaaaaccctcatgacgcagtcgtattccatccaaagttcgtcggtaaaactctggaaacccttccggagaagagcgtggttggcaccagtagcctgcgccgagcagcacagctgcagcggaaatttccacatctcgaattccgctccatacgcggcaacctcaataccagactgagaaagctggatgaacaacaagaattttcggctatcatccttgccactgcgggtttgcaaagaatggggtggcacaatcgggtgggccagatccttcatcccgaggaatgcatgtacgctgtgggtcaaggggcactgggggtggaggtccgggcaaaggatcaggacatcttggatctcgtgggagtcctgcacgatccagaaacgcttctgcgttgtatcgcagaacgtgcgtttttgcgccatctggaaggtggatgctccgttcctgtggctgtacataccgcaatgaaggatggacaactgtacctgactggaggtgtgtggagcctggatggatcagattcgatacaagagactatgcaggcaaccattcacgtgccagcacagcatgaggacggaccggaggacgatccccagcttgtgggcattaccgcgaggaacattcctagagggccacagttggcggcacagaacctgggcatttcccttgcgaatctgcttctgagtaaaggagccaagaatattctggatgttgcgcgacaacttaacgacgcccac

SEQ ID NO: 250541 - DNA, 1083 bp, synthetic construct
  misc_feature 1..1083: note = Description of Artificial Sequence: Synthetic coding sequence
  source 1..1083: mol_type = other DNA
atgtccggaaacggtaacgccgccgccaccgctgaagaaaactccccaaagatgagggtgatcagagttggcacgcgtaaatctcagctcgcaaggatccagactgactccgtcgtcgctaccctcaaagctagctacccagggctgcagttcgagattattgctatgtccaccaccggagacaaaatcctggatacggccttgtctaagataggcgagaagtcgctcttcactaaggaattggaacatgcgctggagaaaaacgaggtcgaccttgtcgtccactcattgaaagacctgcctacagtgctgcctcccggctttacaataggagccatatgcaagcgggagaacccacatgacgctgtcgtgttccatcccaagtttgttggcaaaaccctggaaactctgcctgaaaagtccgtagtcggtacctcgtctttgcgaagagcagctcagctgcagcgcaaattcccacacctggagtttcgtagcatccgcggaaatcttaacactagactgaggaaactggatgaacagcaggaattttctgccattattcttgccaccgccgggttacagagaatgggatggcataatagggtgggccagatcctgcatcccgaggaatgtatgtatgctgtgggccagggcgctctgggtgtagaggtcagggctaaggatcaggacatactcgacttggtgggtgtgctgcatgaccctgagaccctgcttcggtgcatcgccgagcgagcttttcttcggcacctggaggggggttgctccgtacccgtggcagtacacacagcaatgaaggatggccagttgtacctgaccgggggggtctggtcactcgacggctcagattctattcaggagaccatgcaggccactattcacgtccccgcccagcatgaggatggccccgaagacgatcctcagctggtgggcatcacagctagaaacatccccaggggaccccagttggccgcccagaacctcgggatctcgctggctaaccttctcctgagcaaaggagccaagaacattctggacgtggccagacagctaaatgacgcccat

SEQ ID NO: 250542 - DNA, 1083 bp, synthetic construct
  misc_feature 1..1083: note = Description of Artificial Sequence: Synthetic coding sequence
  source 1..1083: mol_type = other DNA
atgtcagggaacgggaatgcagccgccacagccgaggagaattcccctaaaatgcgagtgattagggtgggtacaagaaaatcacagctggccaggatccagaccgactcagtggtggctactctcaaggcctcctatccgggactgcagttcgaaattatcgccatgagtacaacaggcgataaaatacttgatacagccctgagcaagataggagaaaagtcactgttcacaaaggagctggagcacgcgctggagaagaacgaagtggatctggtggttcactcactgaaggacttgccaacagttctgcctccgggcttcaccattggcgccatctgtaagcgcgagaacccccacgacgctgtggtcttccatcctaagttcgtcgggaaaacactcgaaacgttgcccgagaaatccgtcgtggggacctcaagcctgaggagggccgcccagctgcagaggaagtttccacatctggagtttagatccattagggggaacctgaatacccgcctgcgcaagctcgacgaacagcaggaattctctgccatcatcttggccactgccgggctgcagcgcatgggttggcacaaccgggtggggcagatcctgcatcctgaagagtgtatgtacgcagtcggacaaggggccttgggggtggaagtgcgggcaaaagaccaggatatcctggatctggtcggtgtgctgcatgatccagagacactgctgcgatgcattgccgagagagcctttctccggcacctcgaaggcgggtgcagcgtaccagtcgccgtgcacactgcgatgaaggatggacaactgtacctgactgggggggtgtggagtttggacggatctgattctattcaggagacaatgcaggctaccatccatgtcccagctcagcatgaggatgggccagaagatgatcctcaactggtcgggatcacggctcggaacattccaaggggaccacagctggccgcccagaacctgggtatctccctggctaatctcctgctgagtaagggcgccaagaatatcctggacgtagcaaggcagctcaacgatgcgcac

SEQ ID NO: 250543 - DNA, 1083 bp, synthetic construct
  misc_feature 1..1083: note = Description of Artificial Sequence: Synthetic coding sequence
  source 1..1083: mol_type = other DNA
atgagtgggaatggaaacgccgcagccactgcagaggaaaactctccaaaaatgagggtaataagggtcgggactcgcaaatcccagcttgctcggatacagactgactctgttgtggcaacacttaaagctagttatcctggacttcagttcgaaattatcgctatgtccacaactggagataaaattctcgacacagcactgtcgaagattggggaaaaatctctgtttacaaaagaactcgaacacgctctggagaaaaacgaagtggatcttgtggtgcatagtttaaaagatttaccaactgttctaccccccggatttacaattggagctatctgcaaacgggaaaatccccacgacgccgtagtgtttcatcctaagtttgtaggaaaaacgctggagactctccccgaaaagtctgtggtgggaacttcctctcttaggagagcagctcagcttcagcgaaaattcccccatctcgaatttaggagtatccgcgggaaccttaacacaaggctccggaaactagatgaacagcaggagttctccgccatcatactggcaactgctgggctgcagcgcatgggatggcacaacagggtggggcagatcctgcatcctgaagaatgcatgtacgccgtcggacagggggctcttggggttgaagtccgagccaaagatcaagatatactcgatcttgtcggagtcctgcatgatccagaaacactcctcaggtgtattgctgagcgggcattccttcggcacctagagggggggtgcagtgtccctgtggcggtccacacagccatgaaagatgggcagctatatctcactggaggagtctggagtctggatggatccgatagtatccaggaaactatgcaggctacaatccacgtacccgcccagcatgaggacggacccgaagatgatcctcagcttgttgggatcactgcccggaatatacctaggggaccccagctcgccgcccagaacctgggaattagtctcgcgaatctactcctttccaaaggagctaaaaatatccttgatgtagcccgccagttgaatgatgcccac

SEQ ID NO: 250544 - DNA, 1083 bp, synthetic construct
  misc_feature 1..1083: note = Description of Artificial Sequence: Synthetic coding sequence
  source 1..1083: mol_type = other DNA
atgtctgggaacggaaacgccgcggcaacagccgaggagaactctccaaagatgagagtcatacgggttgggacgcgaaagagccagcttgcccggatccagacagattccgtggtggccaccctcaaagcatcataccccggactgcagtttgaaattatcgcgatgagcactaccggcgacaaaatcttagataccgccctgagcaaaatcggagaaaagtccctcttcacgaaggaactggaacacgcgctggaaaagaatgaagtagacctggtggtacactcactcaaggatctgcccaccgtgctgcctcctggattcaccattggcgctatatgtaagcgagaaaaccctcatgatgccgttgtgttccacccaaaatttgtcggcaagacgcttgagactcttcctgagaagtctgtagtgggtacatcgagtctacgccgagccgctcaacttcaacgtaagttcccacacctagagttccgaagcataaggggcaacctcaacacccgacttagaaagctggatgagcaacaggaattctcggccatcatccttgccactgcaggactgcagcggatgggctggcacaacagagtgggacagatcttacaccccgaagagtgtatgtatgctgtgggccagggggccctgggagtagaggtgagggccaaggatcaagacatcttagatctcgtgggcgtgctgcatgaccccgagacgctgctgcgctgtatcgcagagcgggctttcctgaggcatctcgaagggggatgctccgtccctgtggctgttcatactgcgatgaaggatggccaactctatctcaccggcggcgtgtggtcattggacggatccgactctatccaagaaacaatgcaggcaacaatacacgtacccgcgcagcacgaagacggccctgaggacgatccgcagttggtgggcatcacggcccgtaacatcccccgtgggccgcagctggccgcgcagaacctaggcatctctctcgccaacctcctgctatcaaagggtgcgaaaaatatcttggatgtggcccgccagttaaatgacgctcat

SEQ ID NO: 250545 - DNA, 1083 bp, synthetic construct
  misc_feature 1..1083: note = Description of Artificial Sequence: Synthetic coding sequence
  source 1..1083: mol_type = other DNA
atgtccggaaacggtaatgcggcggctaccgcggaggaaaactctccgaagatgcgggttatcagggtcgggactcgaaaaagccaactggctcgtatccagacggacagcgtggtcgcgaccctgaaggcatcctatccaggtctgcaatttgagataatcgcgatgagcaccacgggtgacaaaatcctcgataccgccctctcgaaaattggcgagaagagcctgttcacgaaggagctggaacatgctctagaaaagaatgaagtggacctggttgtgcattctctaaaagatcttccgaccgtacttccgcccggctttaccatcggcgctatttgtaagcgcgaaaaccctcacgatgcggttgtgtttcatccaaagtttgtgggtaagacgcttgaaaccttgcctgagaagagcgttgttggtacctcctctttgcgccgagctgctcaattgcagaggaagttcccgcaccttgaattccgctccatccggggaaatctcaataccagactgcgcaagctggatgaacagcaggagttcagcgccattatcctggcaaccgcgggtcttcaaagaatgggttggcacaacagggtcggacaaatacttcaccctgaggagtgcatgtacgccgtcggtcaaggggcactgggtgtcgaggtgcgagccaaagatcaggacattctggatctggtcggagttctccacgaccccgaaactctgctacggtgcattgccgagagagcgttcctaagacatctggagggtgggtgctccgttccagtggcagtgcacactgcaatgaaggatggccagctgtatctgactggtggcgtgtggagcctggacggcagcgattctattcaagagaccatgcaagcgaccattcacgttcctgcgcagcacgaggatggaccagaggacgatccacaacttgttggcattacggctcggaatataccacgaggtccgcaactggccgcccagaacttggggatctctttggccaacctgctgctctcaaagggggcaaagaacattctggacgtcgcacgccagctaaatgacgcccac

SEQ ID NO: 250546 - DNA, 1083 bp, synthetic construct
  misc_feature 1..1083: note = Description of Artificial Sequence: Synthetic coding sequence
  source 1..1083: mol_type = other DNA
atgtccggtaacggtaacgcggcagcaacggcagaggagaactcacctaagatgcgggtcattagagtgggaaccagaaagagccagctcgcaaggatccagaccgatagcgtggtggcaactctcaaggcctcttaccccggtctgcaatttgagattatcgcaatgagcaccaccggggacaaaatcctggataccgcactgtccaagattggcgaaaagagcctgttcactaaggaactcgaacacgcgctggagaagaatgaagtggatttggtcgttcattcccttaaggatctgcctaccgtcctcccacctggtttcaccattggcgcaatttgcaaaagagaaaacccacatgatgctgtggtgtttcacccaaagtttgtgggcaaaactcttgaaaccttgcccgaaaaatcggtggtcggtacttcttcgctgcggcgggcggcccaactccaacgaaagtttccgcatctcgagttccggtccattcgcggaaatctgaatactaggctgaggaagctggatgaacagcaggaattttccgctatcattctcgcgaccgcgggacttcaaagaatgggttggcataaccgagttgggcagattctgcatcctgaggaatgtatgtacgcggtggggcagggagcattgggcgtagaggtgcgtgccaaagatcaagatattcttgatcttgtcggggtccttcacgacccagaaaccctgcttcgatgtatcgcggagagagcgtttcttagacacctcgaaggtggctgctcggtccctgtggccgtgcataccgctatgaaggacggtcaactctacttgactggcggagtgtggtccctcgatggctccgatagcatacaagaaactatgcaagcaacgatccacgtcccggcgcaacatgaagatggacccgaggatgatcctcaactggtgggtataaccgcacgcaacatccctcggggacctcagctcgctgctcaaaaccttggtatcagcctggctaacctgcttctctcaaaaggtgccaagaacattcttgatgtggccaggcagctgaacgacgcacat

SEQ ID NO: 250547 - DNA, 1083 bp, synthetic construct
  misc_feature 1..1083: note = Description of Artificial Sequence: Synthetic coding sequence
  source 1..1083: mol_type = other DNA
atgagcggaaacggtaacgcggcggcaaccgcggaagagaattcacccaagatgcgtgtgatccgagtcggtaccaggaaatcccagcttgcccgcatacagactgactcagttgtggctacgttgaaggccagctaccccggactgcagttcgaaatcattgcaatgtcgactaccggcgacaaaatcttggacactgctctctccaagatcggagaaaagtcactgttcaccaaggagctggagcacgcgctggagaaaaatgaggtggacctggttgtccactctctcaaggacctcccgaccgtgctgccacctggattcaccatcggagccatctgtaagcgggaaaacccacatgacgccgtggtgttccatcccaagtttgtgggcaaaactctggagactctcccagagaagagcgtcgtgggcacctcctctctgagacgtgccgcgcagcttcagcggaagttcccgcatctggagttccgctcgatccgcgggaacctgaatactcggcttagaaaactcgacgaacagcaagaattttcggcgattatcctcgcgactgcgggactgcagcgcatgggatggcacaaccgggtgggacaaatcctgcacccggaagaatgcatgtacgccgtgggacaaggggcattgggtgtggaggtgagagccaaagatcaggatatactggatctcgtgggcgtcctccacgatcctgagactctgctgcgctgcatagcagaaagggctttccttcgccatctggaagggggttgctccgtgccggtcgcggtccacacggccatgaaggatggtcaactgtacctgaccggaggagtctggagcctggacggatcggactcaatccaagaaactatgcaagcgaccatccacgtgccggctcagcacgaggacggcccggaagatgatcctcagcttgtgggcatcaccgcccggaacatcccacgcggcccacagttggcggcacaaaatctgggaatttccctcgccaacttgctgctgtcgaagggtgccaagaatattctcgacgtcgcccgccagcttaatgatgcccat

SEQ ID NO: 250548 - DNA, 1083 bp, synthetic construct
  misc_feature 1..1083: note = Description of Artificial Sequence: Synthetic coding sequence
  source 1..1083: mol_type = other DNA
atgagcggtaacggcaacgctgccgccacagctgaagagaactctcccaaaatgagggtcatacgtgtcggaacgcgcaaatctcagctggctaggatccagaccgatagcgtagtggctactcttaaagctagttatcctggcctgcagtttgaaatcatagccatgtccaccacaggcgacaaaatcttggatacagccttatctaagataggagagaagtccttgttcactaaggagctggagcacgcactcgagaagaatgaagtagaccttgtggtccatagcttgaaggatcttcccacagtgcttcccccaggctttacaatcggggcaatttgcaaacgcgaaaacccacacgacgccgtggtcttccatccgaagtttgtagggaaaacccttgaaacactgccggagaagagtgtggtgggtacctctagtctcagaagagctgcacaactgcagagaaagtttccacacctcgagtttagaagcatcagagggaacctcaacactagattgagaaaacttgatgagcagcaggaattttcagcgattattctggccaccgctggacttcaacgcatggggtggcataacagggtcggtcagatcctccatccagaggaatgcatgtacgccgtgggacagggagcactcggggtggaagtgagggctaaggatcaggacatcctggacctggtgggagtgttacacgatccggagacactgttgcgatgtatcgccgagagggcttttctgagacacctcgaagggggctgcagtgtgccagtggcagtgcacacagccatgaaggacggacagctgtacttaacaggaggagtttggagtctggatgggagcgactctattcaggagaccatgcaagccacaatccacgttccagctcagcacgaggatggccctgaggatgatcctcagcttgtgggcattacagcgaggaacatcccccgcgggcctcagcttgctgcacaaaatctcggtattagcctggccaaccttttgctcagcaaaggtgccaagaacatcctcgatgtggcccgtcaactgaacgatgctcat

SEQ ID NO: 250549 - DNA, 3132 bp, synthetic construct
  misc_feature 1..3132: note = Description of Artificial Sequence: Synthetic coding sequence
  source 1..3132: mol_type = other DNA
atgaagcccggatgtgcagctggttcacctggcaacgaatggatcttcttttctaccgacgaaatcactacccgttacagaaatactatgtcaaacggtggtctgcagcggtcggtgatcctgagcgcccttatacttctgagagcggtcaccggcttttccggagacgggcgtgccatatggtccaagaatccaaactttacgccagtgaatgaaagccagctgttcctgtacgatacgttcccaaagaactttttctggggaattgggactggcgccctgcaggtggaaggttcctggaagaaagatggcaaggggccttccatctgggaccacttcatccatactcatcttaagaacgtgtcatcgaccaacggttcctccgatagctacatattccttgagaaggatctttcagcactggatttcatcggtgtctcgttttaccaatttagtattagctggcctcgactgttccctgacggcattgtgaccgtggcaaacgcaaagggtctgcaatactattcgacccttttggacgcactggtgcttcggaatatcgagcctattgtgaccctgtaccattgggaccttcctttggcactccaggagaaatacggaggatggaagaacgacactataatcgatatctttaatgattacgccacctactgtttccaaatgtttggagatagagtgaagtactggattactatccataatccttaccttgtggcatggcatggatacggaactggaatgcacgccccgggtgagaagggaaacctggcggcagtctacaccgtgggccataatctgataaaagcgcatagcaaggtgtggcacaactataacacccactttaggcctcaccagaagggatggctctcaattaccttgggttcgcattggattgaaccaaatcgctccgaaaacaccatggacattttcaagtgccagcaatcgatggtgtcggtgcttgggtggttcgcaaatcctatacacggcgacggagattacccagaaggaatgaggaagaaactgtttagcgttttgcctatattctcggaagcagaaaagcacgagatgcgaggtacggcagatttcttcgctttctcatttggcccaaacaatttcaagcctttgaatactatggccaaaatgggtcagaacgtgtcactgaacctgcgcgaagcactcaactggattaagctcgagtacaacaacccacgcatactcatcgcagaaaacggctggtttacggactcccgggtgaaaaccgaggacaccactgcgatttacatgatgaagaactttctttcgcaggtcctgcaagccattcgcctggacgaaatccgggtgttcggatataccgcatggtccttgcttgacggatttgaatggcaggacgcgtatactattcgtcgaggcctgttctacgtggatttcaacagcaaacagaaggagcggaaaccaaaatcatcggcacattactacaaacaaatcattcgtgaaaacggattctcgctgaaggaaagcaccccagatgtgcagggtcaatttccatgcgatttttcatggggcgtcaccgaatcggtgcttaaaccagagagcgtcgcctcctctcctcaattttctgatccccacctgtacgtttggaacgcaaccgggaaccgtcttttgcatagggtggaaggtgtcagactgaaaactcggcctgcacaatgtaccgactttgtgaacattaagaagcaactggaaatgctcgcacggatgaaggtgacccactaccgttttgcactggattgggcgtccgtgctgccaactgggaatctttcggccgtgaacagacaagcactgagatattacagatgtgtcgtctctgaaggtcttaagctcgggatatcggcaatggtgacgctgtactaccctacgcacgcacaccttggattgcccgaaccgctgttgcacgcagatggatggcttaacccttccactgcagaagcatttcaggcgtacgcgggcctgtgcttccaagaactgggggatcttgtcaaactgtggatcactatcaacgagcctaacaggctgtcggacatatacaaccgctccggcaatgatacttacggtgcagcacataatctcctcgtcgcacacgccctggcctggagactgtacgaccgccagtttcgcccgtcacagaggggcgcagtgtcactttcactgcacgcagattgggcggaaccagcaaatccttacgcagactcgcactggcgcgcagccgaacgctttttgcagtttgagatagcatggtttgccgaacctctctttaagaccggagactaccctgcggcaatgcgagagtacatcgcatcaaagcatcgtagaggactttcgagctccgcacttccaaggctgaccgaagctgaacgcagactgctcaagggcactgtcgacttctgtgcactcaatcactttactacgaggtttgttatgcatgaacaacttgccggttcacgatacgatagcgatcgggacattcagttcctccaagatattacccggctgtcgtcgcctactagactggccgtgattccctggggtgtccgcaaacttttgcggtgggttcgaaggaattatggggatatggacatctacataactgcgagcggaattgatgaccaagccctggaagatgatagactgcgaaagtactacttggggaagtaccttcaagaagtgcttaaggcctaccttatcgacaaagtccgtatcaaaggttactatgcctttaaacttgcagaagaaaagtccaagccacggtttggcttcttcacctcggatttcaaggcaaagtcatccattcagttttacaacaaggtcatctcgtctaggggatttccatttgaaaactccagctcaagatgttctcaaacccaagagaacaccgagtgtactgtgtgtctttttctcgtccaaaagaagcccctgatcttccttggatgctgcttcttctccaccctcgtgctgcttctcagcatcgcaatcttccaacgacagaagcgccgcaagttctggaaggcaaagaaccttcagcatataccgctgaagaaaggaaaacgcgttgtctca

SEQ ID NO: 250550 - DNA, 3132 bp, synthetic construct
  misc_feature 1..3132: note = Description of Artificial Sequence: Synthetic coding sequence
  source 1..3132: mol_type = other DNA
atgaagcccggctgtgccgcaggaagccccgggaatgaatggatatttttcagcactgatgaaatcacaactcgttatcgtaacacaatgagcaacgggggcctccagagatctgtgatcttatcagctcttatattgttacgagcagtgaccggattcagtggggatggacgcgccatatggtctaaaaatcctaatttcacaccggtgaacgaaagccagctgttcctatatgacacttttcctaagaatttcttttggggcattggaactggcgcgctgcaggttgaggggtcatggaaaaaagatggcaaaggcccaagcatctgggatcacttcatccacactcacctcaagaatgtgagctcaaccaacgggtcctcggactcttatatcttcctggagaaggacctgtcggctctcgatttcatcggagtatctttctatcaattttccatttcttggcctaggttgttccctgatggcatcgtgaccgtggcgaatgccaaagggctccagtactactcaacattgcttgacgccctcgtgctgagaaatatcgaacccattgtgaccttgtatcactgggatctgccactggctctgcaggagaaatatgggggttggaagaacgataccattatagatatattcaacgactacgcaacgtactgttttcagatgttcggggacagagttaaatactggatcaccattcataatccttatttggtggcgtggcatggctacggaacaggtatgcacgccccgggcgagaaggggaacctggccgccgtgtatacagtgggccacaatctaatcaaagcacacagcaaagtctggcacaactataacacccatttcagaccccaccagaagggatggctctctattactctaggttcacattggattgagccaaacaggagcgaaaataccatggacatttttaaatgccagcagtcaatggtgagtgtcttgggctggttcgcaaaccccattcacggtgatggggattacccagaggggatgcgcaaaaagctgttcagcgtactgccgattttttccgaagccgagaagcatgaaatgagagggacggcagacttcttcgcctttagctttggacccaacaatttcaagccactgaatacgatggcaaaaatgggacaaaatgtttccctgaacctgagagaggctctcaactggatcaagttggagtataataatccacgtatactgatcgccgagaacggctggttcacagactcaagagtgaaaacggaggatactactgccatctatatgatgaagaattttctgtcacaggtgctccaggctattaggctggatgaaattcgggtttttgggtacacggcgtggagtctgctagacgggttcgagtggcaggacgcttataccatccggagagggctgttctacgtcgacttcaatagcaagcagaaggagcgtaagcccaagtcctcagctcattactacaaacagatcatcagggagaatggcttctcactgaaggagtctactcctgacgtgcaaggccagttcccctgcgacttcagttggggcgtcactgagtcagtgcttaagccagagtcagttgcttctagccctcaattcagcgatccacatttgtacgtgtggaacgccacaggaaatcgcttgctgcaccgagtggaaggcgtccgactcaaaacaaggcccgcacagtgcaccgacttcgtgaacataaagaagcaactggaaatgcttgcccgcatgaaggtcacacattaccggtttgctttggattgggctagtgtcctgcccacgggcaatcttagcgctgtcaatagacaggctctacgttattatcgttgtgttgtgtctgagggcttgaagctcgggatcagtgccatggtgacgctgtattaccctacacacgcacacttgggcctgccggaaccgctgttgcacgcggatgggtggctgaatccttccaccgcggaagctttccaagcttacgctggcctgtgcttccaggagctgggcgatctggtgaaactctggataaccatcaatgaacccaacaggctgtcagacatttacaatcggagtggcaacgacacatatggtgcagcccacaaccttctcgttgcacacgccctcgcttggcggctgtatgaccgccagttccgaccctcccagcgtggagcagtttctttatctctccatgccgactgggccgagcccgcgaatccctacgccgactcccattggcgggctgcggaaagattccttcagttcgagatagcttggtttgctgagccattgttcaagactggcgactaccctgccgccatgagagagtacattgcctcaaagcatagacggggcttaagcagctccgcacttccacgactgaccgaggccgagaggcgtttgctgaagggcaccgtagacttttgcgctctgaaccacttcactaccagattcgtcatgcatgagcagctagcagggagtcgctacgacagtgatagggacattcaattcctccaagacatcactagactatcttcccctactcgtctggcagtgattccatggggagtgaggaaactactgcgatgggtgcgccgcaactacggagacatggacatctacataacagcttcgggcatcgatgaccaggccctggaagatgaccgtctgcgaaaatattacctcggtaagtatttgcaggaggtactcaaggcttatctcattgataaagtcaggattaaaggatattacgctttcaaactggctgaagaaaagtccaaacctcggttcggcttttttacgtccgactttaaagcaaagtcgtcgattcaattctataacaaggtgatcagctctcgggggttcccttttgaaaactctagtagcaggtgttcccaaacacaggagaataccgaatgcacagtttgcttgtttctggtccagaagaaacccctcatcttcctcggctgctgcttttttagtaccctagtgctgttgctctcaatcgctatcttccagcgtcagaagaggagaaagttttggaaggcaaagaaccttcagcacatccctcttaagaaaggaaaacgcgtcgtcagt

SEQ ID NO: 250551 - DNA, 3132 bp, synthetic construct
  misc_feature 1..3132: note = Description of Artificial Sequence: Synthetic coding sequence
  source 1..3132: mol_type = other DNA
atgaagccaggatgcgctgcaggatcgcctgggaacgagtggatcttcttctcgactgacgaaatcaccactagataccggaacaccatgtccaatggagggctgcagcggtccgtgattctgagcgcgctgatcctcctccgggccgtcaccgggttctcgggagacggaagagccatctggtcgaaaaacccaaatttcactcctgtgaacgaatcgcagctctttctgtacgacacgttcccgaaaaacttcttttggggaatcggcaccggagccttgcaggtggaaggctcctggaaaaaggacgggaagggaccttccatttgggaccacttcatccatacccacctgaaaaacgtcagctcaactaacggatcgagcgatagctacatcttcttggagaaagatttgtcggcactcgatttcatcggagtgtccttctaccagttttcgatctcctggccgcggctcttcccagacggaattgtgaccgttgcgaatgcaaagggcctgcagtactactccactctcctcgatgcgctggtccttcggaacatcgaaccgatcgtgaccttgtaccactgggacctgccattggcattgcaggagaaatacggagggtggaagaatgacactatcatcgatatcttcaacgactatgcgacgtactgctttcagatgttcggtgacagagtcaagtactggataaccatccataatccatacctcgtcgcttggcatggctacggcaccggaatgcatgcgccaggtgagaagggcaatttggccgccgtgtacaccgtgggacacaacctgattaaggcacactccaaagtctggcacaactacaacactcacttccggccgcaccagaagggatggctgtctattactttgggctcgcactggatcgagccaaaccggagcgagaacaccatggatatcttcaaatgtcagcaatcaatggtgtcagtgctcggatggtttgccaaccctatccatggtgacggagattatcccgaaggaatgagaaagaagttgttttcggtgctcccaattttctcggaagcagaaaaacacgaaatgcgcggaactgccgatttcttcgcgttttcgtttggaccaaacaactttaaaccgctgaataccatggccaaaatgggacaaaatgtcagcctgaacctccgcgaagcgctcaactggatcaagctggaatacaacaaccccagaatactgatcgccgaaaatggatggttcacggactcacgggtcaagaccgaagatacgactgccatttacatgatgaagaactttctctcccaggtgctccaggcaatccgactggatgaaatccgggtctttggatacactgcctggagcctgctcgatgggttcgaatggcaagacgcttacactatccgccgcgggctcttctacgtggatttcaactcaaagcaaaaagagcgcaagccaaagtctagcgcgcattactacaagcaaatcattcgcgaaaatggtttctccctgaaggagagcacccctgacgtgcaaggacagttcccatgtgatttttcatggggagtcaccgaaagcgtactcaaaccggaatcggtcgcatcgtccccccagttctccgacccgcacctgtatgtgtggaacgctaccggcaaccggctgctgcatcgcgtggagggggtgagactcaagacccgccctgcgcaatgcactgatttcgtcaacattaagaagcagctggaaatgcttgcacgcatgaaggttactcactaccgcttcgccctggattgggcctcagtgctgcccacgggaaacctgtcggcggtgaaccggcaggcgctgaggtactacagatgcgtggtatcggagggactcaaacttggaatctcagctatggtcaccttgtactatccaacccacgctcatctgggacttcccgaaccactgcttcacgccgatggttggctgaacccctccactgctgaggcctttcaggcttacgcgggactttgctttcaagaactcggggacttggtcaagctgtggatcactatcaacgagccgaatagactgtcggacatctacaaccgctctggaaacgacacctacggggccgcccataacttgctggtggcccacgcgctggcatggcgcctctacgatcgccagttccggccaagccagagaggagctgtctcgctttcgctgcacgcagactgggcggagccggcaaacccgtacgcagatagccactggcgcgcggcagaacggtttttgcagttcgagatcgcatggttcgccgaacctctcttcaaaaccggcgactacccagccgcgatgcgtgaatacatcgcatcgaagcatcggcgcggcctgtcctcttcggccctcccgcggcttactgaagctgaacgccggctcctcaagggaaccgtggacttctgcgcgcttaatcacttcactacgcgcttcgtgatgcatgaacagttggccggatcgcgctacgatagcgatcgggatatccaattcttgcaggatatcacccgcctgtccagcccgacgagattggcggtgataccgtggggtgtccgcaaactgcttagatgggtccgccgcaactacggcgacatggatatctacatcactgcgtccggcatcgatgaccaagcattggaggacgacagactgagaaaatactacctgggtaagtacctgcaagaagtgctcaaagcctatctcatcgataaggtgcggatcaagggttactacgccttcaaactggctgaagaaaagtcgaagcctcgctttgggttctttacctcagacttcaaggcgaagtcatccattcaattctacaataaagttatttcaagccgcggatttccctttgagaacagctcatcccgttgttcgcaaactcaggagaacaccgagtgcaccgtctgccttttcctcgtccaaaagaagccgctgatcttcctcggatgttgcttcttcagtactctggtgctgctcctcagcatcgcaatctttcagagacaaaagcgcaggaagttctggaaagccaagaacctgcaacacatccctctgaagaaaggcaaacgggtcgtgtcc

SEQ ID NO: 250552 - DNA, 3132 bp, synthetic construct
  misc_feature 1..3132: note = Description of Artificial Sequence: Synthetic coding sequence
  source 1..3132: mol_type = other DNA
atgaaacctggctgtgcggcaggctcccctgggaacgagtggatattcttctcaaccgacgagataaccaccagatacaggaataccatgtcgaatggcggtttgcagcggtccgtgattctgagcgcactgattctgctgcgcgcagtcactggttttagcggtgacggccgcgcaatctggagcaaaaatccaaatttcactcctgttaacgagagccagctgttcttgtacgacaccttccctaagaatttcttttggggaattggaactggcgcgctccaagtggaaggatcctggaaaaaggatggtaagggtccgtcaatatgggatcactttatccacacccatctcaaaaacgtgagctccactaacggctcatcagactcgtacatttttcttgagaaagacctgtcggctcttgacttcataggagtcagcttttatcagttcagcatttcctggcctcgcctgttcccggatggtattgtgaccgtggcaaacgcaaagggcttgcaatactacagcacgctcctcgacgcactggtccttcgaaacatcgagcccatagtgaccttgtatcactgggatctgcctctggccctgcaagaaaagtacggaggctggaaaaatgataccataatagacatctttaacgattacgccacctactgtttccagatgtttggtgatagggtcaaatactggatcactattcataacccttacctcgtggcatggcatggttacggaaccggtatgcatgctcctggtgagaagggaaaccttgcagccgtgtacactgtgggccacaatttgattaaggcacattcgaaggtctggcataactacaacacccattttagacctcaccaaaaaggctggctgtcgattaccctgggatcgcattggattgagcccaaccgctcggagaacactatggacatattcaaatgtcaacaatcgatggtcagtgtcctggggtggtttgcaaatccaatccatggagacggagactacccagaaggaatgaggaaaaaacttttttcggtccttccaattttcagcgaggcagaaaagcacgagatgaggggaactgctgatttcttcgcattcagctttggtcccaacaactttaaacccctgaacaccatggcgaagatggggcaaaatgtgagcctgaatcttagagaggcgcttaactggatcaaactggagtacaacaaccctcgaattttgattgccgaaaatggatggttcaccgacagccgggtgaaaaccgaagatactaccgcaatttacatgatgaagaacttcttgagtcaagtgctccaagcaattaggctggatgagattagggtgtttgggtacaccgcatggtcgcttctggatgggtttgaatggcaggatgcatataccattcgcagaggcctcttctacgtggatttcaactccaagcagaaggaacgcaagccaaagtcctctgcgcactactacaaacagatcattcgcgaaaacgggttttcactgaaggaatccacgcctgatgtgcaaggacaatttccatgcgatttctcgtggggagtcaccgaaagcgtgctcaagccggagtcggttgcctcgtccccacaattctcggaccctcacctttatgtgtggaatgcgactggtaatagactcctgcatcgggtggaaggcgtgcggcttaagacgcgcccggcacaatgcacggattttgtgaacataaagaagcaactggaaatgcttgcaagaatgaaagtgacccactacagattcgcactggattgggcatccgtgctccctactggcaacctgagcgccgtgaatcgacaggctctgcggtactacagatgcgtggtgtccgaaggcctgaagctgggaatctcggcaatggttacgttgtattacccgacccatgcacatctgggattgcctgagccactcctccatgctgatggatggctgaatccctccaccgcggaagcgtttcaggcttacgcaggtctgtgttttcaagaactgggagatctcgtcaagctgtggattaccataaatgaacccaaccgtctctccgatatctacaacaggtcgggaaacgatacctacggagcggcacacaaccttctcgtggcacatgcactggcctggagactgtacgatcggcagtttcgaccttcccaacgaggggctgtgtcgctttcgcttcacgcagattgggccgaacctgcgaacccatacgcagactcacactggagagcagcggagaggtttctccaatttgaaattgcatggttcgcagaaccgctcttcaaaactggcgattaccctgccgctatgcgcgaatacattgcatcgaagcataggcggggactttcctcgtctgcactccctcgactgacggaggcagagcggcggctgctcaagggtacggtcgatttttgcgcacttaaccactttactactagatttgtgatgcatgaacaactcgccggatcgcggtacgattcggaccgcgatattcagttccttcaagacattaccagactttcttcccctacccggctcgctgtcataccatggggagtgagaaagctgctccggtgggtcagacgtaattacggagacatggatatctacatcaccgcaagcggaattgacgaccaagctcttgaggatgatagactgcggaagtattaccttggaaagtacctgcaagaagtgctgaaggcgtaccttattgacaaagtgcggattaaggggtactacgccttcaagctggcagaagagaagtctaagccacgatttggctttttcacctcggactttaaggccaagtcgtcgattcagttctacaacaaggtgatttcctccagaggattccccttcgaaaactcctcgtcgcgatgctctcagacccaagaaaacactgaatgtactgtgtgtctgttcttggtccagaagaagcccctgatctttctgggatgttgctttttctcgaccctggtccttcttctctcgattgccatttttcaaagacagaagcggcgcaagttttggaaggcgaagaacctgcagcatatccctctgaagaagggcaagcgtgtggtgtca

SEQ ID NO: 250553 - DNA, 3132 bp, synthetic construct
  misc_feature 1..3132: note = Description of Artificial Sequence: Synthetic coding sequence
  source 1..3132: mol_type = other DNA
atgaaacccggctgcgccgccggttccccagggaatgagtggatctttttctcaacagatgagataacaactcgctaccgaaacacaatgagcaatggcggtctccagagatctgtcattctcagtgcactgatcctcctgagggcagtcactgggttctctggtgacggtcgggccatctggtcaaaaaatcctaacttcacaccggtcaatgagagtcagttgttcctgtacgacacatttcccaagaatttcttttgggggattggcacaggggcactgcaggtggaggggtcctggaagaaggacggcaaagggccaagcatttgggaccacttcattcatactcatcttaagaacgtttcctcaaccaatggatctagtgatagctatatcttcctcgaaaaagacctttccgccctggactttattggggtttccttctatcagttcagcatctcatggccaaggctgttcccagacggaattgttacagttgcaaacgcaaaagggttgcagtattactctacgttgcttgatgccttggtgctcagaaacattgagcctattgtgacgctctatcattgggatctcccactggccctccaggagaagtacggtgggtggaagaacgacacgatcatagacatcttcaacgattacgccacttattgctttcagatgtttggcgatagagtaaagtattggatcacgatacacaatccctacctcgtagcctggcatgggtacggcaccggaatgcacgcgcccggcgaaaagggaaatctggccgcagtctatacggtgggtcacaacctcatcaaggcacattcaaaggtgtggcataattataacacacacttccgccctcatcaaaagggatggttgagtatcacgctgggaagccactggatcgagccaaatagatcagaaaataccatggacatttttaagtgccaacagtctatggtttctgtcttgggctggttcgcaaacccaatccacggcgatggggattatccagaggggatgcgcaaaaagctgttcagtgttctgccaatctttagcgaagcagagaagcacgaaatgaggggaacggctgatttcttcgccttctctttcgggccgaacaatttcaagcctctgaataccatggccaaaatggggcagaatgtgtctcttaatctgagggaagcccttaattggataaaacttgaatacaacaatcctaggatcctcatagcggagaatgggtggtttacggattctagagtgaagacagaagatactacagccatctatatgatgaagaacttcctgtcccaagtgctgcaggctatacggctcgacgagattagagtttttggctataccgcatggtccctgctcgacgggtttgaatggcaggacgcatatacaatcaggcgagggctcttttatgtggatttcaattcaaaacagaaagaaagaaaaccgaagagttccgcacactattacaaacagatcatcagagagaacggcttcagcctgaaggaatcaacccccgacgtccagggccagttcccctgcgatttcagttggggcgtgacggaatcagtgctgaagccagagtctgtggcatcctcacctcagtttagtgatccccacctgtatgtctggaacgccaccggcaacaggctgctgcacagggtggagggtgtgaggcttaagacacggcccgctcagtgcactgattttgtgaacattaaaaagcagctggagatgctcgccaggatgaaagtgacgcattacaggtttgcgctggattgggcatctgtgctgccgaccggcaatctgtctgccgtgaatcgccaggcccttaggtactaccgatgtgtggtttccgagggcctcaagctgggaatttcagctatggtgactctgtactatcccactcacgcccatctcggactgccagagcctctgctccacgcggatggatggctcaatcccagtacggcagaggcctttcaagcctatgccggactctgttttcaggagctgggcgaccttgtcaagctctggataaccatcaatgagccaaacaggttgagcgacatttataacagatccggtaatgacacatatggagctgcccacaacttgctggttgcacacgccctcgcctggagactgtacgatcgccagtttagacccagccagcggggcgccgtcagtctgagtcttcacgccgattgggctgagcccgctaacccttatgccgactctcattggcgggccgcagagcgatttctgcaattcgaaattgcttggttcgccgagcctttgttcaagacaggggattatccagccgcaatgcgggagtacatcgcttctaagcacaggagagggctcagttccagcgccctgcctcgcttgaccgaggctgagcggaggctcttgaagggtacagtggacttttgcgctctgaatcatttcaccactaggtttgtcatgcacgagcagctcgctggtagccggtacgactcagatcgggacatccaattccttcaggacatcactcgactgagtagccctactagactggccgtgataccttggggcgttagaaagctgttgcggtgggtccgacgcaactatggggacatggacatctatattactgccagcgggattgacgatcaggccctggaagatgatcggcttcgcaagtactatttgggaaagtatctgcaggaagtgctgaaagcctaccttatcgataaggtgcgcatcaagggctactacgcctttaagttggctgaagagaaatcaaagcctcggtttggtttcttcacatctgactttaaagcaaagagctcaatccagttttacaataaggttatatctagtcgaggctttcccttcgagaacagctccagtcgctgtagtcagactcaggagaacacagaatgtacggtctgccttttccttgtgcagaagaaacccctgatctttcttgggtgttgtttcttctcaaccctcgtcctcctgctgtccatcgcaatttttcagagacagaaacggcggaagttttggaaggccaagaacctccagcacatccccctgaaaaaaggcaagcgggttgtgagt

SEQ ID NO: 250554 - DNA, 3132 bp, synthetic construct
  misc_feature 1..3132: note = Description of Artificial Sequence: Synthetic coding sequence
  source 1..3132: mol_type = other DNA
atgaaaccgggttgtgcggcgggttcgccgggtaatgaatggatatttttttcgacggatgaaataacgacgcgttatcgaaatacgatgtcgaatggtggtctacaacgttcggttatactatcggcgctaatactattacgtgcggtaacgggtttttcgggtgatggtcgagcgatatggtcgaaaaatccgaattttacgccggttaatgaatcgcaactatttctatatgatacgtttccgaaaaattttttttggggtataggtacgggtgcgttacaagtagaaggttcgtggaaaaaagatggtaaaggtccgtcgatatgggatcattttatacatacgcatttaaaaaatgtatcgtcgacgaatggttcgtcggattcgtatatatttctagaaaaagatttatcggcgttagattttataggtgtatcgttttatcaattttcgatatcgtggccgcgactatttccggatggtatagtaacggtagcgaatgcgaaaggtctacaatattattcgacgctattagatgcgctagtattacgaaatatagaaccgatagtaacgttatatcattgggatttaccgttagcgctacaagaaaaatatggtggttggaaaaatgatacgataatagatatatttaatgattatgcgacgtattgttttcaaatgtttggtgatcgtgttaaatattggataacgatacataatccgtatttagtagcgtggcatggttatggtacgggtatgcatgcgccgggtgaaaaaggtaatttagcggcggtatatacggtaggtcataatctaataaaagcgcattcgaaagtatggcataattataatacgcattttcgaccgcatcaaaaaggttggttatcgataacgttaggttcgcattggatagaaccgaatcgttcggaaaatacgatggatatatttaaatgtcaacaatcgatggtatcggtactaggttggtttgcgaatccgatacatggtgatggtgattatccggaaggtatgcgaaaaaaactattttcggttttaccgatattttcggaagcggaaaaacatgaaatgcgtggtacggcggatttttttgcgttttcgtttggtccgaataattttaaaccgttaaatacgatggcgaaaatgggtcaaaatgtatcgttaaatttacgagaagcgttaaattggataaaattagaatataataatccgcgtatattaatagcggaaaatggttggtttacggattcgcgtgttaaaacggaagatacgacggcgatatatatgatgaaaaattttctatcgcaagtattacaagcgatacgtctagatgaaatacgtgtatttggttatacggcgtggtcgttattagatggttttgaatggcaagatgcgtatacgatacgtcgaggtctattttatgtagattttaattcgaaacaaaaagaacgtaaaccgaaatcgtcggcgcattattataaacaaataatacgagaaaatggtttttcgctaaaagaatcgacgccggatgtacaaggtcaatttccgtgtgatttttcgtggggtgttacggaatcggtattaaaaccggaatcggtagcgtcgtcgccgcaattttcggatccgcatttatatgtatggaatgcgacgggtaatcgactactacatcgagtagaaggtgttcgtctaaaaacgcgaccggcgcaatgtacggattttgttaatataaaaaaacaattagaaatgttagcgcgaatgaaagtaacgcattatcgatttgcgctagattgggcgtcggtactaccgacgggtaatttatcggcggttaatcgacaagcgttacgatattatcgttgtgtagtatcggaaggtttaaaattaggtatatcggcgatggttacgttatattatccgacgcatgcgcatttaggtctaccggaaccgctattacatgcggatggttggttaaatccgtcgacggcggaagcgtttcaagcgtatgcgggtctatgttttcaagaattaggtgatttagttaaactatggataacgataaatgaaccgaatcgtctatcggatatatataatcgttcgggtaatgatacgtatggtgcggcgcataatctactagttgcgcatgcgctagcgtggcgattatatgatcgacaatttcgtccgtcgcaacgaggtgcggtatcgttatcgctacatgcggattgggcggaaccggcgaatccgtatgcggattcgcattggcgagcggcggaacgatttttacaatttgaaatagcgtggtttgcggaaccgttatttaaaacgggtgattatccggcggcgatgcgtgaatatatagcgtcgaaacatcgacgtggtttatcgtcgtcggcgttaccgcgtctaacggaagcggaacgacgtttactaaaaggtacggtagatttttgtgcgctaaatcattttacgacgcgttttgttatgcatgaacaattagcgggttcgcgatatgattcggatcgtgatatacaatttctacaagatataacgcgattatcgtcgccgacgcgactagcggttataccgtggggtgttcgaaaactattacgatgggttcgacgaaattatggtgatatggatatatatataacggcgtcgggtatagatgatcaagcgctagaagatgatcgtctacgtaaatattatctaggtaaatatctacaagaagttctaaaagcgtatttaatagataaagtacgtataaaaggttattatgcgtttaaattagcggaagaaaaatcgaaaccgcgttttggtttttttacgtcggattttaaagcgaaatcgtcgatacaattttataataaagttatatcgtcgcgaggttttccgtttgaaaattcgtcgtcgcgatgttcgcaaacgcaagaaaatacggaatgtacggtttgtctatttttagtacaaaaaaaaccgttaatatttctaggttgttgttttttttcgacgctagtattactactatcgatagcgatatttcaacgacaaaaacgacgaaaattttggaaagcgaaaaatctacaacatataccgctaaaaaaaggtaaacgtgtagtatcg

SEQ ID NO: 250555 - DNA, 3132 bp, synthetic construct
  misc_feature 1..3132: note = Description of Artificial Sequence: Synthetic coding sequence
  source 1..3132: mol_type = other DNA
atgaagccagggtgcgccgctggaagccctggaaatgaatggattttcttctcgacagatgaaatcactactagatatcgaaatacaatgtccaatggaggtcttcaacggtcggtgatccttagcgcacttatccttttgcgagcagtcaccgggttttcgggggatggaagggctatttggtctaagaatcctaattttactccagtgaacgaatcacagttatttttgtatgatactttcccaaagaattttttctgggggattggtactggggctctgcaagtcgagggtagttggaagaaagacggaaagggtccttccatttgggaccatttcattcatacgcatttgaagaacgtgtctagcactaatggatcctctgactcgtatatttttcttgaaaaggacctttcagccctcgacttcatcggagtctctttttatcagttcagcatctcgtggccccgtttgtttccagacggtattgttactgttgcaaacgccaagggcttgcagtattattctaccttactggatgctctcgttctaagaaatatagagcccattgttactctctatcattgggacttgccacttgcacttcaagagaagtacggtggttggaaaaatgataccattattgatatttttaatgattatgccacctattgctttcagatgtttggagacagagtgaagtattggatcaccattcacaacccatacctagtggcctggcatggatacggaacaggaatgcatgctccgggagaaaaggggaacctcgctgcagtttatactgtgggccataatttgataaaggcacatagtaaagtctggcacaactataatacgcactttaggcctcatcaaaagggctggttgagcattaccctcggaagtcactggatcgaacctaataggagcgaaaacactatggatatatttaaatgtcaacaatcgatggtttcggtacttggatggtttgctaacccaatccatggagatggagattaccctgaaggtatgagaaaaaaattgtttagtgttttgcccattttttctgaggccgaaaaacacgaaatgagaggcaccgctgattttttcgctttttcgttcggaccaaacaatttcaagcctctaaatactatggcaaaaatgggacagaatgtttccctaaatttaagagaagcactgaactggatcaaactcgagtataacaaccctcgaattttgattgcggaaaacgggtggtttacagactccagggttaaaactgaggatacgacagctatttacatgatgaaaaatttcctatcacaagtgctgcaagcaattagacttgacgaaatccgtgtattcggatatacggcctggtccctgttggacggtttcgagtggcaagatgcatatacaataaggaggggactgttctatgtcgatttcaattctaaacagaaggaacgtaaacccaagtcgtctgcacactattataagcaaatcataagagaaaacggtttttctcttaaggagtctacaccagatgtgcaaggtcaatttccttgcgatttctcttggggggttacagaatcggtgttgaaaccggagtcggttgcttcgtccccacagttctctgatcctcatctatatgtttggaacgctaccgggaaccggctcttacaccgtgttgaaggtgtgagattaaagacacgtcctgcacaatgtactgatttcgtaaacattaaaaaacaactggagatgctggcgaggatgaaagtgacccattatagattcgctctcgactgggcatccgttctgccaactggaaacctctcagccgttaataggcaagccttgaggtattatagatgtgtagtatctgagggtttaaaacttggtatttcagctatggtcacattgtactacccaacgcatgctcatctaggtctcccagaaccacttcttcatgcagacggttggctgaatccttccacagctgaggcttttcaggcttatgctgggctctgttttcaagaattgggagatctcgtgaagttgtggatcactattaacgagccaaaccgtttatcagacatctataatagatctggaaacgacacctatggtgctgcacataacttacttgtggcgcatgcattggcctggcgactttatgataggcagttccgcccgtcccaaaggggtgctgttagtttgtcgctccacgcggattgggccgagcctgcaaacccctatgctgactcacattggcgagctgctgaacggttcttgcagttcgagattgcctggtttgccgaaccactttttaagacgggtgattacccagcggctatgagagagtacattgcttccaagcatagaagaggactgagctcaagtgcactgcctagattgactgaagcagagagaagattgcttaaaggtacggttgatttctgcgctttaaatcattttaccactcgttttgttatgcacgagcaactagctggatcgagatatgattcggatagagatattcaattccttcaggatataactagactgtcgagcccgactcgtctcgctgtcattccatggggagtgagaaagttgttgcgttgggttcgcaggaactatggtgatatggacatttacattacagcatctggcatcgatgatcaggctcttgaagacgacagactccgaaagtactaccttggtaaatatttgcaagaggtcttgaaggcatacctcatagataaggtgagaattaaaggctattatgctttcaagcttgcggaagagaagtctaagccgaggttcgggttcttcacaagcgattttaaggctaagtcttcaatccaattttataacaaggtaatcagtagtagggggttcccattcgaaaattcctcttcgaggtgttcgcagacacaggagaatacagaatgtaccgtttgcctttttttggttcaaaaaaaacccttaatctttcttggctgttgttttttttctacgctcgttctacttttgagtatcgcaattttccaacggcagaagcgaaggaaattctggaaagctaagaatcttcagcacatccctcttaaaaaggggaagagggtcgttagt

SEQ ID NO: 250556 - DNA, 3132 bp, synthetic construct
  misc_feature 1..3132: note = Description of Artificial Sequence: Synthetic coding sequence
  source 1..3132: mol_type = other DNA
atgaaacctggttgcgcggccggatcgccaggaaacgaatggatctttttctcgacggacgaaatcacgaccagatatagaaataccatgagcaacggaggacttcaacggtcggttattctgtctgcgctgattttgcttcgagccgtgactggtttctcgggggatggccgcgcaatttggtcgaaaaatccaaacttcaccccagtgaacgaatcgcagctgttcctgtacgataccttccctaaaaactttttctggggaattggtaccggagccctccaagtcgaaggatcgtggaagaaggatggtaagggaccttccatctgggatcatttcattcatacccatcttaagaatgtctcaagcaccaacggatcgtcagactcctacatttttctggaaaaggacctttcagcactggactttatcggcgtgtcgttctaccagttttccatctcttggcctaggctctttcccgatggcattgtcaccgtggctaacgccaaaggtttgcagtactactcaaccctcctggatgcactggtgctccgaaacattgagcctatcgtgactctttaccattgggacctgccactcgcactccaggaaaagtatggcggatggaaaaacgatactatcatagacatattcaatgactacgctacctactgctttcagatgtttggggatcgcgtgaagtattggattaccattcataacccatacctggtggcgtggcatggatacggtactggtatgcacgcaccgggggagaagggaaatcttgccgccgtgtacactgtggggcacaatctgatcaaggcccatagcaaggtgtggcacaattacaacacgcattttagacctcatcaaaagggttggctttcgatcactctgggatcccattggattgagccgaatcgcagcgaaaacactatggacatattcaagtgtcaacaatcgatggtgtccgtcctcggctggtttgcgaacccaattcatggtgatggcgattacccggaaggcatgcgtaagaaactgttctccgtgctgcccatctttagcgaagccgaaaagcacgaaatgcgcggtaccgcagatttcttcgcgttcagtttcgggcctaacaatttcaaacctctgaacactatggctaagatgggacagaacgtttccctcaacctgcgcgaggcacttaactggattaagttggaatacaataatcctcgcatactcattgctgaaaacggatggtttaccgactcgagggtgaaaactgaagataccaccgccatctacatgatgaagaattttctgtcacaggtgctccaggcaataagattggacgaaattagagtgtttggatacactgcctggtcgctgttggatggatttgaatggcaagatgcttacacgattagacgggggctcttttacgtagacttcaactcaaaacaaaaggaaagaaagccgaaatcatcggcccattactacaagcaaatcattagagagaatgggttttcgcttaaagagagcactcccgacgtgcagggtcagtttccatgtgattttagctggggtgtgaccgagagcgtgttgaaaccagaatccgtggcgtctagccctcaattttcagatccacatctttacgtctggaacgccaccggaaatcgtttgcttcatcgggtggagggagtgagacttaagacccgccccgcacaatgtactgatttcgtgaacattaagaaacaacttgaaatgctcgcaagaatgaaggtaactcattaccggtttgcacttgattgggcatcagtgctcccgactggcaacctgtccgcagtgaatagacaagcgctcaggtactaccgctgtgtcgtgtcagaaggcctcaagctcggcatctccgcaatggtcactctttactaccctacgcacgcgcatctgggacttcctgaacctctgctgcatgcggatggatggctgaatccatccactgcagaagccttccaagcctacgcaggactctgtttccaagaattgggtgaccttgtgaagctctggatcactatcaatgagcccaacaggctgtccgacatttacaatagatccggaaacgatacctacggagcggcccataaccttctcgtcgcacatgcattggcttggagactttatgacagacaatttagacctagccagcgtggtgcagtctcgttgtctttgcatgcggactgggcagagcctgccaatccctatgcggattcccattggagagctgcagagaggttccttcaattcgagatcgcctggtttgcagaaccactgttcaaaaccggtgattaccctgctgccatgcgcgagtacatcgcatctaagcatcgcagaggactttcctccagtgccctccccagactcactgaagcagaacgccggctgcttaagggtactgtggacttttgtgcccttaatcactttactactcgatttgtgatgcatgagcaactggcaggttcgcgctacgattcagacagagatattcaatttctccaagatataactagattgagcagccccactcgactggccgtgattccatggggagtgaggaaactccttcgatgggtgcgaagaaactacggggacatggacatttacatcaccgcctcgggtattgatgaccaagcactcgaggatgataggcttagaaagtactacctgggaaagtaccttcaagaagtcctgaaggcatacctgattgataaagtgcgcataaagggatactacgcgtttaaactcgccgaagagaagtccaagccacgttttgggttctttacttcggatttcaaggcgaaaagcagcattcagttttacaacaaggtcatctcatccaggggatttccatttgaaaacagctcctcgagatgttcgcagacccaagagaatactgaatgcaccgtctgtctctttttggtgcagaagaagcccctgatattcctggggtgttgttttttctccaccctggtcctgcttctgagcattgctatctttcagcgacaaaagcgccgtaagttctggaaggccaagaatctccaacacattccgttgaagaaaggaaagagagtggtgagc

SEQ ID NO: 250557 - DNA, 3132 bp, synthetic construct
  misc_feature 1..3132: note = Description of Artificial Sequence: Synthetic coding sequence
  source 1..3132: mol_type = other DNA
atgaaaccaggctgcgctgctggatctccgggcaatgaatggatcttcttctcgacagatgagattacaacccggtatcggaataccatgagtaatggtggattgcaaaggtccgtgatactgtccgccctgattctcctccgagctgttacgggcttctccggcgacggccgcgccatttggtcaaaaaatccgaacttcacgcccgtgaatgaaagtcagctgttcctgtacgatacttttcctaagaacttcttctggggcatcggtacaggagcactgcaggtcgaggggagctggaagaaggacgggaaaggaccatccatctgggaccactttattcacactcacttaaagaatgtgtcttccactaacgggtccagtgattcttacatttttttggagaaagatctgagtgccctggatttcattggagtgagtttctaccagttttccattagctggccccgcttgtttcccgacgggatcgtgactgtggcaaacgctaaagggctacaatattattcaaccctgctggacgcgcttgtgctgcggaatattgaaccaatcgttactctgtatcactgggacctgccactggctttgcaggaaaaatacggcggctggaaaaatgataccatcattgatatatttaacgactatgccacatactgcttccagatgtttggcgacagggtcaagtattggattaccatccataacccttacctggtcgcctggcacggttacggcactggaatgcacgctccaggggagaaaggaaatctcgcagctgtgtataccgtgggacacaatttgatcaaggcccactccaaggtctggcacaattacaacactcacttccgcccacaccagaaggggtggttaagtatcacactggggtcccactggatcgaacccaacagaagcgaaaacacaatggatatttttaaatgccagcagtcgatggtgagtgtactgggttggttcgctaaccccattcatggcgatggtgactatccagagggaatgagaaagaagttgtttagcgtactgccaattttcagcgaggctgaaaagcatgagatgcgaggcaccgcggacttctttgcgttctcattcggtcccaataacttcaagcccttgaacaccatggccaagatgggacagaacgtgagcctcaatctgcgagaagccttaaattggatcaaactggagtacaacaatcctagaattctcatcgccgagaacggctggttcacggactcgagagtgaaaacggaagatacgacagccatctatatgatgaagaactttttgagccaggtactccaagccatcaggctggacgagatcagagtgtttggttacacagcctggtcactccttgatggctttgagtggcaagacgcatatactattcggaggggtctcttctacgtagattttaatagtaagcagaaggagcgcaaacccaagagttccgcccattattataagcagatcatcagggagaacggcttcagccttaaggaaagcacccctgacgtacaagggcagtttccctgtgacttttcttggggcgtgacggagtccgtcctgaagccagagtccgtagccagcagcccacagttctccgaccctcatttatacgtctggaacgccactggcaaccggctgctccaccgggttgagggtgtgagactcaaaacacgcccagcacagtgtacagacttcgtgaatatcaagaagcaacttgaaatgcttgcccgaatgaaggttacccactaccggttcgccttggactgggctagcgtcctccctacaggcaacctgtccgccgtcaatcgtcaggctctcagatattatcgttgcgtggttagcgaggggcttaagctcggcatcagcgcgatggtgaccctgtattacccaacccacgcccacctggggttacccgagcccctgctacatgccgacggatggctgaacccctccaccgctgaggcttttcaggcatacgctggactgtgcttccaggagttgggcgatttggtcaagctttggataaccatcaacgagcctaacagactgtccgacatctataatcggtccgggaacgatacatacggagcggctcacaacctcctcgttgcccacgctctagcctggcgcttgtacgacaggcagtttaggccttcgcaacgtggtgccgtgagtctctctctgcacgccgactgggccgaacccgctaacccgtacgccgattcacactggcgcgccgctgaacggtttctgcagttcgagatcgcctggtttgccgagcctctgtttaagaccggcgactatcctgctgccatgcgggagtacatagcgtcaaagcatagaagaggccttagcagcagtgcccttccccggttaactgaggccgagaggagactgcttaagggcacagttgacttctgcgctctaaaccatttcacaaccagatttgtaatgcatgagcagctggccggatccaggtatgatagcgaccgcgatatccaattccttcaagatatcacacgcttatccagccctacacgcttagctgtgatcccttggggagttcgtaagctgcttcgttgggtaaggagaaactacggggatatggatatctatattacagcttctgggatcgacgatcaggccctggaggatgaccgcctacggaagtactacctcgggaagtatctgcaagaggttctcaaagcctacctgattgacaaggtgcggatcaagggttactatgcttttaaattggcagaagaaaagagcaagccgcggttcgggttcttcaccagcgatttcaaggcgaagtcgtccatccaattctataacaaggtgataagctctcgcggtttccctttcgagaactcatcctccaggtgttcccagactcaggagaataccgaatgcacggtgtgtctgttccttgtgcagaagaaacctttgatttttctggggtgttgtttcttcagtactttagtacttttgttgtcaatcgccatatttcagagacaaaagcggcgcaagttttggaaggccaaaaacttacagcacatcccacttaaaaaaggaaagagagtcgtgtcg

SEQ ID NO: 250558 - DNA, 3132 bp, synthetic construct
  misc_feature 1..3132: note = Description of Artificial Sequence: Synthetic coding sequence
  source 1..3132: mol_type = other DNA
atgaaaccaggatgtgctgccggatcaccggggaatgagtggatcttcttctcaaccgatgagattactacgcgttatcgtaacaccatgagtaatggaggactccaaagatccgtcatattgtctgcactaatcttgcttagagctgttacaggattttcaggcgatggccgagctatttggtcgaaaaatccaaatttcacaccagtgaatgaatctcaacttttcttgtatgatacgtttcctaagaatttcttctggggaatcggtactggagctctccaagttgagggatcatggaaaaaagatggtaaaggaccatcgatctgggaccactttattcatacacacctaaagaacgtctcatccactaatgggtcatcggattcttatatcttcctcgaaaaagatctgtctgcgcttgattttatcggcgtgtccttctatcaattctccattagttggccgagactatttccggacgggattgttacagtagctaatgccaagggattgcaatactactctacgcttttggatgccctagttctacgtaacatcgagccaattgtcactttgtatcattgggatttaccattggcactgcaagagaaatacgggggatggaaaaatgatactataatcgatattttcaacgattatgctacctattgttttcaaatgtttggagatcgtgtcaagtattggattacaattcacaacccttacctcgttgcctggcatggatacggaactgggatgcacgcacccggagagaaggggaaccttgctgctgtttacacggtgggacataatttgatcaaagcccacagcaaggtttggcataattacaatactcattttaggccgcatcaaaagggttggctctctattaccttgggatcacattggatagagccaaatcgttcagaaaatacgatggacatcttcaagtgtcaacaaagcatggtcagcgtcctcggatggtttgccaatcctattcatggtgatggagattatccagaaggcatgaggaaaaaacttttctccgtattaccaattttctctgaggctgaaaaacacgagatgaggggaacagctgacttctttgctttctcatttggaccaaacaactttaagccccttaacactatggcaaaaatgggccaaaatgtctctctgaatcttagagaggctctgaattggattaaactggaatataataatcctagaattcttatagcagaaaacgggtggttcacggattcacgtgtcaagactgaagatactacagccatttatatgatgaaaaacttcttgagtcaagtgcttcaggcaatacggctagatgaaattcgggtttttggatacactgcatggtcgttattggacggatttgaatggcaagatgcttatactattcgaagaggcttattttatgtcgatttcaattccaaacaaaaagaaagaaaacctaaaagcagtgctcattattacaagcagattatcagagagaatggattcagtctcaaggaaagcacacctgatgtgcaaggacaatttccttgcgatttctcgtggggtgtaactgagtcagtccttaaaccagaatcagtagcctcttcgccacaattttctgatccccatctttatgtctggaatgctacagggaacagacttctacatagagttgaaggcgttagattgaaaacacgacctgcacagtgcaccgactttgtaaacattaaaaaacagctcgagatgcttgctcgtatgaaggtaacccactatcgatttgctctagattgggctagtgtattgccgacagggaatttgagcgcagtaaaccgacaggctttgagatactacagatgtgtcgtttccgagggactcaaactgggtataagtgcgatggtcactctttactaccctacgcatgctcatttgggacttccagagccacttttgcatgctgatggatggctgaatccatcgactgctgaagccttccaggcgtatgctggattgtgctttcaagagttaggagatctggttaaattgtggattacgattaatgaacctaatcgactttctgacatttataacaggagtggaaatgacacttatggggccgctcacaacttacttgtcgcacatgcgcttgcttggagattgtatgatcgacaattccgaccttctcaacgcggagccgtatctctttcactccatgcagattgggcagagcccgcaaatccatatgctgattctcattggcgagccgccgagcgctttttacaatttgaaatcgcttggttcgctgaaccattatttaaaactggtgattatccagctgctatgcgagagtatatagcctcgaaacaccgtcgtggtctctcgagcagtgcgttaccaagattgactgaagccgagagacggttgcttaaaggaacagttgacttctgcgctctaaaccacttcacgacgcgttttgttatgcacgaacagttggcaggatcacgctacgattcagatcgagatatacagttcttacaagatattactagactgagttcaccaactagattggctgtaatcccatggggagtccgaaaacttctgcgttgggtgaggagaaattatggtgatatggacatttatattaccgcctccggcattgatgatcaggctttagaagacgatagactccgtaaatactatcttggaaaataccttcaagaagtcctcaaggcatatctcattgataaggtgaggattaaaggttattacgcatttaagctggcagaggaaaagtcgaagccacgtttcggattttttacctctgatttcaaagcaaaaagctctatccagttttacaacaaagtcatttcaagcaggggattcccatttgaaaattcatcctcccgttgctcccagacgcaagaaaatacagaatgcacagtgtgcttatttctggtccagaaaaaaccgcttatttttctcggttgctgctttttctcaactttggtacttttactatccatcgctatttttcagcggcaaaagagacgtaaattttggaaagctaagaatcttcagcatattcctttaaaaaaaggaaagcgtgtggtgtcc

SEQ ID NO: 250559 - DNA, 3132 bp, synthetic construct
  misc_feature 1..3132: note = Description of Artificial Sequence: Synthetic coding sequence
  source 1..3132: mol_type = other DNA
atgaagccaggctgcgcagctggttcccctggcaacgaatggattttcttctccaccgacgagatcaccacgcgctaccggaacaccatgtcaaacggaggactccagcgtagcgtcatcctgtctgccctcatcctgctgcgagccgtcacgggtttctccggagatggtcgcgccatttggtcgaaaaacccgaattttaccccagtcaacgaatcccagctctttctgtacgacaccttccccaagaacttcttctggggcattggtactggcgctctccaggtcgagggaagctggaaaaaggacggcaagggcccatctatctgggaccacttcattcacacccacttgaagaacgtctcttccaccaacggctcctccgactcttacatcttcttggaaaaggacctatctgccttggacttcatcggtgtctcgttctaccagttctccatctcctggcctcggttgtttccggacggcatcgtcacagttgccaacgcaaagggacttcagtactacagtactctcctcgatgccctagtcctgcggaacatcgagcccatcgtgactctctaccattgggatctgcccctcgccctgcaagaaaagtacggtggttggaagaacgacacgatcattgatatcttcaatgactacgccacctactgcttccagatgtttggcgacagagtgaagtattggattacaatccacaacccttacctggtggcctggcatggctatggcaccgggatgcatgcccctggcgaaaagggaaacctggccgcagtttacaccgtgggccataacctgataaaagcacacagtaaagtttggcataactacaatacccacttccgcccccatcagaagggttggctgtccatcactctaggttcgcattggatcgaaccaaaccgctccgagaataccatggacatcttcaagtgccaacagtccatggtgtccgtgttgggttggttcgccaaccccattcacggcgacggcgactaccccgagggcatgcggaagaagctcttctctgtcctgcctatcttctctgaggcagagaagcacgagatgcgtgggactgccgatttcttcgctttctcatttggtccgaacaacttcaagcccttgaacactatggccaagatgggccaaaacgtctctctgaacctccgtgaagcgctcaactggatcaagttggagtacaacaacccccgtattctgatagcagagaacggatggttcaccgacagccgggtcaagacggaggacaccaccgccatctatatgatgaagaacttcctgagtcaggtcttgcaggccatccgcttggacgaaatccgtgtattcggctacaccgcctggtccctacttgatggtttcgagtggcaggacgcttacacaattcggcgcggattgttctacgtcgatttcaacagcaagcagaaggagcgcaagcccaagtcctccgcccattattacaagcagatcattcgtgagaatggtttctcgctgaaggagagcactccagacgttcagggtcagttcccctgtgattttagctggggcgttaccgagtcggttctcaaacctgagtccgttgcatcgtccccgcagttctccgatccccacctgtacgtgtggaatgcgaccggtaaccggctgctgcaccgggtcgagggtgttcgtctgaagacccgcccagcacagtgcactgactttgtgaacatcaagaaacagcttgagatgttggcccgcatgaaggtaacccactaccggttcgcgttggactgggcttccgtgctgcccaccgggaatcttagcgcggtcaaccgtcaggccctgcggtactaccgttgcgtggtcagcgaaggccttaagctcggcatcagcgccatggtcaccctttactaccccacccacgcccatctgggactgcccgagccgctcttgcacgctgacggctggcttaacccttccaccgctgaggccttccaggcttacgccggcctttgttttcaggagcttggagatctcgtcaaactatggatcacgatcaacgagcccaataggctctctgacatttacaaccggtctggtaacgacacctacggcgccgcgcacaaccttcttgtggcccatgcactcgcttggcgcctttatgatcgtcaattccgcccttctcagagaggcgccgtgtcgctgagcctgcatgcggattgggcggagccagcgaacccttacgcagactcccactggcgtgcagctgaacgtttcctgcaatttgagatcgcgtggttcgcagagccgttgttcaagaccggtgattacccggctgccatgcgcgagtacattgccagcaagcatcggcgcggcctgtcgtcaagtgcccttccccgcctcactgaggctgagcgtcgcctgctcaagggtaccgtcgacttttgcgccctcaaccactttactacccgcttcgtcatgcacgaacagctcgctggcagccgttacgattcggatcgcgatattcaatttctccaggacatcacgagactttccagtcccactcgcctggccgtgatcccctggggagttcgtaagctgctgcgttgggtgcggcgtaactacggtgatatggatatctacatcaccgcttccggtatagatgaccaggctctagaggatgacagactgcgcaagtattaccttggcaagtatctgcaggaagtcctgaaggcctaccttatcgacaaggttcggattaaaggctactatgcattcaagctggctgaggaaaaatcaaaaccgagatttggcttctttacctccgactttaaggccaagagttccatccagttttacaacaaggtcatctcttcgcgcggttttcccttcgagaactccagttcgcgatgctcgcaaacccaagagaatactgagtgcaccgtgtgcctcttcttagtccagaagaaacccctgatcttcctaggctgctgcttcttctccacactagttcttctgctctcgatcgctatcttccagcgtcagaagcgccgcaagttctggaaggcgaaaaatctccagcacatcccccttaagaagggcaaacgtgtcgtatcg

SEQ ID NO: 250560 - DNA, 3132 bp, synthetic construct
  misc_feature 1..3132: note = Description of Artificial Sequence: Synthetic coding sequence
  source 1..3132: mol_type = other DNA
atgaaacccggttgtgcagcagggtctcctgggaatgagtggattttcttttccaccgacgaaatcaccacacgctaccgcaatacgatgtcgaacggaggcctccaacgaagcgttatactctctgcgctgatccttctgcgagctgtgacaggcttctccggggatgggcgcgctatctggtctaagaatcctaatttcaccccagtgaatgagagccaacttttcttgtatgacacattccccaaaaattttttctggggaatcgggactggcgcacttcaggtcgaggggagttggaagaaggacggtaagggaccatcaatatgggatcactttatccacacccacttaaaaaatgtaagcagtacaaacggatcatctgactcatatatattcctggagaaagatttgtctgccctcgacttcatcggtgtgagtttctaccagttttctatttcttggcctcgactatttcccgatggaatagtcaccgtagccaacgcgaaaggcttgcagtattatagcacattactcgatgctctggtgctgcgcaacatcgaaccaatagtgaccctttatcactgggacctgcccctggcactacaagagaagtacggggggtggaagaacgacactattatagatatctttaatgactacgctacctactgcttccaaatgttcggtgaccgggtgaaatactggatcacaattcacaatccctatttagtggcctggcatggatacggtactggcatgcatgcgcctggtgagaaggggaacttggctgctgtttatacggtcggccacaacttgatcaaagcccactccaaagtttggcataactacaacacccacttccgccctcaccagaaaggatggctgtccataacccttggctcccactggatcgagccaaaccgcagtgagaacaccatggatatttttaaatgtcagcagtccatggtctcagtgctggggtggttcgctaatcctattcacggcgatggtgattatcccgaaggaatgcgtaaaaagcttttctctgtgttaccaatcttctcagaggccgagaagcatgaaatgaggggaacggctgacttcttcgcatttagtttcgggcccaacaatttcaaaccattgaacacgatggcaaaaatggggcagaacgtctccctgaacctgagagaagccctgaactggatcaaactggagtataataaccctcgcattttaatcgcagaaaacggctggttcaccgacagtagagtgaaaaccgaagacactaccgccatatatatgatgaagaatttcctgagtcaagtgctccaggctattcgccttgatgaaataagggtgtttggttataccgcctggagtctacttgacggcttcgagtggcaagacgcctatacaatcaggagggggctgttttacgttgattttaactcaaagcaaaaggaacgcaagcctaagtcctctgcccattattacaaacagattatccgagagaatgggttctcgctgaaagaatctacacccgatgtgcaggggcagttcccctgcgacttttcttggggggtgaccgaaagtgtgctcaagcccgaatcagtcgcaagctctccccagttttctgatccacatctctatgtgtggaacgcaacagggaaccggctcctccatcgggttgaaggcgtgcgtctaaagactagacccgcacagtgcaccgattttgtcaacatcaagaaacagttggagatgttagctcggatgaaggttacccattatcgttttgccctagactgggcaagcgtcctgccaaccggaaacctgtctgctgtaaatagacaagcactccgctactatcggtgtgtggtaagcgagggactgaagttaggaatcagcgcgatggtgacactctattacccaacacacgcgcacttgggcctgcctgagcctctattgcatgcagacggctggcttaatcctagcaccgcagaagctttccaagcctatgcaggactttgtttccaggagctcggcgacctcgtaaagttgtggatcacgatcaacgaacccaaccgactctctgacatctacaacaggtcagggaatgatacatacggagcggctcataatcttctcgtggcgcacgctttggcatggcggctatacgatcggcaattcaggccgagccagaggggggccgtgtctttgagtctccatgccgattgggcagagcctgcgaacccctatgctgattctcattggcgtgccgctgaacgcttcctgcagttcgagattgcatggtttgccgagcccctattcaaaaccggggattacccggcagctatgcgcgaatatatcgcgagtaagcatcgccggggtttgagtagttcagccctccccaggttgacagaagctgagcgtaggctactgaagggcactgtcgacttctgtgcacttaatcacttcacgacacgcttcgttatgcacgaacaacttgccgggtctcgctatgattcagacagggacattcagttcttgcaggatatcacaagacttagctcgcctactagattggcggtcattccttggggggtacgaaaactgctccgttgggtgcggcgtaactatggagacatggacatatatatcactgccagcggtatcgacgatcaggcacttgaggacgatagacttagaaaatactacctcggaaaatacctgcaggaggtcctaaaagcgtacttgatcgataaggtgagaataaagggttactatgcctttaagttagccgaagagaagagtaaaccacgatttggcttctttacttctgacttcaaagctaagtcaagcattcagttttataacaaggtgatctcctctagaggctttccttttgagaacagttccagccggtgcagccagacccaagaaaatacggagtgcactgtttgcttgttcctcgtgcaaaagaagcccctgatttttctggggtgttgcttcttcagcactctcgtgttgctgctgagtatagccatttttcaaaggcagaagcgacggaaattctggaaagccaagaatttgcagcacataccgttgaaaaaagggaaaagagttgtgtcg

SEQ ID NO: 250561 - DNA, 3132 bp, synthetic construct
  misc_feature 1..3132: note = Description of Artificial Sequence: Synthetic coding sequence
  source 1..3132: mol_type = other DNA
atgaaacccggctgtgctgccgggtccccaggcaacgagtggatcttctttagtacagatgagattaccacccgatatcgtaacaccatgagcaacggaggtctccaaagaagcgtcattctgtcagcgctcattctgctcagggctgtgaccggatttagcggagatggacgcgctatttggtcaaaaaaccccaactttaccccagtcaatgaaagccaactctttctctatgacacatttcctaaaaacttcttttggggaattgggaccggcgcacttcaggtggagggaagctggaaaaaagacggtaaaggaccatctatatgggatcactttatccacacccatcttaaaaatgtgagcagcaccaatggttcatctgattcgtacatcttcctggaaaaagacctctccgctttagactttataggggttagtttttatcaattttcgatctcatggccaaggttattcccggatgggatagtcacggtggcgaatgctaagggattacagtactattctacactgctggatgcactcgttttacggaacattgagcctatagtgaccctgtaccactgggatcttcctttagccctgcaggagaagtacgggggttggaaaaacgacactatcatcgacatctttaacgattatgccacttattgctttcaaatgtttggcgacagggtgaagtattggatcacaatacataacccatacttagttgcctggcatggctacggtacaggcatgcatgctcccggtgagaaagggaacctggcagctgtctacactgttggacacaatcttatcaaagcccattccaaggtctggcacaattacaacactcattttagacctcaccaaaaagggtggctgtcgatcactttggggtcacattggatcgaacccaaccgatccgaaaacactatggacattttcaagtgccaacagagtatggttagcgtactgggctggttcgccaacccaatccacggggatggcgactatcctgaaggaatgcgcaagaagctcttctcagtgctaccaatcttcagcgaggcagaaaaacatgaaatgaggggcaccgccgattttttcgccttcagctttgggcccaacaacttcaagccactgaacacaatggccaagatgggacaaaacgtctctttgaacttgagggaggcactcaactggatcaaattggagtacaataatccaaggattctcattgccgaaaacggttggtttacagatagccgtgttaagacggaggatactaccgccatctacatgatgaagaactttctgtctcaagtgcttcaggcaatcaggctggacgaaattagggttttcggctatacagcctggtcgttgctcgatggctttgaatggcaagacgcctacacaatccgtcgaggattgttttatgttgactttaactctaagcagaaggaaaggaaaccgaaatcaagcgctcattactacaagcaaattattagggagaacggtttttctctgaaggagagcactccagatgtccagggacaatttccctgtgatttttcctggggcgtgaccgagtccgttcttaagccggagagcgttgccagtagcccccaattttcagaccctcatctgtatgtctggaacgcaacaggcaacagacttcttcaccgagttgaaggcgttaggctcaaaactcgcccggcccagtgcacagatttcgtgaacataaaaaaacagctcgagatgttagcgagaatgaaagtgacccactataggttcgcactcgattgggcctctgtcctgccaaccggtaacctttctgccgtaaatcggcaggcccttcgttactataggtgcgtcgtgtctgaaggattaaaacttggcattagcgctatggttactctgtactaccccactcatgcccacttgggactgcccgagccgcttctgcacgctgatggctggcttaaccccagcaccgctgaagcttttcaggcctacgctggcttgtgctttcaggaactgggggacctcgtgaaactctggattaccatcaatgaacccaaccgtcttagtgatatttacaaccggagtggtaacgatacatacggcgcggctcacaatttgctcgttgctcacgccttagcctggcggctctacgatagacagttcaggcccagtcaacgtggagcagtttctttgagcttgcatgccgactgggccgaacccgctaatccatacgccgactcgcattggcgcgctgccgagcggttcctacagttcgagattgcatggttcgcagagccactgttcaagaccggcgattacccggctgcaatgcgggaatatatcgcgtcaaaacacagacgcgggctctcatcctcagcactgcctcgcctcaccgaagccgaaaggcgcctcttgaaagggacagtggatttctgcgccctgaaccactttaccacccgatttgtgatgcatgaacaacttgccggaagcaggtacgactccgacagagacatccagttcctgcaggatattaccagacttagcagtcccactagacttgctgtgatcccttggggagtgaggaaactgttgaggtgggttaggcgcaactatggggatatggacatctacatcacggcatcggggatcgatgaccaagccctggaagatgacagactgaggaaatactatctgggtaagtacctgcaagaggtccttaaagcgtacctgatagataaggtcaggattaagggctattacgccttcaagctggctgaggaaaaaagtaagccaaggtttggttttttcacatctgactttaaagccaaatcatctatacagttctataacaaagtgatcagttctcgtgggttccccttcgagaactcttccagccgatgcagtcagacccaggaaaacacagagtgcaccgtgtgcttgttcctggtacagaagaaacctctgatattcctgggatgctgttttttctctaccctggtgcttttactctccattgctatctttcagcgccaaaagcgccggaagttttggaaagctaaaaatctccaacacatcccactcaagaagggtaaaagggttgtgagt

SEQ ID NO: 250562 - DNA, 3132 bp, synthetic construct
  misc_feature 1..3132: note = Description of Artificial Sequence: Synthetic coding sequence
  source 1..3132: mol_type = other DNA
atgaagcccgggtgtgccgcagggtctcccggtaacgagtggattttcttttcaacagacgaaataacaaccagataccgcaacaccatgtccaacgggggcctgcagaggagcgtgatcctcagcgccctgattttgctgcgtgccgtgactgggttctcaggagacggaagagctatttggtctaagaaccctaacttcacgccagtcaacgagtctcagctatttctctacgacacttttccaaagaactttttctgggggattggaacaggagcccttcaggtggaaggaagctggaaaaaggatggcaaggggccatcgatctgggaccacttcatacacacccatttgaaaaacgtgtcttctacaaacggatcgtctgactcctacatctttctggaaaaggatttaagtgccttggacttcattggggtctcattttaccagtttagcatcagctggcccagacttttcccagacgggatcgtaacggtggcaaacgccaaaggcctccagtattactcaacccttctggatgccctggtcctgcgcaatattgagccaattgtgaccctttatcactgggatcttccactagcgttgcaggaaaagtatggaggatggaagaacgacacaatcatagacattttcaatgattacgcgacatattgctttcagatgttcggagacagggtgaaatattggataaccatacataacccatatctcgtggcgtggcatggttatggcacaggcatgcacgcccctggagagaagggtaatcttgcagcagtctacaccgtgggacacaatctaatcaaggcccactccaaggtttggcataactataacactcatttccgcccgcatcagaagggttggttgtccatcacactgggcagccattggatcgagccgaacagatcagaaaataccatggacatcttcaagtgccagcagtctatggttagcgtcctggggtggttcgcgaatccaatacatggtgacggagattaccccgagggcatgcgcaaaaagctcttcagcgtcctcccaatctttagtgaggctgagaaacatgagatgcgggggacagctgattttttcgcctttagttttgggcccaacaattttaaacctctgaatacaatggctaaaatgggacagaatgtgtccttgaacttaagagaagcccttaactggattaagcttgaatacaataacccccggatcctcatcgcagagaatggctggttcactgattctcgggtaaagacggaagacaccaccgccatttatatgatgaagaattttctgtctcaggttttgcaggccatccggctggacgagattcgcgtattcggatatacggcatggagtttattggatggattcgaatggcaagacgcatatactatccggagggggctgttctacgtggacttcaatagcaagcaaaaagagcgcaagccaaaatccagcgcccactactacaagcagatcataagggagaacggctttagcctcaaggaaagtacccctgatgttcagggccaattcccttgcgacttctcttggggtgtaaccgagtctgtcttgaaaccagaatccgtagcttcatcaccgcagttttccgaccctcacctgtacgtgtggaatgccaccgggaatagactgctacatagggtggagggagtgcggctgaagacaaggccagcacagtgcaccgactttgtgaatatcaagaagcagcttgagatgctggcacgcatgaaggtgacgcattatagatttgccctggactgggcatctgtgctgcctaccgggaacctttccgcagtgaatcgccaagctctccgttattatcggtgcgtcgtttctgaggggctgaaactcggcatctccgcaatggtgaccctgtactaccctacgcatgcgcacctggggttacccgaacccctgctccacgccgatgggtggctaaacccatccacggccgaagcctttcaggcctacgctgggctctgttttcaggagctgggtgacctggttaagctgtggatcactattaatgaacctaatcggctatcagacatctataatcgatctggaaatgacacttatggcgcagctcacaatctgctggtggcccacgccctagcatggaggttgtatgacagacaatttcgcccctcacaacgaggtgctgtgtctttgtctctgcacgcggactgggcggaacctgctaatccttatgccgactctcactggagggccgcggaacgctttctgcagtttgaaatcgcttggttcgcggagcccctattcaaaactggcgattatccagccgctatgagagaatatatcgcgagtaagcaccggcggggactgagtagctctgccctgcctaggctgaccgaggcggaaagaagattgcttaaaggaaccgttgacttttgcgctctgaatcatttcacgactcggttcgttatgcatgaacagctggcggggtcccgatatgactcagaccgcgatattcagtttctgcaggatatcactcggttgtcttctcccacacgtctggccgttattccttggggtgtccgcaaactgctgcgctgggtgaggcgtaactacggagacatggacatctacatcacagcctccggtatagacgatcaggcactggaagacgatagacttagaaaatattatcttggcaaatatctgcaagaagtgctcaaggcatatcttatcgataaagtcaggattaaaggatactatgctttcaagctcgcggaggagaagtctaaacccaggttcggtttcttcacgagtgactttaaagccaagagcagcatccaattctataacaaagtgatcagctctagaggcttccccttcgaaaatagttcaagtagatgttcccaaactcaggaaaataccgaatgtactgtttgtctgttcttagttcagaagaaacccttgatcttccttggctgttgctttttttcgaccctggtgctgctcctgtctatcgctatttttcagaggcagaagcggcggaagttttggaaagccaagaaccttcaacacataccgctgaaaaaagggaaaagagtggtgtcc

SEQ ID NO: 250563 - DNA, 3132 bp, synthetic construct
  misc_feature 1..3132: note = Description of Artificial Sequence: Synthetic coding sequence
  source 1..3132: mol_type = other DNA
atgaagccgggatgcgcagcgggaagcccgggcaacgagtggatatttttttccacagatgaaatcactacgcgataccgaaatacaatgagtaacgggggcttacaacgcagtgttattttgtcagcattaattctgttacgcgcggtaaccggcttttctggcgacggcagagctatatggagcaaaaaccctaacttcacgcctgttaacgaatctcagctttttctgtatgacacctttcctaaaaatttcttttggggcattgggacaggagcacttcaagtagaaggttcttggaagaaggatggtaaaggcccgtctatctgggatcactttatccatacgcacttaaagaacgtatcatccacaaatggtagttccgactcctatatttttttagaaaaggacttgagcgctctggactttataggcgtctccttttaccaattttctatctcatggcccagattatttccggatgggattgtaacggttgcaaatgcaaaagggctccagtattattcgacacttctggacgcactggtactcagaaacatcgagccgattgtgactctgtatcattgggatcttccgttagcacttcaagaaaaatatggcggatggaaaaacgacacgattattgatatctttaacgattatgctacatattgcttccaaatgtttggcgatcgcgtgaaatactggattacaatacataacccttacctggttgcgtggcatggatacggcacgggaatgcatgcgccgggagagaaaggtaaccttgcagccgtttacaccgtaggacataatctcattaaagcgcacagcaaagtgtggcataattacaatacgcattttcgcccgcatcaaaagggctggttgtctatcacattaggatcgcactggattgagccaaatagatcagaaaatacaatggacatttttaagtgtcagcagtcaatggtgtcggtcttgggatggttcgcaaatcctattcacggagatggtgattacccagaaggcatgagaaagaaacttttttccgttttgccgattttctcggaagcagaaaaacacgaaatgcgcggaactgcagatttttttgcattctcctttggaccaaataattttaagccgttaaatacaatggcgaaaatgggtcagaacgtctcacttaatttgcgagaagccctgaattggatcaaattagaatataacaatccaaggattttaatcgctgaaaacggatggtttacagacagccgcgttaagaccgaagatacaacggctatttatatgatgaagaactttttatctcaggttttgcaggctattagacttgacgaaatccgggtgtttggatatacagcttggtctttgttggacggttttgagtggcaggatgcatacacaatcagacgtggattattttatgtggacttcaacagcaaacagaaggagagaaaaccaaagtcgtctgcccattattataaacagattatacgggaaaatggtttctcattaaaagaaagcacaccggatgttcagggacaatttccatgcgacttttcttggggcgttacagaatccgtactgaaaccggaatcagttgctagcagcccacaattttcagacccgcatctttacgtctggaatgcaacgggaaatcgtctcctgcatcgggtcgaaggcgtccggctgaagacgcgtccggcccagtgtacagattttgtaaacatcaaaaaacagcttgagatgctggcgagaatgaaggtaacccattacagattcgccctggattgggcttctgtcttgccgacgggcaatctttcagcggtaaacagacaggctctacgttattacaggtgtgttgtcagcgaaggcctgaaattgggcatttcggcaatggtcacgttatattatccgacacatgcgcaccttggcctgcctgaaccgcttctgcatgcggatggatggcttaatcctagcaccgcagaagcatttcaggcgtatgcaggattgtgtttccaggaattgggcgatcttgtgaaactttggattacaatcaacgaaccaaacaggctgtccgatatatataacaggtcaggaaacgatacctatggcgcagcgcataaccttcttgtggctcatgcgctagcctggaggttgtacgacagacaatttcggccttctcaacggggcgctgtgtccctttcgttgcacgcggattgggccgagccggccaatccatacgccgattctcactggcgagcggccgaacgctttctgcagtttgaaatcgcctggttcgctgaacctttatttaaaactggagattatcctgcggcaatgcgggaatatatagcgtcaaaacaccgccgtggcctcagttcaagcgccctgccaagactgacagaggctgaaagacgcctgctgaaaggtactgtggatttttgcgctctgaatcattttacgacaagatttgttatgcacgaacaattagcaggatcacgctacgattcggatagggacattcaatttctgcaagatataactagattgagttcaccgacgcgcttggctgtaatcccgtggggggttcgtaaactcctgagatgggtcaggagaaattatggagatatggatatctatataactgcctcaggcatcgacgatcaggcgttggaagacgaccgtttgcggaaatactatctcggcaaatatttacaagaggttctaaaagcctatttgattgacaaagtacgcatcaagggatattatgcatttaagctcgctgaggaaaaatctaaaccgcggttcgggtttttcacgagcgattttaaagccaaatcgagtattcagttctacaacaaagtcatttcctcaaggggcttccctttcgaaaattcttctagccgttgctctcagacacaagaaaatacggaatgtactgtttgcttatttttggtgcagaaaaaaccattaatttttttagggtgttgcttttttagcacgttggtccttctattgagcattgctatctttcagagacagaagcgcagaaaattctggaaggccaagaatcttcagcatattcctctcaaaaaaggtaaacgggttgtatcc

SEQ ID NO: 250564 - DNA, 3132 bp, synthetic construct
  misc_feature 1..3132: note = Description of Artificial Sequence: Synthetic coding sequence
  source 1..3132: mol_type = other DNA
atgaagcccggatgcgctgcaggatctcccggcaacgagtggattttttttagcaccgacgagatcacaactaggtacaggaatacaatgagcaacggaggcctgcaacgcagcgtgatcctgtctgctctcatcttgctgagggctgtgacaggcttctcaggtgacggacgcgctatttggagtaagaacccaaatttcacacctgtaaacgagagccagctgttcctttacgacactttcccaaagaactttttttggggcatcggtacgggcgctttgcaagtggagggcagctggaagaaagacggaaaaggcccttctatatgggaccattttatccatactcaccttaaaaacgttagttctaccaacggctcatctgactcttacatttttctcgaaaaggatctttctgccctcgatttcatcggagtgagcttttatcaattctctatcagctggcccaggctcttccccgacggtatagtgacggtggccaacgctaagggacttcagtactactctacgctgctcgacgccctcgtgctccgcaacatagaacccatagtgacactgtaccactgggacttgcctctggccctgcaggagaaatacggcggctggaagaacgataccataatcgacatatttaacgattatgcaacctactgtttccaaatgttcggtgatagagtcaagtattggattacgatacataacccttatctcgtggcctggcacggctacggtactggcatgcatgcacctggtgagaaaggaaatctggcagctgtctacaccgtgggccataatttgatcaaggcgcattctaaagtgtggcacaactacaacacccatttcagaccccaccagaagggctggttgtccattactctcggcagccactggatagaacctaataggtccgagaataccatggatatttttaaatgccagcagagtatggtgtcagttcttggatggttcgctaacccgatacacggagacggcgattacccagagggaatgaggaagaagctgttctcagtgctgcccattttttccgaggcagagaagcatgagatgagaggaactgccgactttttcgctttctcatttggacctaataacttcaagccattgaacactatggccaaaatgggccagaatgttagtctgaacctgagagaggcgctcaactggatcaaattggagtacaacaatccaagaatactcatcgccgagaatggttggtttaccgactctagggttaaaaccgaagatactactgccatctacatgatgaagaacttcttgagccaggtgttgcaggctatcagacttgacgagatcagggttttcggatataccgcctggtctttgctggatggtttcgaatggcaggacgcatacacgattaggaggggtctcttctacgtcgattttaattcaaagcagaaagaaagaaagccgaagagttctgcccactactataagcagataatccgcgaaaacggattcagccttaaagaatcaaccccagatgtccagggtcagtttccgtgcgatttttcctggggagtcactgagtctgtcttgaagcccgagtccgtagccagctcccctcaattctctgaccctcacctctatgtttggaatgctaccggtaatagattgctgcacagagttgagggcgtcagactgaaaacgagacccgcccagtgcaccgacttcgttaacatcaagaagcagttggagatgcttgccaggatgaaagtgactcactacaggttcgcactggactgggcttctgtgcttccgacaggaaacctgtccgccgtgaatagacaggctctgaggtactatagatgtgtcgtgtcagaaggcttgaagcttggtatctccgccatggtaaccctttattaccctacccacgcacacctcggcctgcctgagcccctgttgcacgccgacggctggctcaacccctcaaccgcagaagccttccaggcgtacgccggactttgcttccaagagcttggagacctggtaaagctttggatcaccattaacgagcccaacaggctgtccgatatctataaccgctcaggaaatgacacttacggagctgctcacaatttgctggtggcccacgccctggcttggagactgtacgacagacagttcaggcctagtcagagaggcgccgtctccctgagccttcacgccgattgggctgaacccgcaaacccttacgctgattcacactggagagcggccgagaggttcttgcagttcgagatcgcttggttcgctgagccattgtttaagaccggagattacccagccgccatgagggaatacatagccagcaaacacagaaggggtctcagttcctccgctctcccaagactgaccgaggccgagcgcaggctccttaagggtacagtagacttctgtgctttgaaccatttcaccaccaggttcgtgatgcacgagcagttggcaggatccaggtacgactctgacagggatatacagtttcttcaagatatcactaggctgtctagtccaacaaggcttgctgtaatcccttggggagtgagaaagctcttgaggtgggtgaggagaaactatggtgacatggatatatacatcaccgcaagcggcatcgacgatcaggcgctggaggatgaccgccttcgcaaatactatctgggaaagtacctgcaagaagtgttgaaggcttaccttatcgataaggtgcgcattaagggctactatgcattcaagcttgcagaagagaagagtaaaccaaggttcggtttcttcacttccgactttaaggccaagtcttccatccagttctacaataaagtgatatccagtaggggatttccctttgaaaattccagttctaggtgctcccagacacaggagaacactgagtgcaccgtctgcctctttctggtgcaaaagaagccccttatcttcctgggttgctgtttcttctctactttggtactgctgctctccatcgccatcttccaaagacaaaaacgcaggaagttctggaaagcaaagaacctgcagcacattccactgaagaaaggtaagagagtcgtttct

SEQ ID NO: 250565 - DNA, 3132 bp, synthetic construct
  misc_feature 1..3132: note = Description of Artificial Sequence: Synthetic coding sequence
  source 1..3132: mol_type = other DNA
atgaagccgggctgtgccgccggttcccctggcaacgaatggatctttttctcaaccgatgaaattacgaccagatacagaaacactatgtcaaatggcggcctgcagagatcggtcatcctcagcgctctgatcctcctccgcgcggtcaccggattctcgggggacggccgagcaatctggtccaagaatcctaacttcacgccggttaacgaaagccagctgttcctgtacgataccttcccaaagaactttttctggggcatcggtactggagcactgcaagtcgagggcagttggaagaaggacgggaagggaccatcgatctgggatcactttatccacacccatctgaagaacgtgtcctcaactaacgggtcaagcgatagctatatcttcctggagaaggacctcagtgcccttgatttcatcggtgtgtcattctaccagttctccatctcatggccacgcctctttcccgacggcattgtcactgtggcgaacgctaaaggacttcagtactacagcaccctgctggacgctcttgtgctcagaaatatcgagcccattgtcactctgtaccattgggaccttccccttgctctccaggaaaagtacggcggatggaaaaatgacaccatcatcgatatcttcaacgattacgcaacctactgcttccagatgtttggcgatcgggtcaagtactggatcaccatacacaatccgtacctggtggcatggcatggatacggaaccggaatgcatgcaccgggagagaagggcaatcttgcggccgtgtacactgtggggcacaatctgatcaaggcacatagcaaggtctggcacaactacaacacccatttccgcccgcaccaaaagggttggctgagtattaccctcggaagccattggattgaaccgaaccgatccgaaaataccatggacatcttcaagtgccaacagtccatggtcagcgttctcggatggtttgccaatccaatccacggagatggggactatcctgaggggatgagaaagaaactcttttctgttctcccgatcttcagtgaggcggagaaacatgagatgagaggaactgccgacttcttcgccttctccttcggacccaacaatttcaagccgctgaataccatggcgaaaatgggacaaaatgtgtcccttaatctgcgagaagccctgaactggataaagctggaatacaacaatccgcggatcctgattgcggagaatggttggttcactgactctcgcgtgaaaactgaggataccactgccatttacatgatgaagaacttcctgtcgcaagtcttgcaggccatccgcctcgacgaaatcagagtattcggctacaccgcatggagcctgctcgatggattcgaatggcaggatgcctacactatccgcaggggactgttctatgtcgactttaactccaagcagaaggaacgcaagccgaaatcatcggcacattactacaagcagatcatcagagagaacggattttcgttgaaggaatcaacgcccgacgtgcaagggcaatttccctgtgacttctcatggggagtgactgaaagcgtgctgaaaccggagtccgtggcgtcatcaccgcaattttctgaccctcacttgtacgtgtggaatgcaactgggaaccgactgctgcaccgcgtggagggagtccggctgaaaacccgtccggcccagtgcactgacttcgtgaacatcaaaaaacaactcgagatgctggcgcggatgaaggtaactcactatcggttcgctctggattgggcctcggtcctgccgaccggaaacctgagcgctgtgaaccggcaggcgctgcggtactaccgctgtgtggtgagcgaagggctcaagctgggaattagcgccatggtcactctctactacccgacccacgcccacctcgggcttcctgaacctctgctgcacgctgatgggtggctgaacccctccaccgcggaggccttccaggcctacgctggactgtgttttcaagaattgggcgacctggtcaagctctggattactatcaacgaacccaaccgcctctcagacatctataacaggtcgggaaacgacacgtatggggccgctcacaaccttctggttgcccatgctctggcgtggcggctctacgaccgccagtttcggccttcgcaaaggggagcagtctcgttgtcgctccacgccgactgggccgagccagcgaacccgtacgcagactcccactggcgcgccgcagaaaggttcctgcagttcgagattgcttggttcgcagaacccctgttcaaaaccggcgactacccagctgccatgagggagtatatcgcgtcgaagcaccgtagaggcttgagctccagcgcactcccgcgcctcacggaggccgaacgccggttgctgaagggaactgtggacttctgcgccttgaaccactttactacccggttcgtgatgcatgagcaactcgccggatcacggtacgactccgatcgcgatatccaattcctgcaagatataacccgcctgtcgtcaccaacgcggttggcagttatcccttggggtgtgcggaagttgcttcgctgggtgaggaggaactacggcgacatggacatctacatcaccgcgtcaggcattgacgaccaggccctggaagatgacagactgcggaagtactacctgggcaaatacctgcaagaagtgcttaaagcgtatctgatcgataaagtccggatcaaggggtactacgcgttcaagctggccgaagagaaatccaaaccacgcttcggttttttcacttcggactttaaagcaaagagctcaatccagttctacaataaggtgatttccagccgcggatttccttttgaaaattcgagctcgcggtgctcccagacccaggagaacaccgaatgtacggtgtgccttttcctggtgcagaagaagccgttgatcttccttgggtgctgctttttctccacgcttgtcctcctcctgagcatcgctatcttccagcgccagaagcggagaaagttctggaaagctaagaatctgcagcatatcccgttgaaaaaaggcaagagagtggtatcg

SEQ ID NO: 250566 - DNA, 3132 bp, synthetic construct
  misc_feature 1..3132: note = Description of Artificial Sequence: Synthetic coding sequence
  source 1..3132: mol_type = other DNA
atgaagcccgggtgcgctgccggtagtcccgggaatgaatggatctttttctctaccgatgaaataactacgcgttatagaaatacaatgagtaatggcggcctacagagaagtgttatattgtctgcactcattctcctccgcgcagtgaccggattttctggtgatggacgggccatctggtccaagaaccccaatttcacgcctgtgaatgagagccagctgttcctgtatgataccttccctaaaaatttcttctgggggataggcactggagccctgcaggtcgagggtagttggaaaaaggatgggaaaggtccttcgatctgggaccacttcatccatacgcatctaaagaatgtcagcagcaccaatggctcttccgactcctatatattcctggagaaggatctgtcggccctcgattttattggcgtctccttctaccagttcagcattagctggcctagactgttccctgatgggattgtgaccgtggctaatgccaagggtctccagtattattctaccctactggacgccttggtgctcaggaacatcgagcccattgtcacactgtaccactgggacctacctctagcattgcaggaaaagtacggcgggtggaagaacgatactattatcgatatttttaacgactacgcaacatactgtttccaaatgtttggggacagagtgaagtactggatcaccattcacaacccgtacctcgtggcgtggcacggatacggtacgggaatgcatgcccctggggagaagggaaatcttgctgccgtatacacggtcggtcacaatttaataaaggcccacagcaaagtgtggcacaattataacactcacttcaggccccatcagaagggatggctctcaataacacttggaagtcactggatcgaaccaaaccggagtgagaataccatggacatcttcaagtgccagcaaagtatggttagcgttctcggatggttcgccaatccaatccacggggatggcgattacccagaagggatgagaaagaagctgttcagcgtactgcccatctttagtgaagccgaaaaacacgaaatgagggggactgctgactttttcgctttctccttcggaccaaataacttcaaacctcttaataccatggccaagatggggcagaacgtgtccctgaacctgcgcgaggctcttaactggatcaagctagagtataacaacccgcggatactcatcgcagagaacggctggttcacagacagccgggttaaaactgaggatactacagctatctacatgatgaagaacttcctctcccaggtacttcaggcaattagactggatgaaattcgggtgttcggctatacagcttggagcttgctggacggatttgaatggcaagatgcatatactataaggcgcgggctgttttacgtcgattttaacagtaagcagaaggagagaaagccaaagtccagcgcacactattataagcagataatcagggaaaacgggttctcactgaaggagagtacccccgatgttcagggtcaattcccctgtgattttagctggggcgtgaccgagagtgtcctgaagcctgagtccgtagcctcttcaccccagttttcggatcctcatctgtatgtctggaatgccaccggaaaccgactacttcaccgagtggaaggagtgcgcctcaagactagaccagcccaatgcaccgacttcgtgaatattaagaaacagcttgagatgctggctagaatgaaggtgacccattatcggttcgccctggattgggcgtccgtcctacctacgggtaatctgtcagctgtgaatcgccaggcgttacggtactatagatgcgttgtgtctgaaggcctcaagctggggattagcgcaatggtgaccttatactatcctactcacgcacatctgggacttccggagcccttactgcatgctgacggctggctgaatccatctaccgcagaggcctttcaggcatacgcggggctctgtttccaggagttgggggatctcgtgaaattgtggattactattaacgagccgaatcgccttagtgacatttacaaccggtctggaaatgacacttatggcgcggcccacaacctgctagtcgcccatgccctggcctggaggctttatgacaggcagttccgccctagccaacggggggcagttagcctctctctgcatgctgactgggccgagccagccaatccctacgccgatagccattggagggcagccgagcgatttctccagttcgaaatcgcttggttcgcggagcccctgtttaagacaggggactatccagccgcaatgagggaatatatcgctagtaaacatcgaaggggcttatcttcgtccgctctacctcggctcaccgaagccgaacgtaggctgctaaaaggcacagtggacttctgtgctctgaatcattttacaacaagatttgttatgcatgagcagctggccggaagtcggtacgactcagatagggatattcaattcctccaggatattacacggctgtcatcaccaaccaggctcgccgtcattccttggggggtccgaaagctgctccgctgggtgcggcgaaactacggagacatggacatctacatcaccgcctctggcatcgatgaccaagcgctagaagacgatcgtctccgtaaatattatcttggtaaatatctgcaggaagtgcttaaggcatacctaatagacaaggtgcgcatcaagggatattatgcattcaaactcgcagaggaaaaaagcaagcccagatttggcttcttcacaagcgactttaaggccaagtcaagtatccagttctacaataaggtgatctcaagtcgtggctttccttttgaaaactcctctagtcgctgttctcagacccaggaaaatacagaatgcacagtgtgcctgtttctggtacaaaagaaaccgctcattttcttgggttgctgcttcttttccacattggtcctgttactatccattgccatcttccagagacagaagagaagaaaattttggaaagccaaaaatctgcagcacattcctcttaagaagggcaagcgcgtggtgtcc

SEQ ID NO: 250567 - DNA, 3132 bp, synthetic construct
  misc_feature 1..3132: note = Description of Artificial Sequence: Synthetic coding sequence
  source 1..3132: mol_type = other DNA
atgaagcctggatgcgcagcgggtagcccaggaaatgagtggatctttttcagcaccgatgaaatcaccacccggtaccgcaacactatgtcgaatggcggactgcaacggagcgtcattctgtcggctctcatcctgcttcgcgccgtgaccgggttcagcggtgacggccgcgccatttggtcaaagaacccgaatttcactccagtgaacgagtcccagctgttcctctacgataccttcccgaaaaacttcttttggggcatcggcactggagcgctgcaggtggagggttcatggaaaaaggacggaaagggaccgtccatctgggaccactttatccacacccacctcaaaaacgtctcatcgaccaacggatcgtcagacagctacatcttccttgagaaagacctgtcagcgcttgactttatcggggtcagcttttaccagttttccatctcatggccgcgcctgttcccggatggcatcgtgaccgtggccaatgcaaagggactgcaatactattctactttgctggacgcactcgtgctccgaaacattgaacctatcgtgactctgtaccactgggacctccccctcgctctgcaagagaaatacggaggatggaagaatgacaccattattgacatattcaatgactacgcaacctactgctttcagatgttcggcgacagggtgaaatactggattaccatccataacccgtacctggtcgcttggcacggatacggcactggcatgcacgccccgggagagaaaggaaacctggcggctgtgtacactgtgggacataacttgattaaagcacactccaaggtgtggcacaattacaacacccactttagaccccaccagaaggggtggcttagcatcaccctgggatcacactggattgaaccgaacagaagcgaaaacactatggacatctttaagtgccagcagtcaatggtgtccgtgttgggttggttcgcaaatccgatccacggagacggtgattacccggaagggatgcgaaagaagctcttctcggtgctgcccatcttttcggaggcggaaaagcatgaaatgagaggaaccgctgacttcttcgcattctcgttcggacccaacaacttcaaaccactgaatacgatggccaaaatgggacagaacgtctccctgaacctccgggaagcgctgaactggatcaagctggaatacaacaatccgcgcatccttatagctgaaaatggatggttcacggactcaagagtgaaaactgaggatactactgccatctacatgatgaagaactttctctcacaagtgctccaggcgatccgcctggatgaaatcagggtgtttggatacacggcttggtcgctgctggatggattcgaatggcaggatgcttacaccatcagacgcggtctgttttacgtggactttaactccaagcagaaggagcggaagccgaagtcctccgctcattactacaagcaaatcattcgggaaaatgggttttccctcaaggaatccacccctgatgttcagggacagttcccatgcgacttctcttggggagtcaccgagtccgtgctgaagcctgaatcggtggcgtcctcgccgcaattctcagaccctcacctgtacgtctggaatgctacgggtaatcgcctcctgcatagggtggagggagtcagattgaaaacccggccggcgcagtgcactgatttcgtgaacattaagaagcagcttgagatgctggcacggatgaaggtgacccactatcgcttcgctctggattgggcgtcagtcctcccgaccggtaatctttcggctgtgaatagacaagcactgcgctactaccgctgcgtcgtgtccgaagggctgaaactgggaatctccgcgatggttactttgtactaccctactcatgcccatctgggactgccagaaccgcttctccatgccgacgggtggctcaacccgtcaaccgctgaggcgttccaagcctacgccggattgtgctttcaagaactgggagatctggttaaactgtggatcaccatcaacgaaccgaacaggctgtccgacatctacaatagaagcggcaacgatacttatggggcggcccacaacctgcttgtggcccacgcgcttgcatggcgcttgtatgaccggcaattccggccatcgcagcgcggcgccgtctcgctgtcgctccacgcggactgggcagagccagcgaacccctacgccgatagccactggagggctgcagagcgattcctgcagttcgagatcgcatggttcgccgaaccactgttcaagaccggagactaccccgccgctatgcgcgaatacatcgcctcaaagcatcggaggggcctgagctcatcggctctcccgcgtttgaccgaggccgaaaggagactgcttaaaggcacggtggacttctgcgccttgaaccattttacgacccgcttcgttatgcatgagcaactggcaggaagccgatacgactcagatcgcgatatccagttcctccaagacatcactcggctgagctcgcctactaggctcgcggtgatcccttggggcgtccggaagttgctgaggtgggtgcggcgcaactatggtgatatggacatatacatcaccgccagcggcatagacgatcaggcgctggaggacgacagactgcgcaaatactacctgggtaaatacctccaagaggtcctcaaagcctacctgatcgacaaagtgcggatcaaaggatactacgcattcaagctcgcggaggagaagtccaagccgagatttggtttcttcacctcggacttcaaagccaaatcatcgatccagttctacaataaggtgatctcctcacgcggcttcccgtttgaaaactcgtccagcagatgttcccagacccaggagaataccgaatgcaccgtctgtctcttcctggttcagaagaaacctctcatcttcctgggatgttgcttcttctcgaccctggtgctgctgcttagcatcgcaattttccagcgacagaaaagaaggaagttctggaaggcgaagaacctgcagcacatccctttgaagaaaggcaagcgggttgtctcg

SEQ ID NO: 250568 - DNA, 3132 bp, synthetic construct
  misc_feature 1..3132: note = Description of Artificial Sequence: Synthetic coding sequence
  source 1..3132: mol_type = other DNA
atgaaaccaggttgcgcagcaggatcgcccggcaacgagtggattttcttctcgaccgatgaaattactactagatacagaaataccatgtcgaacggtgggctgcaaaggagcgtgattcttagcgccttgattctcctccgcgcagtcaccggattttcgggggacggaagagctatttggagcaagaaccccaacttcactcctgtcaatgagtcacaactgttcctgtacgatacctttcctaagaactttttctggggtatcggcacgggggcacttcaggtcgagggaagctggaaaaaggatgggaagggaccttcgatttgggatcactttatccacacgcatctcaagaacgtctcctcgacgaacggctcctccgattcgtatatctttcttgaaaaagatctcagcgcccttgatttcatcggagtgtcgttttaccaattctcgatctcatggccgagactgttccctgacggtattgtgaccgtggccaacgcaaagggcctgcagtactactcgacgctgctcgacgccctggtcctgcgcaacattgaaccaatcgtgaccctgtaccattgggatctgcctcttgcacttcaggaaaagtacggaggatggaagaacgacactatcatagacatctttaatgattacgcaacctactgtttccagatgttcggtgatcgggtgaaatactggatcaccatccataacccatacctggtggcttggcatgggtacggaaccggtatgcatgcaccgggcgaaaagggtaatcttgctgccgtttacaccgtgggtcacaacctcattaaagcacactcaaaggtgtggcataactacaacactcactttcgcccacatcagaaagggtggctttccatcactctgggttcccactggatagaaccaaatagaagcgaaaatactatggacatattcaagtgccagcaatcgatggtgtcggtgctgggttggtttgccaaccctattcacggagatggggactacccggagggcatgcgaaagaagttgtttagcgtgcttcctattttctcggaggcagaaaagcacgaaatgaggggaaccgcagacttcttcgcgttttcgtttgggcctaacaatttcaaaccactcaacactatggccaagatgggtcaaaacgtgtcgcttaacctgcgtgaagcgcttaactggattaagttggagtacaataatcctagaattcttattgccgaaaacggctggttcaccgattcgcgtgtgaaaaccgaagataccacggccatttacatgatgaaaaacttcctctcgcaagtgctgcaggccatccgcctggatgaaattagagtgtttggttacaccgcctggagccttctggatggcttcgagtggcaagacgcgtacaccatcagacgcggcctcttctacgtggatttcaattcaaaacaaaaggaaagaaagccaaagtcatcagctcactactacaagcagattatacgagaaaatggtttttctctgaaggaatcgacccctgacgtgcagggccaattcccctgcgacttttcgtggggggtgaccgagtccgtgctgaagccagaatcagtggcatcaagcccacaattttccgatccgcatctgtacgtctggaacgccactggaaataggctcctccatagagtggagggagtcagacttaagaccagacctgcacagtgcactgattttgtcaatatcaaaaagcagctggaaatgttggcacgtatgaaagtgactcattacaggtttgcgcttgattgggcatcggtcctgcctaccggtaatctttccgctgtgaatagacaagcactccggtactaccgctgtgtcgtctcggaaggtcttaaactgggaatctcggcaatggtcactctgtactaccctactcatgcgcatttggggcttccagaacctctccttcatgccgatggatggctgaacccctctacggcggaggcatttcaggcatacgcaggtctttgttttcaagaactgggcgatctggtcaaactttggattaccataaatgagcccaacagactgtcggatatctacaatcgctcgggcaacgatacttatggtgccgcgcacaacctgcttgtcgcccatgccctggcatggaggctgtacgacagacagttcagaccttcgcaacgcggtgccgtctccctgtcattgcatgcagattgggcagaaccagcgaatccttatgcggactcacactggcgcgcagcagagcggttcctccaattcgagatcgcatggttcgcagaacctctgtttaagactggtgattaccctgctgcaatgagggaatacattgcgtcgaagcacagacgggggctctcctcgtccgcgctcccaaggcttactgaagcagaacggcggcttcttaaggggacggtggacttttgtgcgctcaaccatttcaccaccagatttgtgatgcatgagcaactggcaggttcccggtacgactccgatcgagatatacaatttcttcaagatatcacgagacttagcagccctactagactggcagtgataccgtggggcgtccgtaaacttcttcggtgggtccgacggaattacggggatatggacatttacattaccgcaagcggaattgacgatcaggcgctggaagatgatagattgagaaagtactacctcggcaagtatctgcaagaggtcctcaaagcgtacctgatcgataaggtgcgcatcaaggggtattacgcctttaagctcgcagaagaaaagtcaaagcctcggtttggttttttcacttccgatttcaaagcaaaatcttcaatccagttttacaacaaagtgataagctcacggggatttccattcgaaaattcaagctcaaggtgctcgcaaactcaggagaacaccgagtgcactgtctgtctcttcctcgtgcaaaagaagcccctcatttttcttgggtgctgtttcttttccactcttgtgcttctcctcagcatagcaatctttcagcgccagaagcggcgaaagttctggaaggctaagaacctccaacacatcccactgaagaagggaaagagggtggtgtcc

SEQ ID NO: 250569 - DNA, 3132 bp, synthetic construct
  misc_feature 1..3132: note = Description of Artificial Sequence: Synthetic coding sequence
  source 1..3132: mol_type = other DNA
atgaaacctggatgcgcggcgggatccccgggcaatgagtggatcttcttttcgaccgacgagatcaccaccaggtacaggaataccatgtcaaatggaggcttgcaacggagcgtgatcctgtctgctctgattctgctccgggccgtgaccggattcagcggagatggaagagctatctggagcaagaaccctaatttcaccccagtaaatgaatctcagcttttcttgtacgatactttcccaaagaacttcttctggggtatcggaaccggcgcgctccaggtggagggatcgtggaagaaggacggaaagggcccatcgatttgggaccactttatccatacgcacctcaagaacgtctcctccaccaatggatcgtccgattcctacatcttccttgagaaagatctgagcgcgctggatttcatcggggtcagcttctatcagttctcgatctcatggccgcgcttgttccccgatggtatagtgacggtggcgaacgcgaagggactgcagtactactcgactctgcttgatgctctcgtgctgcgcaatatcgagccgatcgtcactctgtaccactgggatctccctctcgccctccaggaaaagtacggagggtggaagaacgacaccatcatcgacattttcaacgactatgcaacctactgcttccagatgttcggagatagagtgaaatactggataaccattcataatccctacctggtggcatggcacggctacggcacgggaatgcacgcaccgggcgaaaagggaaacctcgccgccgtctacaccgttggccacaacctgatcaaggcgcattccaaggtgtggcacaactacaacactcattttaggccacaccaaaagggctggttgtcgattaccctcggatcccactggatcgagccgaaccggtcggagaataccatggatatcttcaagtgtcaacaaagcatggtgagtgtgttgggctggttcgccaatccaatccatggagacggagactaccccgaaggaatgcgtaagaaactgttctcagtgctcccaatcttctccgaggcagagaaacacgaaatgcggggaactgccgacttcttcgcttttagcttcggtccgaacaacttcaagccgctcaacaccatggctaagatgggacaaaatgtgtctctgaacctgagagaggctctcaactggatcaaacttgagtacaataaccccagaatcctgattgcagaaaacggatggtttaccgactccagagtgaaaactgaagatactacggctatctacatgatgaagaacttcctgtcccaggtgctccaggcaatccgcctggacgaaatccgggttttcggatacactgcgtggtcactgctggacggtttcgaatggcaagacgcctacaccatcagacgcggactgttctatgtggatttcaactccaaacaaaaggaacgcaagccgaagtcctccgctcactattacaagcagatcatccgcgaaaacggtttctccctgaaagaatcgactcctgatgtccagggtcagttcccttgtgatttttcctggggagtcactgaatcggtgctgaagccagagtccgtggcctcgtcgccgcagttctccgatccacacctgtacgtgtggaacgccacggggaatcgcctcttgcatagagtcgaaggggtgagactgaaaaccagacctgcccagtgtactgatttcgtgaacattaagaaacaactggagatgctggctcgcatgaaggtgactcactaccggttcgccctcgactgggccagcgtgctcccaactggaaatctgagcgcggtgaaccgccaggcccttcgctactaccgctgcgtggtgtcagagggtctgaagctcggtatctcagctatggtcaccttgtactaccccacgcatgcacacctgggactcccagagccactgctccatgccgatggatggctgaacccgtcgacggcggaggcctttcaggcatacgctggactttgttttcaggagctcggagatctggtcaagttgtggataactatcaatgagccgaacagactctcggacatctacaatcggtcgggcaatgacacttacggcgctgcacacaacctgctggtggcgcacgcactggcctggcgcctctatgatagacagtttcggccctcccaacgaggagccgtcagcctgagcctccacgcggattgggcagaaccggccaacccgtacgccgactcccattggcgggcggccgaacgctttctgcagttcgagattgcgtggttcgctgaaccattgttcaaaaccggtgattacccggcggcaatgcgcgaatacatcgcctctaagcaccgccggggcctcagctcgagcgccctccctcggttgactgaagccgagcggaggctgctcaagggcaccgtggacttctgcgcgctgaaccactttaccaccagatttgttatgcatgaacagctggcaggctcacggtacgacagcgaccgggatatccagttcttgcaggacattacccggctgtcctccccgacccgcctcgcggtcatcccgtggggagtgagaaagttgttgaggtgggtgcggaggaattacggagacatggacatctacatcactgcctcgggaatcgacgaccaggccctggaggatgaccgcctgcgcaaatactacctcggaaagtacctccaagaagtcctgaaggcctacctgatcgacaaggtgcgcataaaaggttattacgcctttaagctggcagaggaaaagtctaaaccacggtttggattcttcacttcggacttcaaagcaaaatcatccatccagttttacaacaaggtcatatcctccagaggattccccttcgaaaactcgtcctcgcgttgtagccaaactcaagaaaataccgagtgcactgtctgcctgttcttggtgcaaaagaagcctctcatcttcctgggatgctgcttcttctcgactctcgtgctgttgctttccatcgccatcttccaaaggcaaaagcggcgcaagttctggaaagcgaagaacttgcagcatattcctctcaagaagggaaaaagagtggtcagc

SEQ ID NO: 250570 - DNA, 3132 bp, synthetic construct
  misc_feature 1..3132: note = Description of Artificial Sequence: Synthetic coding sequence
  source 1..3132: mol_type = other DNA
atgaagccaggttgtgccgcaggctctcctggaaatgaatggatcttcttttctactgatgaaattacaacccgctaccggaatactatgtctaatggcggcctgcagcggtctgttattttgagcgccctcatcttactgagggccgtgaccggcttttcaggagacggaagggccatatggagcaaaaatccaaactttacacctgtgaacgagtcacagctcttcctctacgacactttccctaagaacttcttctggggtattggcaccggtgctctgcaagtcgaaggatcttggaaaaaagatgggaagggaccatcaatctgggaccatttcatccacacacacctgaagaacgtgagctccaccaacgggagcagcgacagctatatcttccttgaaaaagacttatctgctttggatttcatcggcgtgagcttttatcagttttctatctcctggccacggctgtttcccgatggaatagttacagttgccaatgccaagggactgcagtactacagtactctgctcgacgctctggttctgagaaacattgaacccattgttaccctgtatcattgggatctgcccctggccctacaggaaaaatatgggggatggaagaacgacaccataatagatatctttaatgactacgccacatattgcttccagatgttcggcgacagggttaagtactggataaccattcataatccctacctcgtggcttggcatgggtacgggaccggcatgcatgcaccaggcgaaaaaggaaacctcgccgccgtgtacaccgtggggcataacctcataaaggcccactctaaagtttggcacaattacaacactcattttagaccacatcagaaggggtggctgtccattaccctaggatcccactggattgaacccaatcgcagcgagaataccatggatatatttaagtgccagcaatcaatggtgagcgtgctgggatggttcgccaatccaattcacggggacggcgattacccagaaggcatgcgaaagaagctcttcagcgttttaccaattttctctgaagcagagaaacatgagatgagaggcaccgctgactttttcgcattctccttcggacctaacaatttcaaacctctgaacacaatggccaagatgggccagaatgtgtccctgaacctgcgggaggccttgaattggatcaaactggagtacaataacccacgcatcctgatcgctgagaacgggtggttcacagactctagggtgaaaaccgaagacaccacagcaatctacatgatgaaaaatttcctgtcccaagtgctgcaggccattagattagatgaaattcgggtttttgggtacaccgcttggtcactcctggacggcttcgaatggcaggacgcctataccatccgcagaggcctcttttacgtggatttcaacagcaaacagaaagaacgcaagcctaaaagtagtgctcactactacaagcagatcattcgggagaacgggttcagtctgaaggaaagcactcctgacgtgcagggccagttcccttgtgattttagctggggcgtcaccgaatccgtattgaagcccgaaagtgtcgcctcctctccccagtttagcgatccacacctgtatgtctggaatgctactggaaataggctgctgcatcgggtggagggggtcaggttaaaaacacgccctgcccaatgtactgatttcgtgaatattaaaaagcagttagagatgctagcacggatgaaggttacccactacaggtttgccctggattgggcatcagtactgccaacaggcaacctcagcgctgtgaaccgacaggcactgcgttattacaggtgtgtagtgtctgaaggacttaagctggggatcagcgccatggtcaccctctactacccaacacacgcccatctagggttacctgaaccacttctgcatgccgatggctggctgaatccatccacagccgaagctttccaggcttacgccggcctgtgcttccaagagttaggtgatctcgttaaactttggataaccataaatgaaccaaatagactgtccgacatttacaatcggtccggcaatgatacttacggcgcagcacataatctcctcgtggcacatgccctcgcatggcgcctgtacgatagacagttccgtccaagtcagaggggcgcagtttctctgtcactccatgccgattgggctgagccagctaacccttatgctgacagtcactggcgcgcagcagagagatttctgcagttcgagatcgcttggttcgccgagcctttatttaaaacaggcgactacccagctgcaatgcgcgaatacatagctagtaaacatcgtagaggcctgtcaagcagcgctctgccccggctcacagaggccgagaggagactgctcaagggcaccgtggacttttgtgccttaaatcatttcaccaccagatttgttatgcacgagcagctcgcaggctctagatatgattctgacagagacatccagttcctacaggatattaccaggctgagcagcccaacaagattagctgttataccatggggagttaggaaactgctacgatgggttaggaggaattacggcgacatggatatatacatcacagctagcgggatcgatgatcaggctctggaagatgacaggttaaggaaatactacctaggcaaatacctgcaggaagttctgaaagcctatctgattgataaagtgaggattaaagggtattacgcttttaagctagcagaggaaaagtccaagcctaggtttggtttctttacttccgatttcaaggctaagagttcaatacagttctacaataaggtcatttcttcacgcggctttcctttcgagaattcatcctctcgttgtagtcaaacacaggaaaacacagagtgcacagtgtgtctctttttagttcagaagaagcctctgatcttcctaggatgctgtttcttttccaccctggtgcttctgctatctattgccatatttcagcgccagaaacggcgtaaattttggaaggctaagaatctgcagcacattccactgaaaaagggtaagcgcgtagtatcc

SEQ ID NO: 250571 - DNA, 3132 bp, synthetic construct
  misc_feature 1..3132: note = Description of Artificial Sequence: Synthetic coding sequence
  source 1..3132: mol_type = other DNA
atgaaacctggttgcgccgcaggatcaccaggcaacgaatggattttctttagtacggacgagattactacccgctatagaaacactatgtctaatggcgggctccaaaggagcgtgatcctttccgcgctgattctcctgagagctgtgaccggatttagcggcgatggacgcgccatatggtccaagaacccaaacttcacgcctgtcaatgaatcgcagctctttctctacgacacctttcccaagaactttttctggggaataggtactggtgctctgcaagtggagggatcgtggaagaaggatggaaagggtccgagcatctgggatcacttcattcatactcatctgaagaacgtgtcctcaactaatggatcctctgatagctacattttccttgaaaaggacctgtcagctctggatttcattggtgtgtccttctatcaattctccatttcatggccccggctgtttcccgatggaattgtgactgttgcaaacgccaaagggctccagtactattcgaccctgctcgacgcccttgtgctgcggaatatcgaaccgatagtgaccctgtaccattgggaccttcctcttgcactccaagagaagtacggcggctggaaaaatgataccatcatagatatctttaatgattatgcaacttactgttttcaaatgtttggggacagagtcaagtattggataaccatccataatccgtaccttgtggcctggcacggttacggtacggggatgcacgcgcctggagaaaagggaaacctggcagccgtgtacaccgtgggccataacctgataaaagcccattccaaggtctggcataactacaacacccacttcagacctcatcagaaggggtggctgagcatcactttgggatcacattggattgaacctaatagaagcgagaacaccatggatatcttcaaatgccagcaatccatggtcagcgttctgggatggttcgcaaatcctatacatggagacggtgactacccggaaggcatgcgtaagaagctcttcagcgtgctgccgatcttctccgaggcagagaagcatgaaatgcggggcacggcagacttctttgcattttcgttcggacccaacaactttaagccacttaatactatggcaaagatggggcagaacgtgagcctgaacctgagagaagcgctcaactggatcaaactggaatacaataatccacgaattttgatcgctgagaacggatggtttaccgattcgcgcgtaaagacggaggatacgactgccatttacatgatgaagaattttctgtcgcaagtgctgcaagcaatacggctggacgaaattagagtctttggatatactgcgtggtcccttctcgatggattcgaatggcaagacgcctacaccattcgaagagggcttttctacgtggatttcaattcgaagcagaaagaaagaaaaccaaagtcgtccgcgcactactacaagcaaatcataagagaaaacggctttagcctcaaggaatccacccccgatgtccagggccaattcccctgcgattttagctggggtgtcaccgagagcgtgctgaaacctgagagcgtggcatcctcgccccaattctcggacccgcacctttacgtctggaatgcaactggaaatcggctgctgcatagagtggagggagtgagactcaaaactagacctgcacaatgtacggactttgtcaacatcaagaaacaactggagatgcttgctagaatgaaggttacccactaccgcttcgcactggattgggcatcggtgctcccaactggtaacctctcagcagtcaatcgccaagccctccgatactacagatgtgtggtttccgagggacttaaactgggaatcagtgcaatggttactctttactaccctacccacgcacatctgggcctgccagaacctttgctgcatgctgacggctggctgaacccttcgactgcagaagccttccaggcatacgcagggttgtgttttcaggagctgggtgaccttgtgaaattgtggattactatcaacgagccaaatcgactgagcgacatctataacaggtctggcaatgacacgtacggagctgcccacaacctgctcgtcgcacacgctctggcatggcggctctacgatagacaatttagacccagtcagcgtggggccgtgtcgctctcactccacgcagattgggccgaaccagccaacccttacgcagattcgcattggagagcagccgaacgcttcctgcaatttgaaattgcatggttcgcagaacctttgtttaagactggtgactacccagcagcaatgagagaatacatcgcgagcaaacacagaagaggattgagctccagcgcgcttccacgacttactgaagcagagcgcagacttttgaaggggactgtggacttctgtgctcttaaccacttcactactaggtttgtgatgcatgaacagctggcaggcagcaggtacgacagcgatagagacatccaatttctgcaggatattactcggctgtctagccccacccgccttgcagtgattccttggggagtccgaaaactgctgcgatgggtgcggaggaactacggtgacatggacatttacatcactgcatcaggtatcgatgatcaagcactcgaagatgatcgactcagaaagtactacctcggcaagtaccttcaggaagtgctgaaggcatacctgatcgataaagtgcgcataaagggttactacgcatttaagctggcggaagagaagtcgaagccacggtttggtttctttacctcagactttaaggccaaatcatccatccagttttacaacaaggtaatttcctcccgtggattcccattcgaaaacagcagctcgcgatgttcccagacccaggaaaataccgaatgcaccgtgtgtttgtttcttgtgcagaagaaaccactgatttttctcggttgctgtttcttttccaccctggtcctccttttgtcgatcgcgatttttcaaaggcaaaaaagaagaaagttctggaaagccaagaacctgcaacatatcccacttaagaaggggaagcgggtggtgtcc

SEQ ID NO: 250572 - DNA, 3132 bp, synthetic construct
  misc_feature 1..3132: note = Description of Artificial Sequence: Synthetic coding sequence
  source 1..3132: mol_type = other DNA
atgaaaccaggatgcgcggctggcagtccaggcaatgagtggatctttttctccacagatgaaattaccactcgctaccggaataccatgtcaaatggggggctgcaacgcagcgtgatcctgagtgcactgattctgctgcgtgccgtgaccgggttttctggcgacgggagggcaatctggagtaagaatccaaactttactccagtcaatgaaagccagctcttcctgtacgacacctttccgaaaaacttcttctgggggataggtaccggtgccctgcaggtggaaggcagttggaagaaagatggaaagggaccttctatctgggatcactttatacacacgcacctgaagaacgttagttcgaccaatgggagctccgattcctacatcttcctcgaaaaggacttgtctgctctggactttatcggggtatcattttatcaattctcaatcagttggccaaggctctttcccgacggtatcgtgactgtcgccaatgctaaggggctgcagtattatagcactctactcgatgcactggtgctccgaaatatcgagccaattgtgaccctgtaccactgggatcttccactcgcccttcaggagaaatacggcggctggaaaaacgataccattatcgatatcttcaacgactacgctacttattgttttcagatgttcggagatagggtgaagtactggatcaccattcacaatccgtacctggtggcctggcatggttatggcaccggaatgcatgcacctggcgaaaagggaaatctggctgctgtttacactgtcggtcacaaccttatcaaagcgcacagtaaagtttggcataactataacacacacttcaggccacatcagaaaggatggctttccatcactctcgggtctcattggatcgagcccaatcgatccgagaatacaatggacatttttaagtgccagcagtcaatggtgagtgtgctcggttggttcgctaaccctatccatggtgatggcgactaccccgaaggtatgagaaagaaattgttttccgttcttccaattttcagcgaggctgaaaaacacgaaatgagaggcaccgccgatttttttgccttctctttcgggcccaataactttaagccactgaataccatggcgaaaatggggcagaatgtttccctcaatctcagggaggctctgaattggattaagctggaatataacaaccctcgtatcctcattgccgagaacggatggtttaccgacagccgagtaaagactgaggacacaaccgctatttacatgatgaaaaactttctttctcaagtgcttcaggctatcagattagacgaaatccgagtgtttggctatactgcttggtccttgctggatgggttcgagtggcaggacgcttacacaattaggcggggcctgttttatgttgactttaactcgaagcaaaaagagcggaagcccaagtcatcagcacattactataagcagattatccgtgaaaacggcttttcactcaaggagagtacaccagacgtccaggggcaatttccctgcgatttctcttggggtgtgaccgagtcagtcctcaaaccggagtctgtggcgagcagtccccagttttctgacccccatctgtatgtgtggaatgctacggggaaccgactgctccacagagttgagggagtccgactgaagacgaggcctgcccagtgcaccgacttcgtgaatataaaaaaacagcttgagatgctagccaggatgaaggttactcactatagatttgcactggactgggctagcgttctaccaaccggaaatctttcggccgtgaaccggcaagccttacgttactaccgttgcgtggtgagtgaggggttaaagcttggcatcagtgcaatggtgactctgtattaccctacacatgctcatctcggtttgcccgagccactgttacacgcggacggatggctgaatccgtccaccgcagaggccttccaagcctacgccggcttgtgcttccaagaattgggcgacttagtgaaactgtggattaccataaacgagcccaacaggctaagcgacatttacaaccgttcgggtaacgacacctatggcgcggctcacaaccttctcgttgcacatgcactcgcttggcggctgtatgatcggcagtttcgacccagtcagcgaggggccgtctcattgtcactgcacgctgactgggcagaaccagccaacccatatgctgattcacactggagagcagctgaacgatttctgcagtttgagatagcttggtttgccgagcccctgttcaagacaggtgactaccctgcagccatgagagagtacattgcgagtaaacatagacgaggcctgtcaagcagtgctctcccacgactgacagaggccgagcgaaggctcctgaaagggacagtcgacttctgtgccctgaaccattttactacccggttcgtgatgcatgagcagctagctggttccaggtacgactctgatagagacatccagtttctgcaggatatcacccgactatcttctccaactcgattggcagtgataccctggggcgtgcgaaaactgctgagatgggtcaggcgaaactatggcgatatggacatctatatcactgcaagcggaatcgatgaccaggctctggaggatgatagactccgtaaatactacctcggaaagtatttgcaggaagtgttgaaggcctatctcatcgacaaagttcgaatcaagggatattatgcgttcaagctggcagaagagaaatccaagccacgattcggattctttacctcagactttaaggcaaaaagtagcatccagttttacaacaaggtgataagctcacgtggattccccttcgaaaactccagctctcgatgtagtcagacccaggagaataccgaatgtaccgtatgtctcttcctggttcagaagaaaccactgatcttcctgggctgctgtttcttcagcactcttgttctgctgctgtccattgcaatatttcaacgtcagaaaaggagaaagttttggaaagcgaagaatctccagcacatccctctcaaaaaaggcaagcgagtggtcagc

SEQ ID NO: 250573 - DNA, 3132 bp, synthetic construct
  misc_feature 1..3132: note = Description of Artificial Sequence: Synthetic coding sequence
  source 1..3132: mol_type = other DNA
atgaaacccggctgtgcagccggaagcccaggtaatgaatggatcttcttcagcactgacgagattacgacccggtacagaaataccatgtccaatggagggctccagcgttcagtgatcctgagcgcgctgatcctcctccgcgccgtcaccggatttagcggggacggcagggccatttggtcgaaaaacccgaatttcaccccggtgaacgagtcgcagctgtttctttacgatacctttccgaagaacttcttctgggggatcggaaccggagcgctgcaggtggagggatcgtggaagaaggacggcaagggaccgtcaatctgggaccatttcatccatacgcatcttaagaatgtgtcgtcaaccaatggctcgtcggattcctatatcttcctcgaaaaagatctgtcggccctggacttcatcggagtgtcattttaccagttctcaatcagctggccgcgcctgtttcctgacggaatcgtcaccgtcgccaacgccaagggactgcagtactactctacccttctggacgccttggtcctccgcaacatcgaacctattgtgacgctctatcactgggatttgcctctggcactgcaagagaagtacgggggatggaagaacgacactatcatcgacatcttcaatgactacgcaacctactgcttccagatgtttggggaccgcgtgaagtattggattactatccataacccctacctggttgcttggcacggatacggaaccggaatgcatgccccaggcgaaaagggaaatctggcagcagtgtacaccgtaggtcacaatctcatcaaggcacacagcaaggtctggcataactataacactcacttccgccctcaccagaaagggtggctcagcatcaccctggggagccactggatcgaaccgaacagatccgaaaacactatggatatcttcaagtgccaacaatccatggtgtccgtgctgggctggttcgccaatcctatccacggagacggcgactacccagagggaatgcgcaagaagctcttcagtgtcttgccgatcttctccgaggcggagaagcacgagatgcgggggacggctgacttcttcgctttttcgttcggtcctaacaatttcaaaccgctgaacactatggcaaaaatggggcagaacgtttctctgaaccttagggaagccctcaactggatcaagctggagtacaacaacccgcgcatcctgattgcggaaaacggatggtttaccgatagccgcgtcaagaccgaggacacgactgctatttacatgatgaagaacttcctgtcgcaggtcctgcaggctatccgcctggatgagatcagggtctttggatacactgcctggtcgctgctcgacgggttcgaatggcaggatgcctatactatccgcagaggactcttctacgtggactttaactctaaacagaaggagcgcaaaccgaagtcgagtgcccactactacaagcaaatcatccgtgaaaacggattctcactcaaggagtcaacgccggatgtccaagggcaattcccgtgcgatttttcctggggagtcaccgagtccgtattgaagccggagtcggtggcctcttctcctcaattcagtgaccctcatctttatgtttggaacgccactggcaaccgcctgctgcatagagtggaaggggtgcggcttaaaaccagacctgcacaatgcaccgacttcgtgaacatcaaaaagcagctcgaaatgctggccagaatgaaggtgactcactaccgctttgcgctggattgggcttccgttctgccaacgggtaatctgagcgccgtcaatcggcaggccctccgctactaccggtgtgtcgtctccgaaggacttaagctgggaattagcgcgatggtgaccctttactaccccacccatgcgcacctcggcctgccggaaccgctcctccatgctgatggatggctgaacccgtccaccgcagaagcgttccaggcctacgctggactttgcttccaggaactgggggatctggtcaagctgtggatcacgatcaatgagcccaacaggctgtcggatatctacaatcggtccggcaacgacacctatggcgctgctcataatctgctcgtggcccacgctctcgcttggcggctttacgatcgccaattcagaccgagccaacggggcgctgtgtcgctctcacttcacgcagattgggcggaaccggcaaacccctacgcagattcgcattggcgcgcggcagaaagatttctgcagttcgagatcgcctggttcgccgaaccactgttcaagactggggactaccctgccgcgatgcgcgagtacatcgcctcaaaacatcgccggggactctcgtcatccgccctgccgcgcttgactgaagccgagaggcggctgctgaagggaactgtcgatttctgtgcattgaatcacttcaccactcggttcgtcatgcatgaacagctcgccggatcaagatacgacagcgaccgggatattcagttcttgcaagatatcactagactgtcgtcgccgactcggctggctgtgatcccttggggggtgcggaaactgctgcgctgggtgaggcggaactacggcgatatggacatctacatcaccgcctccggcatcgacgaccaggcacttgaggacgacaggctgagaaagtactacctgggaaagtacctccaggaagtcctgaaagcctacctgatcgacaaggtgcgcatcaagggatactacgctttcaaactcgcggaagagaaaagcaagccaaggttcggattcttcaccagcgactttaaggccaagtcatcgatccagttttacaataaggtgatctcatcgagaggctttccattcgagaattcgtcgtccagatgctcacagacccaggagaacaccgaatgcactgtgtgtctgtttctggtccaaaagaagccgctcatcttcttgggatgctgcttcttctcgactctggtgctcctcctgtcgatcgcaatcttccagagacaaaagcgccggaagttttggaaggcaaagaatctgcagcatatcccgcttaagaaaggaaagcgggtggtgtct

SEQ ID NO: 250574 - DNA, 3132 bp, synthetic construct
  misc_feature 1..3132: note = Description of Artificial Sequence: Synthetic coding sequence
  source 1..3132: mol_type = other DNA
atgaaaccaggttgtgcagctggatcaccaggaaatgagtggattttttttagtacagatgaaattacaacacgttatcgaaatactatgtctaatgggggacttcaaagatcagttattttatcagctttaattttattacgagcagttactggattttcaggagatggaagagctatatggtctaaaaacccaaattttactccagttaatgaaagtcaattattcttatatgacacttttccaaagaattttttctggggaattggaacaggagctcttcaagtcgaaggttcatggaaaaaggacggaaaaggaccatccatttgggatcatttcattcatactcatttaaaaaatgttagttcaacaaatggttcttctgattcatatatttttcttgaaaaagacttatcagctttagacttcattggagtttcattttatcaattctcaatttcttggccacgtcttttccctgatggaattgtaactgttgcaaatgctaaaggattacaatattattctacattattagatgctcttgtacttagaaatattgaacctatagttaccctttatcattgggatcttccattagcattacaagaaaaatatggaggatggaaaaatgacacaattattgatatttttaatgattatgcaacttattgttttcaaatgtttggagatagagtaaaatattggattacaatacacaatccatatcttgttgcttggcatggttatggtactggaatgcatgctccaggagaaaaaggaaatcttgctgctgtttatacagttggacataatttaattaaagcacatagtaaagtttggcataattataatactcattttagaccacatcaaaaaggatggctttctattactcttggatctcactggattgaacctaatagaagtgaaaatactatggatatctttaagtgtcaacaatctatggtctctgtgcttggatggtttgctaatccaattcatggagatggagattatccagaaggaatgagaaaaaaattattttcagtattaccaattttcagtgaagctgaaaaacatgaaatgagaggtacagcagatttttttgcattttcatttggaccaaataattttaaaccattaaatactatggctaagatgggacaaaatgttagtcttaatttaagagaagctttgaattggattaaattagagtataataacccacgaattttaattgctgaaaatggttggttcacggactctagagtcaaaacagaagatactactgctatttatatgatgaaaaattttctttctcaagttttacaagcaataagacttgatgaaataagggtttttggatacacagcttggtctcttcttgatggatttgaatggcaagacgcttatactattagacgtggattattctatgtagattttaattctaaacaaaaagaaagaaaaccaaaaagttctgctcattattataaacaaattattcgtgaaaatgggtttagcctaaaagagtcaactccagatgttcaaggacaatttccttgtgatttttcatggggagttactgagtcagtgttgaaaccagaatcagttgcaagtagtccacaattctcggatccacatctatatgtatggaatgcaactggaaatcgtttacttcacagagtagaaggagtaagattgaaaacaagaccagcacaatgtacagattttgttaatataaaaaagcaattggaaatgcttgcaagaatgaaagttacacattatcgattcgctttagactgggcatcagttttaccaacaggaaacttatcagccgttaatagacaagccttaagatattatagatgtgttgttagtgaaggattaaaattggggattagtgcaatggttactttatattatccaacacatgctcatttaggattaccagaacctttgttacatgcagatggatggttaaatccttctacagcagaagctttccaagcttatgcaggattatgttttcaagaattaggtgatttagttaaattatggataacaattaatgaaccaaatagattaagtgatatttacaatcgttctggaaatgatacttatggagcagctcataaccttctagttgcacatgctttagcttggagattatatgatcgtcaatttagaccttcacaaagaggggctgtatcattatcacttcatgcagattgggcagaacctgctaacccttatgcagattcacattggagagctgctgaaagatttttgcaattcgaaattgcttggtttgccgaaccattatttaaaactggagattaccctgctgctatgagagaatatattgcaagtaaacatagaagagggttaagtagttcagctttaccaagacttactgaagcagagagaagacttcttaaaggaacagtagatttctgtgctttaaatcatttcacaacaagatttgttatgcacgaacaattagcaggatctagatatgattcagatcgtgatattcaattccttcaagatattacaagactttcatcaccaacacgtttagctgttattccatggggagttagaaagcttttacgatgggttagacgtaattatggtgacatggacatttatataacagcatccggtattgatgaccaagctcttgaagatgatcgacttagaaaatattatcttggaaagtatttacaagaagtccttaaagcttatttaattgataaagttagaattaaaggttactatgcatttaaattagcagaagaaaaatcaaaaccacgttttggtttttttaccagtgatttcaaagctaaaagttctattcaattttataataaagttatttcttcaagaggatttccatttgagaattcatcatcaagatgtagtcaaactcaagaaaatactgaatgtacagtttgtttattccttgttcaaaaaaaacctcttattttcttgggttgttgttttttttctacccttgtcttattacttagtattgctatttttcaaagacaaaaaagaagaaaattttggaaagcaaagaatcttcaacatattcctttaaaaaaaggtaaaagagttgtttca

SEQ ID NO: 250575 - DNA, 3132 bp, synthetic construct
  misc_feature 1..3132: note = Description of Artificial Sequence: Synthetic coding sequence
  source 1..3132: mol_type = other DNA
atgaaacctggctgcgccgctggtagtccaggaaatgagtggatcttcttttcgaccgatgaaatcacaacacgttaccggaacaccatgtccaacggcggcctgcagcgatccgtgatattgagcgcactaatactgttgcgggcagtcaccggcttttccggagatggtagagctatttggtccaaaaaccctaacttcacacctgtgaatgaaagtcagctgtttctgtatgacacgttccctaagaatttcttttgggggatcgggaccggagctcttcaagtggaggggtcctggaagaaggacggtaaggggccatccatctgggatcattttattcacacgcacctgaagaacgtatcctcaacaaacggcagctctgactcgtatatattcctggagaaggacctgagcgcccttgatttcataggtgtgtcattttatcagttttctatatcgtggccgaggctttttcccgatggtatcgtgactgtcgccaatgccaagggcctgcagtactacagcacactgctggacgccctagttctgcggaacatcgagcctatagtgactttgtatcactgggacctgccgttggctctacaggagaagtacggcggctggaaaaatgacacaatcatcgacatttttaacgactatgcaacttattgcttccagatgtttggcgatagggttaaatattggattactatccataatccttatctggtagcctggcacgggtacgggaccggtatgcacgcccccggagagaaaggcaaccttgccgctgtgtatactgttgggcataatctgattaaagcacatagcaaggtgtggcataattacaatacacatttccggcctcaccagaaaggctggctctcaattaccctaggctcccattggattgagcccaatcggagcgagaataccatggacatctttaagtgtcagcagtctatggtctctgtgctgggatggttcgcaaacccaatacatggcgatggagattaccctgaggggatgcgcaaaaaactcttttccgtgctgcccatattcagtgaggcggagaaacacgaaatgcggggtactgccgacttctttgctttctcctttgggcctaacaacttcaagccactgaacactatggctaagatggggcaaaacgtgagtctaaatctgcgagaggcgttgaactggatcaagcttgagtacaataatcccaggattctgattgccgagaacggttggtttactgacagccgcgttaagaccgaggataccactgccatctacatgatgaagaacttcttgtcacaggtgctccaagcaatccgcctcgacgagatccgggtattcgggtacactgcctggagtctgctcgatggatttgagtggcaggatgcttacaccattaggagaggactgttctacgtagactttaattccaagcagaaggaaagaaaacccaagagcagcgcccactactacaaacagattattcgtgaaaacggtttctctctcaaagaaagcacaccagatgtacaagggcagttcccatgtgatttttcttggggcgtgactgaaagcgtgctgaaacctgaatcagtggcctccagtccccagttttcagacccacacttgtatgtgtggaacgcgactggcaaccggttgctccatcgggtcgagggcgtgagacttaaaacgaggcccgcacaatgcaccgattttgtgaacatcaagaagcaactcgagatgttggcccggatgaaagtgactcactaccgcttcgcactagactgggcttctgttctgccgaccggaaacctctccgcagttaatcggcaggccttgagatactaccggtgcgtagtaagtgaaggactcaagctgggcatcagcgccatggtgaccctctactaccctacacatgctcatctggggctgccagagcccctactgcacgcagatggctggctgaacccctctaccgccgaggcattccaagcctacgccggcctctgttttcaggaattaggggatctggtgaaactgtggatcacaatcaacgaacccaaccggctaagcgatatttacaatcgctcaggtaacgatacttacggcgccgcgcataacctgctggtggctcatgccttggcctggagactctacgataggcagtttcgacctagccagcggggggccgttagcctttcccttcatgcggactgggccgagcctgcaaacccctacgctgatagccattggcgggccgcagagaggtttctccagtttgaaattgcttggtttgccgagcccctgttcaagaccggggattacccggcagccatgcgggagtacatagcgtccaagcatcggcgtgggctgtccagctccgccctgccgagacttacggaagccgagaggcgcctgctgaaaggcaccgttgacttctgcgccctcaaccactttaccacacgttttgttatgcacgagcagctcgctggtagtagatacgacagcgacagagatattcagtttcttcaggatataactcgactctcatctccaaccaggctggccgtgattccctggggcgttaggaagctgctccggtgggtgcgccgtaactatggcgacatggatatatatattaccgccagcgggatcgatgaccaggcactcgaagacgacaggctacgcaaatattacctgggaaagtatctacaggaagtcctgaaagcgtacctgattgacaaagtgcgcattaagggttactacgcatttaagttagcagaggagaagtcgaaaccaaggtttggtttcttcactagcgattttaaggccaaatcttctatccagttctacaacaaggttatcagcagccggggcttcccgtttgagaatagcagtagccgctgttctcagacccaggaaaacacagagtgcaccgtctgcctgtttctcgtccagaagaagcctctgatattcctgggctgttgcttcttcagcaccctcgtgctcctgctcagcatcgcgattttccagcgtcagaagcgtagaaaattctggaaagcaaaaaacctgcagcacatccccctaaagaaaggcaagagggtcgtttcc

SEQ ID NO: 250576 - DNA, 3132 bp, synthetic construct
  misc_feature 1..3132: note = Description of Artificial Sequence: Synthetic coding sequence
  source 1..3132: mol_type = other DNA
atgaagcccggatgtgcagccggttcacctggaaacgagtggatctttttctccaccgatgagatcactacccggtaccgtaatactatgtcaaacggaggactccaaaggtcggtgatactttcggccctgatactgctccgtgcggtgaccggattcagcggggatggacgtgcaatctggtcgaagaatcccaacttcactcctgtcaacgaatctcaactcttcctgtacgacacctttcccaagaactttttctggggaattggaaccggggcccttcaagtcgaaggaagctggaagaaggacgggaagggaccttcaatatgggatcactttatacatacccacctgaagaatgttagctctacgaatggctcgtccgactcgtacatattccttgaaaaggatctttcggcactcgactttatcggtgtgagcttctaccagttttccatctcctggccaagactgtttcccgacggtattgtgaccgtggcaaacgcaaagggactgcagtactactcgaccctgcttgacgccctggtgctgagaaacatcgagccaatcgtgaccctgtaccattgggaccttcctctcgcgctgcaagaaaagtacggagggtggaagaatgatacgattattgacattttcaacgattacgcaacttactgctttcagatgttcggggaccgcgtcaagtattggattaccattcataacccgtaccttgtggcttggcatggatacggaaccggaatgcatgcccctggagagaaagggaatctcgccgcagtctacaccgttggccataacctgattaaggcccactcgaaggtctggcataactacaacactcatttcagacctcatcagaagggatggctgtcgattactcttggatcccactggattgagccaaacaggagcgagaacactatggacatctttaagtgtcaacaatcgatggtgtcggtcctcggatggtttgctaaccctatccatggtgatggtgattaccctgagggtatgagaaaaaagctgttcagcgtcctccctatattctccgaagccgaaaagcatgaaatgagaggcacggcagatttctttgcattttcctttggtcccaataactttaagcctctgaacactatggcaaagatgggacaaaacgtgtcactgaaccttagagaggcgctgaattggatcaaactggaatacaataatccgcggatcctgattgccgaaaacggatggtttacggactcgagggtgaaaacggaggacaccaccgctatttacatgatgaagaactttctctctcaagtccttcaggcgattcgcctggatgaaattagagtgtttggctatactgcatggtcgttgctggatggtttcgaatggcaagatgcatacaccattcgccgtggtctgttttacgtggatttcaattcgaagcaaaaggaaaggaagcctaaatcctccgcacactactacaaacagattatcagggagaatggtttttccctgaaagaatcaaccccagacgtccaaggtcagttcccgtgtgatttctcgtggggggtcaccgagtcagttctgaaaccagagtccgtggccagcagccctcaattttccgatcctcacctttacgtatggaacgctaccggaaatcggttgctgcatcgggtcgagggcgtccgcctcaagactaggccggcccaatgcactgattttgtcaacatcaaaaaacagcttgagatgctggcaagaatgaaggtgacccactatcgctttgcactggactgggcatcggtgctgcctactggaaatctttcagctgtgaaccggcaagccctgcggtattacaggtgtgtcgtgagcgaaggactgaaacttggaattagcgcaatggtcactctctactacccaactcatgcacacctcggccttcctgagccgctccttcatgcagacggatggctgaacccatcaaccgcagaagcatttcaggcatatgccggcctttgttttcaggaactcggtgatctggtgaaactttggattactattaacgaaccaaatagattgtcggatatctataatcggtccggcaacgatacctacggggccgcgcataacctccttgttgcacacgcccttgcatggagactttatgatagacagtttaggccttcgcagcgaggcgccgtctcactttccctccatgcagattgggcagagcctgcaaacccttacgcagacagccactggcgggcggcggaacggttcctccagtttgagattgcctggttcgcagaaccgctctttaagaccggggactatccagcagcaatgcgcgagtacattgcatcaaaacatcggaggggtctgtcctcctcggcacttcctaggctcaccgaagcagaacggcgactgcttaagggaaccgtcgatttttgcgcacttaatcattttaccaccaggtttgtgatgcatgaacaactggccggatctaggtacgattcagacagagacattcagtttctgcaggacattacccgtctgtcgagccctaccaggctcgccgtcattccttggggagtgcgaaaacttctccgttgggtgcgtaggaattatggtgatatggacatttacatcaccgcgtcaggaattgacgatcaagcacttgaagatgacagactgcgaaaatactacctcggaaaatacctgcaggaagtgctcaaggcatacctcatcgataaagtgagaatcaaaggatactacgctttcaaacttgcggaggagaaatcaaaaccacgttttggattcttcacctcagactttaaagcaaagtcgtcaattcagttttacaataaggtgatttcgtcccggggctttccatttgaaaattcctcatcccgctgttcgcaaacgcaagaaaacacggagtgcactgtgtgcctttttctggtgcaaaagaaacccctgattttccttggatgttgcttcttctccactctggtgcttctgctgtccatcgctatctttcagcggcagaaacggaggaagttttggaaggccaaaaaccttcaacacatccctttgaaaaaggggaagcgcgtggtgtcc

SEQ ID NO: 250577 - DNA, 3132 bp, synthetic construct
  misc_feature 1..3132: note = Description of Artificial Sequence: Synthetic coding sequence
  source 1..3132: mol_type = other DNA
atgaagccaggctgtgctgccgggtcgcctggcaatgagtggatattcttcagcacggatgaaattacaacccgttatcggaataccatgagcaacggtgggctccagcgaagtgtaatcctgtccgcgttgatactcctgcgggcggtgacgggcttcagcggtgacgggagggccatctggtccaaaaatccaaatttcactccggtgaatgaatctcagctctttttgtatgacactttcccaaaaaacttcttctggggcatcggtaccggcgcccttcaggtagagggttcctggaagaaggatgggaagggccccagcatttgggaccattttatccacacccatctgaagaacgtatcctcaaccaatggcagctccgactcttacatcttcctggaaaaggacctaagtgccctggatttcattggtgtcagcttctaccagttctctatctcatggccccgtctgtttccggacggcattgtaacggttgcaaacgctaaaggcttgcagtattatagtaccctcctcgacgcgttggtgctgcgcaatattgagccgatcgtgacgttatatcattgggatctcccactcgctctgcaagagaaatacggggggtggaagaatgacaccatcatcgacattttcaatgactacgcgacttattgtttccagatgttcggagatcgcgttaagtattggatcacaattcacaacccatatttagtggcttggcacggctatgggaccggtatgcacgccccaggagagaaaggtaaccttgccgcggtctataccgtaggccacaacctgatcaaggcccatagcaaggtttggcataattataacacacatttccgaccacaccaaaagggttggcttagcattacattgggaagccattggattgagcctaatagatccgaaaacacgatggatatcttcaagtgccaacaatccatggtcagcgttcttgggtggttcgccaaccccatccatggtgacggtgactaccccgagggcatgcgcaagaagttgttttctgtattgcctatcttctccgaggcagaaaaacatgaaatgcgggggacagcagacttctttgccttctctttcggcccaaataatttcaaaccactgaacaccatggctaagatgggacaaaacgtgtccctgaatctccgggaggcactaaactggatcaagttggagtacaataacccccgcattttgatcgccgaaaatgggtggtttaccgacagtcgcgtcaaaactgaagacacaacggccatctacatgatgaaaaattttctctctcaagttctacaagccattcgactggatgagattagagtgttcggatacaccgcctggtccttgcttgatggatttgaatggcaggacgcatataccatccgccgagggctcttttacgttgatttcaacagcaagcagaaagaacgcaaaccgaagtcgtctgctcattactataagcagatcatccgcgaaaatggcttctccttaaaagagagtactcccgacgtccagggccaattcccatgcgattttagttggggagtaaccgagtcagttctgaagcctgagtcggttgcatcttccccacaattttccgatccccatctgtacgtgtggaatgccaccgggaaccggctcctgcatcgagtcgagggagttcgccttaagactagaccagcacagtgcaccgactttgtgaatatcaaaaagcaactggagatgctcgcgaggatgaaggtcactcactatagatttgccttagactgggcttcggtcctccctaccggaaacctttccgctgttaaccgccaggctttaaggtattataggtgcgtcgtctctgaggggctcaaactgggaattagcgcgatggtcactctttattatcccacccatgcccacctaggactccctgagcccctgctgcacgctgacggatggctaaatccgagcacggccgaagcattccaggcctacgctggcctgtgttttcaagaactgggagatctcgtcaagctctggattacaatcaacgaacctaatcgtttgagcgacatttacaatagatctggtaacgatacttacggtgcagctcataacctgttggtggctcacgcgctcgcctggagactctacgaccgccagtttcggccatcacagcggggggccgtgtctctgtctcttcacgcagactgggctgagccagcaaatccttacgcggattctcactggagggcagctgagcgcttcctgcagtttgagattgcatggtttgccgaacccctttttaaaactggagattatccagccgcaatgagggagtacattgcctcaaaacaccgcaggggactgtcctcttcagctttgcctcggttaaccgaagcagaaaggaggttactgaaagggactgttgatttctgcgcattgaatcactttactactcgttttgtgatgcacgaacagcttgccgggtcgagatacgatagcgatagggatatacaatttctgcaggacataactagattatcttccccaacaaggctcgccgtgatcccgtggggggtgagaaaactgctccgctgggtccgaagaaactacggcgatatggacatctacatcacagcgtcaggaattgacgaccaagccttagaagatgacagacttcgtaagtattatctgggaaagtacttgcaagaggtactgaaagcctatctgattgataaggtgcggatcaaaggctactatgcgtttaagctcgccgaagaaaagagtaaacctcggttcgggttttttacctccgacttcaaggcaaaatcaagtatccagttctataataaagtgattagttctaggggcttcccttttgaaaatagctcctcgcgctgcagtcagacccaagagaacactgagtgcacagtgtgtctttttcttgtgcaaaaaaaacccctaattttccttggctgctgtttctttagcacattggtattactcttatccatcgctatctttcagagacagaagagacgaaagttctggaaagctaagaatcttcagcacatcccactgaaaaaggggaagcgcgtggtcagc

SEQ ID NO: 250578 - DNA, 3132 bp, synthetic construct
  misc_feature 1..3132: note = Description of Artificial Sequence: Synthetic coding sequence
  source 1..3132: mol_type = other DNA
atgaaacccggatgtgcagctggatctcctgggaatgaatggatttttttttcaacggatgagatcacaacaagatatcggaacacgatgtctaatggaggactgcagagatctgtgatactcagtgccctcattcttctaagggccgttactgggttttctggggacgggagggctatctggagtaagaaccccaacttcacacccgttaacgaatctcagttattcttgtatgatacttttccaaaaaacttcttctgggggatagggacaggagcattacaggtggaaggaagttggaaaaaggatgggaaagggccttctatatgggatcacttcatacacactcacctcaaaaatgtgtccagtacaaatgggtcctccgattcatatatttttctggaaaaggatctgagtgcactcgatttcatcggagtctcattttatcagttttctatatcgtggccccggctttttcccgacgggatagtcactgtcgccaatgccaaagggttacagtactactctacactccttgatgcccttgtgcttagaaatatcgaaccaatcgtcacactataccattgggatctccccctcgcactacaggaaaaatacgggggatggaaaaatgatacaataatcgatatattcaacgattatgctacgtattgcttccagatgttcggagaccgagtcaaatattggatcacaatccataatccatacttagttgcctggcatgggtacggaacaggaatgcatgcacccggagaaaaagggaatctcgccgcagtgtacacagtggggcacaatctcataaaagcacactctaaagtgtggcacaattataatacacattttcgccctcatcagaagggatggttatctatcacactcggatctcattggatagaacctaaccgctcagaaaacacaatggacatttttaaatgccagcaatccatggtgtctgtgctggggtggtttgcaaaccctatccatggagatggggactatcctgaaggaatgaggaaaaaacttttttccgtgttacctatcttctctgaagcagaaaaacacgaaatgcggggaacagcagatttctttgcgtttagttttggacctaataattttaagcctctcaacacaatggccaaaatgggacagaatgtatccctgaacctgagggaagctcttaactggattaaactcgaatacaacaatccacgaattttaattgcagaaaacgggtggtttactgactctcgggtaaaaacagaagatactactgctatctacatgatgaaaaattttctatcccaggtcctgcaggcaataaggcttgatgagatccgggtttttggatatactgcttggagtttactcgatgggtttgaatggcaggatgcttatacaatccggcgtggactcttctatgtggatttcaactccaagcagaaagaaagaaagccaaaatcatctgcacactactataaacagatcattcgggaaaacggattttcactcaaagaatccacacctgatgtgcagggacaattcccttgtgatttttcctggggggtcactgaatcagtgttaaaaccagaaagtgtagcttcttccccccagttcagtgatcctcacctctacgtgtggaatgcaactggaaacagactcttgcatcgagtggaaggggtcagactgaagactagaccagcgcagtgcactgattttgtgaacattaaaaaacagttagaaatgctcgcaagaatgaaagtgacacactataggtttgccttggattgggcttccgtgctccctacaggaaacctctcggcagtgaataggcaggctctccggtactataggtgtgtagtttctgaaggacttaagctcgggatctccgcaatggtgactctgtattatcccacacacgcccatcttggactccccgaacctttgctgcacgccgatggatggctaaaccctagtacagcagaagccttccaggcttacgctggactgtgcttccaggaactaggagatctggtgaaactgtggatcacaataaatgaacctaatagactctctgacatctacaatcgcagtggaaatgatacttatggggctgcacacaacctcctggtggctcatgcacttgcttggcgtctctacgatcgccagttcagaccaagtcagagaggagcagtatcgctgtctctccacgccgattgggccgaacccgccaacccctatgccgatagtcattggcgggctgccgagcgcttcttacagttcgaaatcgcttggttcgcggaaccccttttcaaaactggagactaccctgctgccatgcgagaatatatcgcctctaaacatcgaagaggactctccagttctgctctccccagactgactgaagccgagagacggctgcttaaagggactgtagatttctgtgccctgaaccacttcacaacacgtttcgttatgcacgaacagcttgccggatcaagatatgattccgatcgggatatacagtttctacaagatatcactagactttcttcccccactcgactggccgttattccatggggagtcaggaaactcctgagatgggttaggaggaactatggggacatggacatatacattactgccagtgggattgacgatcaggctctagaggacgataggttaagaaaatattacttagggaaatatctccaggaagtgctgaaagcctacttaatagataaagtgcgcattaaagggtattacgcatttaaattagctgaagagaaatctaagcctagattcgggtttttcacatctgactttaaagcaaaaagtagtatccagttttataataaagtgatctcttctagagggtttcccttcgaaaactcttcctctcggtgtagtcagacgcaggaaaacacagaatgtacagtgtgcctctttttggtccagaaaaaacccctgatatttctcgggtgttgtttcttttcaacattagtactccttctgagtattgctattttccagagacagaaacgaagaaaattctggaaagccaaaaatctgcaacacatccctctaaaaaaaggaaaacgggtggtatcc

SEQ ID NO: 250579 - DNA, 3132 bp, synthetic construct
  misc_feature 1..3132: note = Description of Artificial Sequence: Synthetic coding sequence
  source 1..3132: mol_type = other DNA
atgaaaccaggatgtgcggccggatcccctggcaatgagtggatttttttttctaccgacgaaatcacaacgaggtacaggaacactatgtctaatggcgggctgcaacggtccgtcatcctgtcagcactgatcctgctgcgggccgttacaggcttttcaggggacggccgcgcaatttggagtaagaatccgaacttcactcccgtgaatgaatcacaattgtttctgtatgacaccttccccaaaaacttcttctggggaatcggtacaggcgccctgcaggttgaagggtcttggaagaaggacgggaagggcccatccatctgggatcacttcatccacactcacttgaaaaatgtgtccagtactaacgggagttcagactcatatatctttctggaaaaggatttgagtgcgttggactttattggcgtgtctttttatcagtttagtattagttggcctagactgtttccggacggcatcgtgacggtggccaacgctaagggtctccagtattatagcacactgcttgacgcactcgtactcagaaatatcgagccaatcgtaactctgtaccactgggacctgcccctggccctgcaggagaagtatggtggttggaaaaatgataccattatagatatcttcaatgactatgctacctattgtttccagatgtttggtgaccgcgtgaagtactggataacaatccataacccatacctggtggcatggcacggctacggcacaggaatgcatgctccaggagaaaagggcaatctggctgcagtttatactgttggtcacaacctgattaaagcacatagtaaagtgtggcacaactataatactcactttcgcccccatcagaaggggtggttgagtatcaccctgggtagccactggatcgaaccaaatcggtctgagaacacgatggatattttcaaatgccagcagagcatggtgagcgtgcttggctggttcgctaaccctatccacggggacggggactacccggagggcatgcgaaagaagctctttagcgttttgcctattttcagcgaggccgaaaaacatgaaatgagaggtacggctgatttctttgcattttcattcggtcccaacaactttaaacccctgaatacaatggccaaaatggggcaaaatgtcagcctgaacctgcgcgaggccttgaattggataaagttggaatataataaccctagaatcctgattgcggaaaatggatggtttacagattcccgcgtcaagacggaggataccactgccatctatatgatgaagaacttcctgtcacaggtactccaggctataaggctcgacgaaatcagagtgttcggatacaccgcatggagccttctcgacggtttcgagtggcaggacgcatacaccattaggcggggcctgttttatgttgattttaacagcaagcaaaaagaacggaaaccgaaatcctctgctcattactataagcagataattagagagaacggctttagcctcaaagaaagtacgcccgacgtccagggccaattcccctgcgacttctcttggggcgttaccgaaagcgtactcaagcctgaaagcgtcgccagcagccctcagttttccgatccccatctgtacgtctggaacgctacgggaaaccgactccttcatcgagtggagggagtacggttgaagactagacccgcacaatgcacggacttcgtgaacataaagaaacagctggagatgttggctagaatgaaggtgacccattatcggtttgccctcgattgggccagtgtgctcccgaccggaaacctctctgcagtgaatcggcaggcacttcggtactaccgatgtgtggtgtccgagggtctgaaactgggcatctcagctatggtgaccctctactaccccacccatgcgcaccttggtctgcctgaacccctcctgcatgcagacgggtggctcaatcctagcactgccgaggctttccaggcttacgctggactctgtttccaggagctcggagaccttgtgaagctgtggataactattaatgaaccaaacagattgtctgatatctataatcgctccggaaacgatacttacggcgcggcccataatctgctggtggcacacgcgctcgcatggcgcctctacgatcgacaatttcggccttcccaaaggggggctgtctctctttcactgcacgccgactgggccgaaccagcaaacccatacgcagactcacactggagagccgccgagagattcttgcagttcgagatagcttggtttgcggaacctctgtttaagacgggggattacccagctgcaatgcgcgaatatatcgcctcaaagcacagaaggggactgtcctccagtgctctgcctagactgaccgaagcggaacgacgactgcttaaagggactgtcgatttctgcgcactgaaccattttacaaccaggttcgttatgcacgaacagttggcagggagtaggtacgattcagatagggatatacagttcctgcaggacatcactcggctgtcatccccaacaaggcttgccgttatcccatggggcgttaggaaattgctgcggtgggtccgaaggaactatggagacatggacatctacatcaccgcatctgggattgatgaccaggccctggaggatgatagacttagaaagtactatctggggaagtacctgcaggaggtcctgaaggcctatctgattgataaagtccggattaaagggtactacgcatttaagttggccgaggagaaaagtaagccccggtttggattttttacatctgattttaaagctaagagctccatccagttttacaataaggtgattagctcccggggctttccattcgaaaacagcagctccagatgctcacagacccaggagaatactgagtgcaccgtgtgtctgttcttggtgcagaaaaagcctctgatatttctcggctgttgtttcttcagtactctggtacttttgctgtctatcgccatttttcagcgccagaagcgccggaagttttggaaagccaaaaatcttcagcacattccactgaaaaagggtaagcgggtggtgtcc

SEQ ID NO: 250580 - DNA, 3132 bp, synthetic construct
  misc_feature 1..3132: note = Description of Artificial Sequence: Synthetic coding sequence
  source 1..3132: mol_type = other DNA
atgaaacccggctgtgctgctggctctcctgggaacgagtggattttcttttccactgacgaaattacaacacggtataggaatacaatgtcgaatggtggactgcaaaggtccgttattctgtccgccctgatactgcttagggctgttacaggattttcgggggacggacgcgctatctggtcgaaaaatccaaactttacgccagttaatgagtcccagttatttctatacgacacattccctaagaactttttctggggtataggcactggggctctgcaggtggaaggatcttggaagaaagatggtaaggggccctcaatttgggaccacttcatccacacacaccttaagaatgtgtcgtccacaaatggctcctcggactcttacatatttctagagaaggacctttcggcccttgatttcattggcgtgtcattctatcagttcagtatctcatggccacggctctttcctgacgggatcgtgacagtggccaatgccaaagggctgcagtactattcaaccctcctggatgctctggtccttagaaacattgaacctatcgtcacactgtaccactgggatctgccattggccctacaggaaaagtatggcggctggaaaaacgatactattattgacatctttaatgactatgccacatattgctttcaaatgtttggtgatagagtgaagtactggataaccattcacaatccatatttggtggcctggcacggatatgggaccggaatgcacgctcctggggaaaaaggaaatctcgctgccgtatacactgtcggtcacaacctcattaaggcgcactctaaggtttggcacaactacaatactcatttccgcccgcatcagaaaggctggcttagcatcacactcggtagccactggattgagcccaatagaagtgagaacactatggacatctttaagtgtcagcagtctatggtttcagttctgggatggttcgcgaaccctatccacggcgatggcgactaccccgaaggtatgaggaagaaactgttttctgttttgccaatctttagtgaagcagagaaacatgagatgagggggacagccgacttcttcgccttcagctttggacccaataacttcaagccactgaacactatggccaagatgggtcagaatgtgagcttaaatctgcgggaagcccttaattggattaaactcgagtataacaatccccggatccttatagcagagaacgggtggttcactgatagtagggttaaaactgaagacacaacagctatctatatgatgaaaaattttctgagccaagtgttgcaggccattcggctcgacgaaattcgggtgtttggctataccgcatggtcgcttctggatggatttgaatggcaggacgcatacacaattagacgtggactgttctatgtggatttcaactcaaagcagaaggagcgcaagcctaaaagtagcgctcactattataagcaaatcatccgcgagaacggattctcattgaaagagagtacacctgacgtgcagggccagtttccatgcgacttttcctggggcgtgacagaatcggttctcaagcccgagtctgttgcctcatctccccagttctctgaccctcacctgtacgtatggaatgccactggcaatcgcctcttgcaccgtgtggagggagttaggctgaagactcgccccgctcagtgtacggacttcgtgaatatcaaaaaacagctcgagatgctggctcggatgaaggtgacgcactaccggtttgccttggactgggccagcgtcctgcccaccggaaatctgagcgcagtgaaccgtcaggctctgcgatattatcggtgtgtggtgagtgagggattgaaacttggcatctccgcgatggtgacactgtactaccctacacacgctcatctgggcttgcctgagccgctcctccatgccgacggatggctcaatccatctactgccgaggcatttcaggcctacgccggactgtgctttcaggagctgggagaccttgttaaactgtggattaccatcaatgaaccgaatcggctctctgatatctataacaggtctgggaatgacacctacggcgctgcgcacaatcttctagtggcgcatgctctggcttggcgtctgtatgaccgtcagttccgtcctagccagcggggcgctgtgtccctgtctctgcacgctgattgggcggagcccgctaacccctacgcagatagccactggagagccgccgaaaggttcctgcagtttgaaattgcgtggtttgccgagcctctcttcaaaacaggagactatcctgcagcaatgagggagtacattgccagcaaacacagaagagggctcagcagctcagcgctgcctcgactcacagaggccgagcggcggttgctgaagggtacagtcgatttttgtgcgctgaatcattttaccactaggttcgtgatgcacgagcagctggctgggagtcgctatgactccgacagggacatacagtttcttcaggacatcacccgattatctagtcccacccgtctggccgtgataccatggggcgttcgcaaactcctaagatgggtgcgacgaaattacggggatatggatatctacatcacggcttctggcattgatgaccaagccctggaggacgaccggctgaggaaatattatttgggcaagtacttgcaggaggtcctcaaagcatatcttattgataaagtcaggataaaggggtattatgcattcaagctggccgaggaaaaatctaaacctcggttcgggttcttcacaagtgatttcaaggcgaaatcctccatacagttttacaataaggttatctcttcccgcgggttcccctttgaaaacagttcttcccgctgttcacaaacacaggaaaatacggagtgtacagtctgtctgttcctggttcaaaagaagcctctaatatttctcggttgttgctttttctctacgctggtgttactccttagcatcgccatttttcagaggcaaaaaagaagaaagttctggaaggctaagaatcttcagcacatccccctgaaaaagggcaagcgcgtcgtctcc

SEQ ID NO: 250581 - DNA, 3132 bp, synthetic construct
  misc_feature 1..3132: note = Description of Artificial Sequence: Synthetic coding sequence
  source 1..3132: mol_type = other DNA
atgaagcctgggtgcgccgctggttcacccggaaatgaatggatattcttcagcaccgatgaaatcaccactcgttatcggaatactatgtccaacgggggactccagcggagtgtgattctgtcggcactgatccttttgcgcgccgtcactggttttagcggagacggacgggccatctggtccaagaaccccaatttcaccccagtgaacgagtcacagctttttctgtacgatacttttccgaagaacttcttttggggaatcggaacgggagcactgcaggttgaagggtcctggaagaaagatggaaagggcccgagcatctgggatcactttatccacacccatctgaaaaacgtgtcatccaccaacggatcgtcagactcgtatatcttcctggagaaggacctctccgccttggacttcattggagtctcgttctaccagttcagcatcagttggccccggctgttcccggatgggatcgtcaccgtagctaatgccaagggcctgcaatactattcgaccttgctggatgcgcttgtgctgcggaacattgagccgatagtcaccctctaccactgggatctgccactggcccttcaggaaaagtacggaggatggaaaaacgataccatcatcgacatcttcaacgactatgctacgtactgcttccagatgttcggcgaccgggtgaaatactggataacgatccacaatccctacctggtggcatggcatggatacggcactggaatgcacgctccgggagagaaaggaaacctggccgctgtgtatactgtgggacacaatctgatcaaggctcactctaaagtctggcacaattacaatacccacttcaggccgcaccagaaggggtggttgtcgattaccctgggtagccactggatcgaacctaaccggagcgaaaataccatggacatctttaagtgtcagcagtcgatggtcagtgtcctgggatggttcgcaaatccgattcatggagatggcgactacccagaaggaatgaggaaaaagctgttcagcgtcctgccaatcttttcggaagccgaaaagcacgaaatgaggggaactgccgatttcttcgccttttcctttggacccaacaatttcaaacctcttaacactatggcgaaaatgggacaaaacgtgtccctgaatttgcgcgaagcgctgaactggatcaaactcgagtacaacaacccgcggattctcattgcggaaaacgggtggtttactgacagccgcgtaaagaccgaagatactacggctatctacatgatgaagaactttctgtcacaagttctgcaagccatcagactggacgaaatccgagtgttcggatacaccgcatggagcctgctcgacgggttcgaatggcaagacgcgtacactattaggcgcgggttgttctacgttgacttcaactccaagcagaaggagaggaagccaaaatcctcggcacattactacaaacagattatcagggaaaatggtttctcgttgaaagagtcgaccccggacgtgcaaggccagtttccctgcgacttctcctggggagtgaccgagtcggtgttgaagcctgagtcagtggcgagctccccgcaattctcagatccacatctgtacgtctggaatgcgactggtaacagactgctccatcgcgtggagggggtccgtctcaagactaggccggctcagtgtactgacttcgtgaacattaagaagcagctcgaaatgctggcgcgcatgaaagtgacccactaccgctttgccctcgattgggcatccgtgctgcctactggcaatcttagcgcggtgaaccggcaagcacttcgatactacagatgtgtcgtttccgagggcctgaagctgggaatctctgcgatggtcactctctactacccaacccatgcacatctgggcctcccggagcctctcctccacgccgatggttggctgaacccgtccaccgccgaggccttccaagcatacgcgggcctgtgcttccaggaactcggtgaccttgtgaagttgtggattacgatcaatgaaccgaaccggctgtcggatatctacaatcgctccggcaacgacacctacggggcggcccacaatctgctggtggcacacgctctggcctggcgtctctacgacagacaattccgcccttcacagcggggcgccgtgtcgctttcattgcatgccgattgggctgagcccgccaacccttacgccgacagtcattggcgggcggcagagcgcttcttgcagttcgaaatcgcctggtttgcggaacctctcttcaagactggtgattacccggctgccatgcgcgaatacatcgcctcaaagcatcggcgcggactgtcgtcgtcagctctgccacggctgaccgaagcagagagacgtttgctcaaaggcaccgtcgacttctgcgcactcaaccactttactactcggttcgtgatgcacgagcaattggccggaagccggtacgacagtgacagagacatacagtttctgcaggacatcaccagactctcctcgccaacccgcctggccgtgataccgtggggggtgcgcaagctgctgcggtgggtgagaagaaactacggcgatatggatatctacatcaccgccagcggaatcgatgatcaggcgctcgaggacgaccggctgagaaagtactacctgggcaagtaccttcaagaagtgttgaaggcgtacctgatcgacaaggtcagaatcaagggatattacgcctttaaactcgccgaggagaagtctaaaccaagatttggcttcttcacgtccgactttaaggcaaaatcgtcgatccaattctacaataaggtgatctcaagcagagggttcccgttcgaaaatagcagcagccgctgctcgcagacccaggaaaacactgagtgcactgtctgccttttcctcgtccagaagaagccactgattttcctcggatgttgcttcttctcgacgttggtcctcctgctgtcgatcgcgatcttccagcggcaaaaacgacgcaagttctggaaggcgaaaaacctccagcatatcccgttgaagaagggtaagagggtggtgtcg

SEQ ID NO: 250582 - DNA, 3132 bp, synthetic construct
  misc_feature 1..3132: note = Description of Artificial Sequence: Synthetic coding sequence
  source 1..3132: mol_type = other DNA
atgaagccaggctgcgccgcagggagtcccggtaatgagtggatatttttctccactgacgaaatcacaacgcgttacagaaacactatgagcaatggcggtctccaacggtctgtcatcttgagtgccctgattctgctgagagcggtcaccggattttccggagacggaagagccatttggagtaagaaccctaattttacaccagttaatgaatcccaactcttcctgtatgatacatttcctaaaaatttcttctggggaataggcacgggagctctgcaggttgaaggctcgtggaaaaaggacggaaagggcccctcaatctgggatcacttcatccacacacatctgaagaatgtgtcatcaaccaacggatcttccgattcctatatatttctggagaaggacttgtccgctctcgattttattggtgtgtcattttaccagtttagtataagttggcccaggctgtttccggatgggatcgttaccgttgccaatgccaagggcctgcagtattactctaccttgcttgatgcattagttttgagaaacatcgagcctatcgtgactctttaccattgggacctaccccttgctttgcaggagaaatatgggggatggaagaatgatacaatcatcgacatcttcaatgactatgccacctattgttttcagatgtttggcgacagggtgaaatattggattaccatccacaatccctatctggtggcctggcatgggtacggcaccggtatgcatgcgcctggggaaaagggtaacctggccgcagtgtacacagtgggacacaacctgatcaaggcccactctaaggtgtggcacaactataacacccactttcgaccccaccagaaggggtggctttccataactttgggatcgcattggatcgagccaaatagatcggagaatacaatggacatatttaaatgtcaacagagcatggtgagcgtgctgggctggtttgcgaatcccattcatggggacggtgactaccccgaaggaatgcgcaagaaactgtttagcgtcttacccattttcagtgaggcagagaaacacgagatgcgcgggacagccgacttcttcgctttttctttcgggccgaacaatttcaagccgctgaacacaatggccaagatgggtcagaacgtttctctgaacctcagagaggctctcaactggattaaactggagtacaacaacccgcgcatcctgatcgccgagaacggatggtttacagactcaagagtaaaaaccgaggatacgacggcaatctacatgatgaagaactttttatctcaagtgttgcaggcaatacgtttggatgagatacgggttttcggctatactgcctggtccctgctggacggattcgagtggcaagatgcgtatacaatacgccggggccttttttatgtggattttaactctaaacaaaaggagaggaaacccaagtcctccgcccactattacaagcagattatcagggagaatgggtttagtcttaaagagagcacgcctgatgtacagggtcagtttccctgcgacttttcctggggcgtaaccgagtctgttctcaaaccggaaagtgtggcttcgagtccccaattctccgacccccacctttatgtgtggaatgccacagggaacagactcctccacagggtggaaggtgtacggctgaagacgcggcctgctcagtgtacagatttcgtgaacattaaaaaacagctcgagatgctggcccggatgaaagtcacccactacaggtttgccctggattgggctagcgtactaccgacagggaacctctccgccgtcaacagacaggcactccggtactatcgctgcgtagttagtgaaggccttaagttaggaatctctgcgatggtcactctctactatcctacccacgcgcatctgggtctgccggagcccttgttgcatgcagacgggtggcttaatcctagcacagctgaggcattccaagcatacgcgggtctgtgtttccaggaactgggcgatctagtgaaactgtggataactatcaacgagccaaatcggctcagtgacatctacaaccgatcgggcaatgatacctatggagccgcccacaacctgctcgttgcccatgccctggcctggcggctgtacgaccgtcagtttcgcccaagtcaacgcggagccgtatccttgagcttgcatgctgactgggcagaacctgctaacccctacgcagactcgcactggcgagctgcagaacgattccttcagttcgagatagcatggttcgctgagccactgttcaaaaccggtgattatccggcggcaatgcgggagtatattgctagtaaacaccgacgtgggttaagtagttccgcgctaccccggcttaccgaagctgaaaggaggcttctgaagggtaccgtcgatttctgcgccctaaatcacttcacgactagattcgtgatgcatgaacagctcgccggatctaggtacgatagcgacagggatatccagtttttacaggatatcactaggctgagctcacccacacgactcgccgttataccctggggcgtgcgcaaactattgcgatgggtgcgcagaaactacggcgatatggacatctatattaccgcgagtggcattgatgaccaggcactggaagatgacaggctgcgtaagtactatcttggaaaatacctccaggaggtattaaaagcttaccttattgataaagtgcgcataaaggggtattatgcgttcaagctggctgaggagaaatctaaaccacgattcggttttttcactagtgattttaaagcaaagtcgtctatccagttctataacaaggtgatttcttcacggggttttccctttgagaatagttctagccggtgttcgcaaacacaggagaataccgaatgcactgtttgcctttttttagtccaaaagaaaccgctcatttttctcggctgctgcttttttagcaccctggtgctgcttctgtcgatcgccatcttccagcggcaaaaaaggagaaagttctggaaagctaagaaccttcagcatattccgctgaagaagggtaaaagggtggttagc

SEQ ID NO: 250583 - DNA, 3132 bp, synthetic construct
  misc_feature 1..3132: note = Description of Artificial Sequence: Synthetic coding sequence
  source 1..3132: mol_type = other DNA
atgaagcccgggtgtgcagcagggtcccctggaaatgaatggatctttttcagtactgacgagattaccacccggtaccggaacaccatgtcgaatggaggcttgcaaaggtcggtgatcctttcggcactgattctccttagagcagtgaccggttttagtggagacggacgagccatctggtcaaagaatcccaatttcacccctgtgaacgaaagccaactttttctttacgatacgtttccgaagaacttcttttggggcatcggtaccggagcactgcaggtcgaaggaagctggaagaaggatggaaaggggccatcgatttgggatcatttcattcatacgcacctgaaaaatgtgtcctctaccaacggatccagcgactcctacatttttcttgaaaaggatcttagcgcactggatttcatcggagtctcattttaccagtttagcatttcctggccccgtctctttccagatgggatcgtgaccgtggctaacgccaagggactccagtactactcaacccttctcgatgcacttgtgctccgcaacattgagcctatcgttactttgtaccactgggacctccctttggctctccaagagaagtacggaggctggaagaacgataccataattgacatcttcaacgactacgcaacctactgctttcaaatgtttggggatagagtcaaatactggatcactatacacaatccttacctggtggcatggcatggttacgggaccggtatgcatgcacccggtgagaaaggaaacttggcagcggtgtacactgtgggacataacctgattaaggcacattcaaaagtgtggcacaactacaatactcacttcagacctcatcaaaaaggttggctcagcattacccttggctcccactggatcgagccaaatcgcagcgagaacaccatggacatctttaagtgccaacaatccatggtgagcgttcttgggtggtttgccaaccccattcatggggacggagattatcctgaaggtatgcggaagaaattgtttagcgtgctcccgatctttagcgaggcagaaaagcatgaaatgagaggaactgctgatttctttgcattctcctttggtccaaacaactttaaacctctgaataccatggctaagatgggtcagaatgtgtcgctgaacctgcgcgaagcactcaactggattaaactggagtataacaatccacgtatccttattgcagaaaatgggtggtttactgactcgcgggtgaaaacggaggacaccactgcaatatacatgatgaagaattttctctcccaggttcttcaagctatccgtctcgatgagatcagagtgttcggatacactgcgtggtcccttttggatgggttcgaatggcaggatgcatatacgattaggaggggactgttctatgtggatttcaattccaagcaaaaggagaggaagcctaagtcctcagcacactattacaagcaaatcatcagggaaaacgggttcagcctgaaggaatcaacccccgatgtgcaggggcagttcccctgtgatttttcctggggggtgactgagtccgtccttaagcctgaaagcgtagcctcgtcccctcagttttcggatccacatttgtacgtctggaacgcaaccgggaacaggctgcttcacagagtggagggtgtccggctgaaaacccggcctgcacagtgtactgacttcgtcaacataaagaagcaactggagatgctggcccgaatgaaggtcactcactaccggtttgctctggattgggcgtccgtgctgcctaccggcaacctttccgcagttaaccgccaagctctgcgatactaccgctgcgtggtttccgaagggctgaagctcggtatttcggccatggtgactctgtactacccgactcatgcgcatctcggactgccggaacctctgctgcatgcagatggatggctcaacccatctaccgccgaggcattccaggcatacgctggcctctgctttcaggagcttggggatctggtcaagctgtggattactattaacgaaccaaatagactctcggacatatacaaccgaagcgggaacgacacttacggtgcagcgcacaatcttctggtggcccatgcacttgcctggcggctgtacgatcgccaattcagaccatcccaacgcggagcagtctccctttcactgcatgccgattgggcggaacctgcaaatccttatgcggactcacactggcgtgcagcggagcgctttcttcaatttgagatcgcctggttcgcagagccactgttcaagaccggagactaccctgctgctatgagagagtacattgcctccaaacatcgtcgcggtttgtcatctagtgcattgcctagacttacggaggccgaacggaggcttctgaagggaactgtggatttttgtgcgcttaaccactttaccacccgttttgtcatgcacgaacagcttgccggctcccggtacgattctgaccgcgacatccaattcctgcaggatattactagactgtcctcacccactagactggcagtgatcccatggggcgtgaggaaacttctgcggtgggtgcgccgcaattacggggacatggacatatacattactgcatccggaatcgacgatcaggcgttggaagatgatagacttaggaagtactatcttggtaagtatcttcaggaagtcctcaaggcttaccttattgataaggtgcggattaagggatactacgcctttaaacttgcagaagagaagtccaagcctagattcggattcttcacgtcagatttcaaagcaaaatccagcatacaattctacaacaaggtgattagctcacgtggctttccttttgagaactcctcttcgcgatgttctcagacgcaagaaaacactgaatgtactgtctgtctctttctggtccagaagaagcctctgatttttctgggctgttgtttcttctcgactctcgtgttgcttctttccattgcaattttccaacggcagaagcgcagaaagttttggaaggcaaagaacttgcagcatatcccgttgaagaaaggtaaaagagtcgtgagc

SEQ ID NO: 250584 - DNA, 3132 bp, synthetic construct
  misc_feature 1..3132: note = Description of Artificial Sequence: Synthetic coding sequence
  source 1..3132: mol_type = other DNA
atgaagcccggatgtgctgccggaagcccgggaaacgaatggatcttcttttccaccgatgagatcacgacgcggtaccggaatactatgtcaaacggcggactgcagcgcagcgtgatcctttcagccctgatcctgctccgggcagtaactggtttctcgggtgacggaagagccatctggtccaaaaacccgaacttcactccagtcaacgaatcacaactgttcctctacgatacctttcccaaaaacttcttctgggggatcggaacgggcgcgctgcaggtcgaaggctcctggaagaaggatgggaagggaccatcaatctgggaccatttcatccacactcatctgaagaacgtgtcctctaccaacgggtcctcggacagctacattttcctggaaaaagatctgtcagcactggatttcatcggcgtctccttctaccagttctccatctcctggccacggctgttccctgacggaatcgtgactgtggccaatgccaagggccttcaatactactccaccctcctggacgccctcgtgctgcggaacatcgaacccatcgtaaccctgtaccactgggacctcccgctggcccttcaggaaaagtatggaggatggaaaaatgatactatcatcgatatcttcaacgattacgccacctattgctttcaaatgtttggtgaccgcgtcaaatactggatcaccatccacaacccttacctggttgcatggcacggatacgggactggcatgcacgctcctggtgagaagggtaatctggccgctgtgtacaccgtcggacataatctgatcaaggcacactcaaaggtctggcataactacaacacccatttcaggccacaccagaaaggctggctcagcatcacgctgggatcacactggattgaaccgaaccggtccgagaataccatggatatcttcaagtgccagcagagcatggtcagcgtgctgggatggttcgctaatccgatccacggcgatggagactacccggagggcatgcggaagaaactgttctccgtcctccctatcttttccgaagcagagaagcatgaaatgcgcgggactgccgatttcttcgccttctcgtttggaccgaacaactttaagcctctgaacactatggcgaagatgggtcaaaatgtctcactgaatctcagagaggcgctgaattggatcaagctcgaatacaataacccgcggatcctcatcgctgaaaatggatggtttactgattcccgggtgaaaaccgaggacactaccgccatctacatgatgaaaaacttcttgtcccaagtgctgcaggccatccgcctggatgaaatccgcgtgttcggttacacggcttggtcactgctcgatggatttgagtggcaggacgcctacaccattcggagaggattgttttacgtcgatttcaattccaaacaaaaggaaaggaagccaaagtcctcagcgcattactacaagcagattatccgagagaatggcttttccctcaaggagagcaccccggatgtgcagggccagtttccgtgcgacttttcgtggggggtcactgaatccgtgctgaaacccgaatccgtggcgagctctcctcaattctccgacccgcacctgtacgtctggaacgctacggggaatcggttgctccaccgggtggaaggagtgcgcctgaaaactcgccctgcccagtgcacggacttcgtgaacatcaaaaagcaactcgaaatgctggctagaatgaaggtgactcactaccggttcgccctcgactgggcctcagtgctgccgactgggaatctctccgctgtgaaccgccaggcgcttcggtactaccggtgcgtcgtgtcagaaggactcaagctgggaatctcagcgatggtgactctctactaccccactcatgcccatctcggcctgccggaacctctgctgcatgcggatggatggctgaacccttcgaccgccgaggcgttccaagcgtacgcgggtctgtgcttccaggagctgggcgacctcgtcaaactgtggattactatcaacgagcccaaccggttgagcgatatctacaatcgcagcggcaacgacacctacggggccgctcataacctgctggtggcgcacgccctcgcctggcgcctgtacgaccgccaattcagaccatcccagcgcggagcggtgtcactgtccctgcacgcagactgggccgaacccgccaatccgtacgccgactcgcattggcgggcggctgaacggtttctgcagttcgaaatcgcctggttcgctgaaccacttttcaaaaccggtgactacccggcggcaatgcgcgaatacatcgcctcgaagcaccggcgcggcctgagctccagcgccctgccgcgactcactgaagcggagcggcgcctccttaaaggaaccgtggatttctgcgccctcaaccactttactacccgcttcgtgatgcatgaacagcttgcgggctcgagatacgattcggatagggacatccaatttctccaagacattacccggttgagctcgcctacgagactcgccgtgatcccatggggagtgcgcaagctccttcgctgggtccgccggaattacggggacatggatatctacattaccgcatccggaatcgacgaccaggcactggaggacgaccggctgaggaagtactatctggggaagtacctgcaggaagttctgaaagcatacctgatcgataaagtccgcatcaagggatattacgccttcaagctggcggaggagaaatcaaagccgcgcttcggattcttcacgtctgactttaaggccaagtcgtcgatccagttctacaacaaagtcatcagcagccggggctttccgttcgagaattcctcatcgcgatgtagccagacccaagaaaacaccgaatgcaccgtctgtctgttcctcgtgcagaagaagccactgattttcctcggatgctgcttcttctctaccctggtgttgttgctgtcgattgccatattccagagacagaaacgccgaaagttctggaaagccaaaaatctgcaacacatcccactgaagaagggtaaacgggtcgtctcg

SEQ ID NO: 250585 - DNA, 3132 bp, synthetic construct
  misc_feature 1..3132: note = Description of Artificial Sequence: Synthetic coding sequence
  source 1..3132: mol_type = other DNA
atgaaaccagggtgtgctgcgggtagccctggcaatgaatggattttcttctcgacagacgagataacgacgcggtaccggaacaccatgtctaacggcggactacagagatccgtgattctgtccgctttgatcctactccgtgccgtgaccggattctcgggcgacggtagggccatttggtctaagaatccaaatttcactcccgtgaacgaaagccagctcttcctgtacgacacgtttcctaagaattttttctgggggataggaacaggcgcactccaggtggagggttcctggaagaaggacgggaagggccctagcatatgggaccacttcatacacacccacctgaaaaatgtgtcatccacaaacggtagctcagactcttacatattccttgaaaaggatttgtccgcccttgatttcattggggtgagtttttatcaattctccatatcatggccgaggctctttccagatgggattgtaaccgttgccaacgccaagggtctgcagtactacagtacattgctcgacgccctggttctacggaacatagaaccgatcgtgacactgtatcactgggatctccccctggctctccaggaaaagtatgggggctggaaaaatgacaccatcattgacatctttaatgactacgctacctactgctttcagatgttcggggatcgagtcaagtattggataactattcacaacccttacctcgtggcgtggcatgggtacgggacaggcatgcacgcccccggcgagaagggcaatctcgccgccgtatatactgtaggtcacaacttgattaaagcgcactccaaggtgtggcataactataacacccactttaggccacatcagaagggttggctgagtattactctggggtctcactggatcgagcccaatcggagtgagaataccatggatattttcaaatgtcagcagtctatggtatctgtgctcgggtggtttgcaaaccccatccacggggatggagactacccggaggggatgcgcaagaagcttttctcggttctccccatctttagtgaagctgagaagcatgaaatgcgtggtacagctgatttcttcgcctttagctttggccccaataattttaaaccgctgaacacaatggccaagatgggccaaaatgttagccttaatctgagagaggccctcaattggatcaagctagaatacaacaaccctagaattcttatcgcggagaatggctggtttacggactcacgcgttaagaccgaggatacaacagccatctacatgatgaagaacttcctcagccaggtgctccaagcaattcgccttgacgaaattcgggttttcggatatacagcatggtctttgcttgacgggttcgagtggcaggatgcgtatactatccggagaggtctcttctacgtggatttcaattccaagcagaaggaacggaagcctaagtcatccgcacattattacaagcagattattcgggagaacggcttctcactgaaggagtccacccctgatgtgcagggtcagttcccatgcgacttcagctggggcgtaacagaaagcgtgctcaagcctgagtctgtggcatctagcccacagttcagcgaccctcacttgtatgtgtggaatgcgaccgggaaccgccttctgcacagagtggaaggtgtccggcttaaaactcgtcctgcgcagtgcactgatttcgtcaacattaagaaacaactggagatgctggcccgaatgaaggtaacccattatcgcttcgctcttgattgggcttccgtgctacctacgggcaaccttagcgctgtcaaccgacaggctcttcgctactaccggtgtgtggtgtccgagggcctgaaactggggatttccgcaatggtgaccctgtattatccaacacacgcccacctgggacttccagagccactgctgcatgccgacggatggctcaatccaagtaccgccgaggctttccaggcctacgcaggtttatgtttccaggaactgggcgatttagtgaaactctggataacgattaatgagcccaaccgcctttccgatatctacaaccggagtggtaatgacacgtatggtgcagcccataatctgctcgtcgctcacgcgctggcatggcggctatacgatcgacagtttcggccctcgcagcgaggggccgtgtcgctcagtctgcatgccgattgggccgaaccggctaatccgtatgccgactcccactggcgagcagcggagcgattcctgcagtttgaaattgcatggtttgccgagcccctctttaagaccggcgactatcctgctgcgatgagagagtacattgcaagcaagcacagacggggcctgtcttcctctgctctaccgaggctgacggaagcggagcggagactgctgaaaggcactgtagatttttgcgccttaaaccacttcacaacacgctttgtgatgcatgagcagcttgcggggtcgcggtacgacagcgacagggacattcagttcctgcaggatatcactcgcctgagcagtcctacccgcctcgccgtgatcccctggggcgttcgcaagctcctgagatgggttcgcaggaattacggcgatatggatatatacatcacggcctccggcatagacgatcaggccctggaggatgaccgcttgcggaaatactacttgggtaagtatctacaggaggtcctgaaggcctatcttattgacaaagtgcggattaagggatattatgccttcaaactagctgaagagaaatccaagcctcgcttcggattctttaccagcgattttaaagcgaagagcagtatccagttctacaataaagtgattagtagtagaggatttccatttgagaatagttctagcagatgctctcaaacgcaagagaacactgagtgcacagtttgcctatttctggtgcagaaaaaaccactcatcttcctgggctgttgcttttttagcaccctcgtgctgctgctcagcatcgctatcttccagcgacaaaagagacggaagttctggaaggctaaaaacctgcagcatatcccccttaagaagggcaaaagagtggtttca

SEQ ID NO: 250586 - DNA, 3132 bp, synthetic construct; identical to SEQ ID NO: 250585
  misc_feature 1..3132: note = Description of Artificial Sequence: Synthetic coding sequence
  source 1..3132: mol_type = other DNA

SEQ ID NO: 250587 - DNA, 3132 bp, synthetic construct
  misc_feature 1..3132: note = Description of Artificial Sequence: Synthetic coding sequence
  source 1..3132: mol_type = other DNA
atgaagcctggatgcgcagcaggatcccctggtaatgagtggatctttttcagcaccgatgaaattacgactcggtaccgcaataccatgtctaatggtggcttgcagcgatcggtgattctcagcgcattgattttgctccgcgcagtgactggattcagcggagacggaagagcgatttggtccaagaacccaaactttactccagtgaacgagtctcaactcttcctttacgataccttccctaagaacttcttctggggcattggcactggagcccttcaagtcgaaggatcctggaagaaggacggcaagggcccatccatttgggatcactttatacatacccacttgaaaaatgtgtcgagcactaatggaagcagcgatagctatatctttctggaaaaagatctttccgcactggatttcattggcgtctcattttaccaattttcgattagctggcctagactgttccccgatgggattgtcaccgtcgcaaacgcaaagggacttcaatactactcgaccctgcttgatgctctcgtgctgaggaacatcgaaccgatcgtcaccctttatcattgggatctgcctttggcccttcaggaaaagtacgggggctggaagaatgacacgatcatcgacattttcaatgactacgcgacttactgtttccagatgttcggagatcgcgtgaagtactggatcactattcacaacccgtacctcgtggcgtggcacgggtacggtactgggatgcatgccccaggcgaaaaaggtaacctggcagcagtatacactgttggccacaacctgattaaggcacattccaaggtgtggcataactataacactcactttagaccccatcagaagggatggctttcgatcaccctcggctcacattggattgaacctaaccggtcggagaacaccatggatatcttcaaatgtcaacaaagcatggtgtcggtgcttgggtggtttgcgaatcctatacacggtgatggagattaccctgagggcatgcgaaaaaagctgttttccgtccttcctatattctcggaagcagaaaagcatgagatgcgcgggactgcggacttttttgcgttttcctttggacccaacaacttcaagcccctgaacaccatggccaagatgggccaaaatgtgagcctgaatcttcgtgaagccctcaactggattaaacttgaatacaacaatcctcggatcctcatagcagaaaacggatggtttaccgattcaagggtcaagaccgaagatacgactgcaatatacatgatgaaaaacttcctctcccaggttctgcaggcaatccgccttgatgaaattagagtgtttggttacactgcgtggtcccttctggatggatttgaatggcaggatgcatacaccatcagacggggtcttttctacgtggactttaactctaagcaaaaggaaaggaagccaaagtccagcgcacactactacaaacaaatcatacgtgagaatggatttagcttgaaggaatctacccctgacgtgcaagggcaatttccctgcgatttttcgtggggggtgaccgaaagcgtgctgaaaccagaatccgtggcctcgtcccctcaattctcagacccacatctgtacgtgtggaatgcaacgggaaaccgccttctgcaccgggtggaaggggtgcggcttaagacccgacccgcacagtgtaccgatttcgtgaacatcaaaaaacaacttgaaatgcttgcccgaatgaaggtgacccattacaggttcgcactcgattgggcatccgttcttcctactggtaacctttccgctgtgaatagacaagccctgaggtactaccgctgcgtggtgagcgagggtctgaaacttggtataagcgcaatggtgaccctttactacccgacccacgctcatcttggcctccccgaaccactcctgcacgcagacggatggctgaatccatcaaccgcagaagcctttcaagcatacgccggactttgctttcaggaactcggcgatctggtgaagctgtggatcacgattaatgaacccaataggctgtcggatatctataaccgctccgggaacgatacctacggagccgcccataaccttcttgtggcgcacgcattggcctggaggctttacgatagacaattcaggccatcgcagagaggagcagtcagcctgtcattgcatgcggactgggcggaaccggcaaatccgtacgcggattcgcactggagagcagccgagaggttcctgcaatttgaaattgcctggtttgcagaaccactgtttaagacgggagactacccggcggccatgcgcgaatacattgcaagtaaacatcggagagggctttcctcctctgcactccccagacttaccgaagccgaaagacggctcctgaagggaaccgtggacttctgcgcgctcaaccattttaccacccgcttcgtgatgcacgagcaacttgcaggttcgaggtacgattcggatagggatattcaatttctgcaggatattactcggctttccagccctaccagactcgcagttatcccatggggagtgcgcaaacttctccggtgggtccggagaaattacggagatatggatatctacattacggccagcggtatcgatgaccaagcccttgaagatgataggctccggaagtactacctcggtaagtaccttcaggaagtgttgaaagcctaccttattgataaggtgcgcattaaagggtattacgcctttaaacttgccgaagagaaatcgaagccccggtttggatttttcacttctgactttaaggctaagtcctccatccaattctacaacaaggtgatttcgtccagaggttttccctttgagaattccagctcacgctgttcgcaaacgcaggaaaacaccgaatgtaccgtgtgcctgtttctcgtgcagaaaaaacctcttatctttctgggatgttgttttttctcgactctggtgctcctgctttcaatcgcaatcttccaacggcagaagagaagaaagttttggaaagcaaagaacctgcagcatattccacttaagaagggaaagcgagtggtgagc

SEQ ID NO: 250588 - DNA, 3132 bp, synthetic construct
  misc_feature 1..3132: note = Description of Artificial Sequence: Synthetic coding sequence
  source 1..3132: mol_type = other DNA
atgaaacccgggtgtgctgccggatctcctgggaacgagtggatatttttttcaactgatgaaataacaactcggtatcgaaatacaatgtcgaatggaggactacaacgcagtgtgatcctgtcagcactcatcctccttcgggctgttactgggttttctggagatgggcgggctatctggtctaaaaacccaaattttacaccagtgaacgaatctcagctattcctctacgatacttttcctaaaaactttttctgggggattgggacaggggccttgcaggttgaagggtcttggaaaaaagatgggaaaggaccctcaatctgggatcatttcatacatacacacttaaaaaacgtcagttccactaatgggtccagtgattcttatattttcctcgaaaaagatctcagtgccctcgatttcatcggggtttccttttatcagttctctatatcttggccacgcctctttccagatgggatagtgactgtcgctaatgcaaaaggacttcagtactattccacactgctggatgcactcgtgctgcggaacattgaaccaatagtcactttataccactgggatctgccactggccctccaggaaaaatatgggggatggaaaaatgatacaataattgatattttcaacgattacgctacatactgcttccagatgtttggagatcgggtgaaatactggatcactattcataacccatatcttgtcgcctggcatgggtacgggacagggatgcatgcacccggggagaagggaaatctggcagctgtatatacagtggggcataatctaatcaaagcacattctaaagtctggcataattacaacacgcactttcgtcctcaccagaagggatggctaagtatcacattaggatcacattggattgaaccaaacagatctgaaaacacaatggatatattcaaatgccaacagtcaatggttagtgtactcggatggtttgctaatcctatacacggggatggagattatcccgaggggatgcgaaaaaaattattttcggtactccccatcttttctgaagctgagaaacacgagatgcggggaactgctgatttttttgcattctcctttgggcctaacaattttaaacctttaaacacaatggcaaaaatgggacaaaacgtgtctctcaatttaagggaagctcttaactggataaaactagagtataataaccctagaatactgatcgcggaaaacggatggttcacagattcccgcgtgaaaactgaagatactactgcgatttatatgatgaagaatttcctctctcaagtccttcaggctatacggttggatgagatacgagtctttgggtatactgcatggtccctcctcgatgggtttgaatggcaggacgcatatacaatcagacgcggactcttttacgtagatttcaattccaaacagaaggaaagaaaacccaaaagttccgcacactattacaaacagatcatacgggaaaatggattttctcttaaggagtctactcctgatgtacagggacagtttccctgcgatttttcttggggggtgacagaatcagtgctgaaaccagaatctgtggcgtcatcacctcagttttccgatccccacctgtatgtctggaatgccacagggaatcggctgctccaccgggtggaaggagtgagactaaaaactcggccagcacagtgcacagatttcgtcaacatcaagaaacagttggaaatgctggcaagaatgaaagtgacacactaccggtttgccctggactgggcatctgttctgccaacagggaacctgtctgccgttaataggcaggcactgagatattacaggtgcgtggtctctgagggactaaaactggggatatctgccatggtaacactctattatcccacacacgctcacctcggactgcctgaacccctccttcacgcagatgggtggctgaacccatcgactgctgaagcattccaggcctatgctgggctctgctttcaggaattaggggatctggtcaaactctggatcacaataaatgagcccaatagactaagtgatatatataaccggtcggggaatgatacttatggggctgcacacaaccttcttgtggcccacgcccttgcttggagactgtatgatcgccagtttagaccaagtcagaggggagctgtctcattatctcttcatgctgattgggccgagccggccaatccatacgcagatagtcactggagggctgccgagcgcttcttgcagttcgaaatagcatggtttgccgaacccctcttcaagacaggagattatcctgctgcaatgcgggaatatatcgcttctaaacatcggaggggactctctagttctgcactgccacgcctgactgaggcagaaagacgcctcctgaaagggacagtagatttctgcgcattgaaccacttcactacacgcttcgttatgcatgaacagctggccggaagtcggtacgattctgatagggatatccagtttctccaggatatcacacggctgtcctccccaactcgcctggccgtgatcccatggggagttagaaaactcctcaggtgggttcgcagaaactacggggatatggatatttatataacagccagtgggattgatgatcaggccctggaagatgatcggcttcgcaaatattatctcgggaaatatttgcaggaagtactcaaagcttacctcatcgataaagtcaggatcaaaggatattatgcgtttaaattagctgaagaaaaatccaaacctaggttcgggtttttcacttcagattttaaagctaaatcctccatacagttctacaacaaagtgatcagttctaggggattccctttcgagaattcctcttctaggtgtagtcagacacaagaaaacacagaatgcacagtgtgtctcttccttgtgcagaaaaaaccactgatctttcttggatgctgttttttttctactctcgttttactcctgtctatagcaatatttcagcgccagaaacgacggaaattctggaaagccaaaaaccttcaacatatacctctcaaaaaagggaagagggtggtgtca

SEQ ID NO: 250589 - DNA, 3132 bp, synthetic construct
  misc_feature 1..3132: note = Description of Artificial Sequence: Synthetic coding sequence
  source 1..3132: mol_type = other DNA
atgaaaccaggatgcgccgctggcagccccgggaacgagtggattttcttcagcactgacgagataaccacccgctaccgtaacaccatgagtaatggagggttacagaggtccgtgatcttgtcggcacttatactactgagggctgtcacgggattttctggagatgggcgcgctatatggtccaagaacccaaatttcacgccagtgaatgagtctcagctttttctatacgatacatttccaaagaacttcttttggggtattgggaccggtgccctccaggtcgaagggtcttggaagaaggatggcaaggggccttctatatgggatcacttcattcacacacacctgaagaacgtatcttccactaatggttcctccgatagctacatctttctcgaaaaagatctttctgctctggacttcataggtgtgtctttttatcaattctccattagctggccaagactgtttcccgatggaattgtgactgtcgccaacgcaaaaggattgcagtactattctaccttgctcgacgcactggtcttgaggaatattgaacccatcgtaactctgtatcattgggatctgccactggccctgcaggaaaagtacgggggctggaaaaatgataccataatagacatctttaacgactacgctacctactgttttcagatgttcggtgacagggtgaagtattggattactatccataacccatacctcgttgcctggcacggctacgggactggcatgcacgcccccggggaaaagggaaacctcgcagcggtgtatacagttggacacaacctgatcaaggcgcactctaaggtgtggcacaattacaacacacactttcggccacatcagaaaggctggctgagcatcacattgggtagccattggatagaaccaaataggtcggaaaacactatggacatttttaaatgtcaacagagtatggtgtctgtcctgggttggtttgcgaaccccatccacggtgatggcgactacccggaagggatgcggaaaaaattattcagcgtcctgccgattttcagcgaggccgagaaacatgagatgcggggcactgccgattttttcgcattctccttcggccctaataatttcaagccactgaacaccatggcgaaaatgggacagaatgtgagcttgaatctcagagaggcactcaattggatcaaattggagtataacaatcccagaatcctcattgccgaaaacggatggtttaccgattctagggtgaagactgaggacaccaccgccatctacatgatgaagaatttcttgtcccaagtgctgcaggccattcgcctagacgagatcagggtcttcggctacaccgcttggtctctacttgatggcttcgagtggcaggatgcctacaccattcgccgtggcctgttctatgtggacttcaactcgaaacaaaaggaaaggaaacccaagtcgagcgcgcattattataagcaaattattcgggagaatgggtttagcctgaaggagagtactccggatgtgcagggacaattcccgtgtgatttttcctggggtgtgactgagtctgtgctgaagcccgagtccgtggcctctagcccacagttctctgacccacacctttacgtgtggaacgcgactggtaacaggctgttacatcgcgtcgagggcgtgcgactgaagactcgcccagcacagtgcactgattttgttaatataaaaaaacagctcgaaatgttggccaggatgaaagtgacacactacagatttgccttggactgggccagcgtgttgccaaccgggaatctcagcgccgttaacaggcaggccctgcggtattataggtgcgtggtatctgagggattgaaactgggcatctccgctatggtgactctctactatcccactcacgcgcacctaggcctcccagagcccttgctccacgccgatgggtggctgaacccaagcacggccgaagccttccaggcttacgcaggattgtgtttccaagagctgggggatctcgtcaagctgtggatcaccataaacgagcccaaccgactgagtgacatctacaaccgctccgggaacgacacttacggcgctgcccacaacctccttgttgctcacgcccttgcctggagactgtatgacagacaattccgcccctcacagcgaggagcagtcagcctctcattacacgccgactgggccgagcccgccaatccctatgccgatagtcactggcgcgcggccgagcgattcctccaatttgaaatcgcttggttcgcagaaccgctcttcaaaaccggagactaccctgccgccatgcgggagtatatcgcctcaaagcacaggcgcggattgtcctcatccgctttgcctagattaacagaggctgagaggaggctcttgaagggaacagtggatttttgcgctctgaatcactttacaacccggtttgtgatgcacgagcaactggcggggagcaggtatgattcagatcgggatatccagtttctgcaggacattacaagactcagttccccaacacgcctcgccgttattccttggggggtgcgcaagctgttgaggtgggttagaaggaactacggagacatggatatatatattactgcgtccggcattgacgatcaggcccttgaagatgacaggctgaggaagtattatttgggcaagtacctccaggaagtgctgaaggcctacttgatcgacaaagttaggatcaagggctattacgctttcaagctggcggaggaaaaatcaaagccgcgtttcgggttctttacttcggatttcaaggcgaagagcagcatacagttctacaacaaggtgatcagctcgagagggttcccctttgaaaactccagcagtagatgctctcagacacaagagaacacggagtgcaccgtgtgcctcttcctggtccagaaaaaacctcttattttcttaggatgttgcttcttcagcacactggtgctactactgagcatagcgatcttccaaagacaaaagaggaggaaattctggaaagcaaagaatctgcagcacatcccccttaagaaaggtaagcgagttgtatct

SEQ ID NO: 250590 - DNA, 3132 bp, synthetic construct
  misc_feature 1..3132: note = Description of Artificial Sequence: Synthetic coding sequence
  source 1..3132: mol_type = other DNA
atgaaacccggctgtgcggccggctcccctggaaatgaatggatattttttagcacagatgagatcaccacccggtaccgcaatactatgtccaacggaggcctgcaacgtagtgtgatcctgtccgcccttatattgctgcgtgcagtcacaggattcagcggcgatgggcgggccatctggagcaaaaatcctaattttacaccagtcaacgagagtcagctttttctgtacgatactttccccaagaattttttttggggaatagggacaggggctcttcaagtggaaggcagctggaagaaagacgggaaaggtccttcaatctgggaccactttatccacacacaccttaaaaatgtgtcctctacaaacggttcctcagacagctatatctttctcgaaaaagatctgagtgcgctcgatttcatcggagtgagcttctaccagtttagcatctcatggcctagactgttccctgatgggatcgtgaccgtggccaacgccaaaggccttcagtactactctacactattggatgccctggtgttgcggaatatcgagcccatcgtcacactctaccactgggatttacctctggccctccaagagaagtacggtggttggaagaacgatactatcatcgacatcttcaacgactacgcaacctattgctttcagatgtttggggaccgcgtgaagtactggataactatccataacccatacctagtcgcatggcacgggtacggaaccggcatgcacgctcctggtgagaaaggaaatttggcagccgtgtacaccgtgggacacaacctgatcaaagcgcacagcaaagtttggcataactacaacacacactttcgccctcatcagaaaggatggttgagcataacactgggttctcactggatagagccgaatcgcagcgagaataccatggatatctttaaatgtcagcagtccatggtcagtgtgctggggtggtttgcaaaccccatccatggtgacggagactaccctgagggcatgcgcaaaaagttattttcagtactgcctattttttctgaggccgaaaaacacgagatgcgaggcaccgcagattttttcgcattctccttcggccccaacaactttaagcccctgaacaccatggcgaaaatgggtcagaacgtcagcctcaacttgcgggaggcgttgaactggattaagctggaatataataatccccgcattctgattgcagagaacgggtggtttaccgactctcgtgttaaaacagaggatacaaccgccatttatatgatgaaaaactttcttagtcaggtgttacaggctataagattggacgaaattcgcgtctttgggtacaccgcatggtcattactcgacggttttgaatggcaagacgcttataccattagacgcggattattctacgttgactttaactctaaacagaaggagaggaagcctaaatcttctgcgcactattataagcaaatcatcagggagaatggattttccttgaaagaatccactccagacgtgcaagggcagttcccttgcgacttcagttggggggtgacggagtcggtgctgaagcctgaatcagtggcatcatctccccagttttcagatcctcatctgtacgtctggaacgcaactgggaacagattgctgcatcgggtggaaggggttagactcaaaactcggcccgcccagtgtactgattttgtgaacattaagaaacaattagaaatgctcgcccgcatgaaggtgacacactatcgatttgccctggattgggcctcagtcctgcccactggaaaccttagcgctgtgaacaggcaggccctgaggtattacaggtgtgtagtgagcgagggcctcaaactagggatttcagccatggtgactctctattatcctacgcacgcccaccttggcctacccgagcctctactgcatgccgacggctggctgaatcctagtaccgctgaggctttccaggcctatgctgggttatgcttccaagagctgggggacctggtcaagctgtggataaccatcaatgaacccaacagactgtctgatatctacaaccggtccgggaacgatacctatggagcggcccacaacctcttggtcgcccatgctttggcatggcggctatatgacagacagttccgacctagccagagaggggccgtgagcctctcactgcacgccgattgggccgagccagcgaacccctatgcagactcccactggagggcagcagagcggttcttgcagtttgaaattgcatggtttgcagagccactgtttaagaccggggactatcccgctgccatgagggagtatatcgcttccaagcatcgacgcggcctgtcctccagtgctttgcccagactaactgaagctgaacggcgtcttctgaagggcaccgtggatttttgcgctctgaaccactttacaacaaggttcgtaatgcacgaacagctggcaggctctcgatatgattccgaccgggacattcaattcctgcaggatatcacaagactttcatcaccaactcgcctcgcagtgatcccgtggggagtcagaaagctattgagatgggtgcgtcgaaattacggcgacatggatatctacatcacagctagcgggattgatgaccaggcactggaagacgataggctgcgaaagtactacctggggaaatacctgcaggaggtccttaaggcctacctgatcgacaaagtgagaatcaagggctattatgcattcaagctggctgaggagaaatctaagccacggtttgggttctttacgtctgacttcaaagctaagtcctcaattcaattttacaacaaagtcatctcaagccgcggtttccccttcgaaaacagctcctccagatgttcccagacccaagaaaacaccgagtgtacagtttgtttgttcctggttcagaagaagcccctaattttcttaggatgctgtttcttttccactctcgtgctactgctgtcaatagctattttccagcgtcagaagagacgcaagttttggaaagccaaaaacctccagcacatacccctaaagaaagggaagagggtagtgtct

SEQ ID NO: 250591 - DNA, 3132 bp, synthetic construct
  misc_feature 1..3132: note = Description of Artificial Sequence: Synthetic coding sequence
  source 1..3132: mol_type = other DNA
atgaagccgggttgcgctgcaggatcccctggtaacgagtggatcttctttagcaccgatgagataaccaccaggtataggaatacaatgagtaacggtgggttgcagaggagtgtcatcctgagcgctctgattctcctgagagcagtgacaggcttttccggcgatgggagggccatatggagcaaaaacccaaatttcactccggtgaatgaatctcaactttttctttacgatacttttcctaagaacttcttctggggaattggcacgggagctttacaggtagagggcagttggaagaaggacggaaaaggaccttcaatatgggatcattttatccacactcatctgaagaacgtgagcagcactaacggatcatccgattcctatatttttctagaaaaggacctgagcgcgctcgacttcataggcgtgagtttctatcaattcagcatatcatggccccgactttttcctgacggaattgtgactgtggccaatgcaaagggtctacaatactacagcacactgctggatgcgttagtgctacgaaatatagagcccatcgtcacactgtaccattgggatctgcctctggccctgcaggaaaagtatggcggctggaagaacgatacaatcatcgatatattcaacgattacgccacctactgcttccagatgttcggagacagggtgaagtactggatcacaattcacaacccatacctcgtggcctggcatggctatgggacgggtatgcacgcccccggggagaagggcaacctagcagctgtgtacactgtgggccacaacctgatcaaagcccattcgaaggtgtggcataattataatacacatttcagaccgcatcagaagggctggttatccattacactgggaagccattggattgaacctaacagatccgaaaacacaatggacattttcaagtgccagcaatccatggttagtgtgctaggatggtttgctaatcctattcacggcgacggagattatccagaaggcatgcggaaaaaactcttttcagttctacctattttcagcgaggctgaaaagcatgagatgcgaggaacagccgacttctttgcgttctcctttgggcccaataactttaaacccctgaataccatggcgaagatgggccagaacgtctctctgaacctacgggaggctctgaactggatcaagcttgaatataataaccctagaatacttattgcagaaaacggatggtttacagacagtagggtgaagacggaagataccacggcaatctatatgatgaagaactttctctctcaagtgctgcaggcaattcggctggacgagattagggtgttcggttatacagcgtggtccctgctcgacggttttgagtggcaagatgcctatactattcgcaggggactcttctacgtagacttcaacagtaagcaaaaggagcggaaacccaaaagttccgctcactattataagcagatcattcgcgagaacggcttctcactcaaggagtccacccccgacgttcaggggcagtttccatgcgatttttcctggggcgtgacagagtcggtgctcaagcccgaatccgtcgccagctctcctcagttttccgacccacatttatacgtatggaatgccactggcaataggctcttgcacagagtggaaggcgtgcgactgaagacacgaccggcgcagtgtaccgacttcgtcaacataaagaaacagcttgagatgcttgcgcggatgaaggtaacccattataggtttgcccttgactgggcatccgtcctgccaacgggcaacctgtcggccgtgaatcgacaggcactgaggtactatcgatgtgtggtctcggaaggccttaaactcggcatttccgcaatggtgactctttactaccccacacacgcccaccttggtctgccagagcccctcctccatgctgacggctggctcaacccatctacagcagaggcctttcaggcctatgccggtctatgcttccaggagctcggcgatctggtgaagttatggatcacaattaatgaacccaacaggctgtcggacatttacaatagatccggaaacgatacttacggagccgcccataatctattagtagcccacgctctcgcatggcgcctttacgataggcaattcagaccctcccagcggggtgcggtttctctgagtctccacgctgactgggcggagccggccaacccgtacgccgatagtcattggagagctgctgaacggttcctgcagttcgagatcgcgtggttcgcggaacctctgttcaagaccggcgattatcctgccgcaatgagggaatacatcgcttctaagcaccgtcggggcttatcttcttctgccttgcctaggcttaccgaagcagagcgtcggctgctcaagggcactgtggacttctgcgcattaaatcacttcaccactagatttgtaatgcacgagcagttagccgggtcccggtacgactctgaccgggatattcagtttttgcaggacatcactcgcctctccagtcccactagattagctgtaattccttggggtgtccggaaattgctgaggtgggtgaggcgtaattacggtgacatggacatttacatcaccgcgtctgggatagatgaccaggctctggaggacgaccggctacgcaagtattacctgggcaaatatctgcaggaggtgctcaaagcgtacttaattgacaaagtgcggatcaaaggctattacgcttttaaacttgcagaagagaaaagtaagccacgttttggttttttcaccagcgattttaaggcgaagtcctctatacaattctataataaggtgatttcttcgcgtggatttccctttgaaaattcctcaagcagatgctcacaaactcaggagaacaccgagtgcacagtatgcctgtttctagtgcagaagaaacccctaatctttctaggctgttgctttttctccaccctcgtgctcctgctgtcaatagccatctttcaacgacagaagcgcaggaaattctggaaagcaaagaacctgcagcacattcctctgaaaaaggggaagcgcgtagttagc

SEQ ID NO: 250592 - DNA, 3132 bp, synthetic construct
  misc_feature 1..3132: note = Description of Artificial Sequence: Synthetic coding sequence
  source 1..3132: mol_type = other DNA
atgaagcctggatgcgctgcgggtagtcccgggaatgagtggatcttcttcagcaccgacgaaattaccaccagataccggaatacaatgagcaacggtgggctgcagcggagcgtgatcctgagtgcgcttatcctgctgcgcgccgttacaggcttctcaggagatggaagggctatttggtcaaagaaccctaattttaccccagtaaacgagagtcagctgttcctctatgataccttccctaagaactttttttggggaattggaaccggagctctgcaggtcgagggatcatggaaaaaagatgggaagggtccaagcatttgggatcattttattcacacccaccttaaaaatgtgagctctactaacggctcttcagacagctatatctttctggagaaggacctcagtgctctcgattttatcggggtgagcttctaccagttcagcatcagctggccacgcctcttcccagatggaatagtgacagtggccaatgcaaaaggactccagtactattctacccttctcgatgctctggtgctgcgtaatattgagccaattgtcaccttgtaccattgggatctgcccctggcacttcaggaaaaatatggggggtggaaaaacgatacaatcatcgacatctttaatgactacgctacttattgcttccagatgttcggcgacagggtaaaatattggatcaccattcataacccttacttggtagcatggcatgggtatggaaccggtatgcacgctccaggagaaaaaggcaatctcgcagctgtgtacactgtgggccacaacctgataaaggctcattcaaaagtgtggcataattataatacgcatttccggccacaccagaaaggttggttgagcatcacgctgggatcacactggatagaaccaaaccgtagcgaaaataccatggacattttcaaatgtcaacagagtatggtgtcggtgctaggttggtttgctaatcctatacatggagacggggactatccagagggcatgcgcaagaaacttttctccgtcttgccaattttctcagaggctgagaagcatgagatgaggggcactgctgacttttttgctttttccttcggcccaaataatttcaaaccccttaacaccatggctaagatgggccaaaacgtgtctctcaatctcagggaagctctgaactggatcaaactggaatataacaacccacgaattctcatcgcagaaaacggctggtttactgattcccgcgtaaagaccgaggatacaaccgcaatatatatgatgaaaaactttttgagccaagtcctgcaggctattagactcgacgaaatccgtgtttttgggtacacagcgtggagcctccttgacggctttgaatggcaagatgcatataccatccggcgaggtcttttctacgtcgatttcaacagtaaacaaaaagaacgtaaaccaaagtcgagcgcccattactacaagcaaatcatacgtgagaatggatttagtttgaaagagtcgactcctgacgtgcaaggtcaattcccatgcgattttagttggggcgtgactgaatccgtgctcaagcctgagtccgtggctagtagcccgcaattttcagatccccacctttacgtctggaatgctaccggaaacaggctgctgcacagagtggaaggagtgcgcctcaagacaagaccagctcaatgcactgactttgtgaacattaagaaacagctggaaatgttagctcgaatgaaggttacacattataggtttgctctggactgggcctcggtgctgcccacgggaaacctgtccgctgtgaacaggcaggcgctgaggtattataggtgcgtggtcagcgagggcctcaagctcggaatctccgccatggtcaccctgtattatccaactcatgcgcacctgggactcccggagcccttgcttcacgccgatgggtggctcaaccctagcaccgctgaggcctttcaggcctatgccggactgtgtttccaggaactcggcgacctcgtgaagttgtggattacaatcaatgagccaaatcgcttaagtgacatatacaacaggtctggaaacgatacttacggcgccgcgcacaatcttctcgtcgctcacgctctcgcatggcgcttatacgaccgccaatttaggcctagccagcggggcgccgttagcttgagtctgcatgcggactgggccgagccagctaatccttacgccgatagccactggagggctgctgaaagattccttcaatttgagatagcctggtttgccgagcctctgtttaagaccggcgattatcctgcagccatgagggaatacatagcaagtaaacacaggagaggcctgtcaagttctgcccttccaagactgaccgaagccgagaggaggttgcttaaggggaccgtggatttctgtgcgctcaaccactttaccactaggtttgttatgcacgaacagctggctggctctcgctatgacagcgatcgggatatccagttccttcaagatatcacaagactctccagccctacccgtcttgctgtgatcccttggggagtcagaaaacttctgagatgggtgaggagaaactatggagatatggacatctacataaccgcatcgggaattgatgatcaagccctggaggatgaccggctgcgcaaatactaccttggcaagtatttgcaggaagtacttaaagcttaccttatcgacaaggtgaggataaagggctactacgcatttaaactcgcagaagaaaaaagcaagccaagatttggcttttttacctccgactttaaggctaaaagcagcatccagttttataataaggtgatcagcagcagaggcttcccttttgaaaactcctccagcagatgttcccagacacaagagaacactgaatgcaccgtttgcttgtttttggttcagaaaaaacccctcatctttcttgggtgttgttttttttctaccctggttttgttgttaagcattgctatttttcaaagacagaagcgcaggaaattttggaaggctaagaacctgcaacacataccgctgaagaaaggtaagagagtagtgagt

SEQ ID NO: 250593 - DNA, 3132 bp, synthetic construct
  misc_feature 1..3132: note = Description of Artificial Sequence: Synthetic coding sequence
  source 1..3132: mol_type = other DNA
atgaagccaggttgcgccgccggctcacctggcaacgagtggatcttctttagcacggatgagatcacaacgagataccgcaacacaatgtccaatggcggtcttcagcgcagcgtaatactctccgcacttatcctgttaagagccgtgaccggcttctcaggcgacgggcgcgcaatctggtctaagaatcctaacttcacccccgtcaatgagagccagctcttcctgtatgataccttcccgaagaatttcttttgggggatcggtacgggtgctcttcaggtggaaggtagttggaaaaaggacggcaaaggcccttccatttgggatcattttattcacactcacctgaagaatgtgtccagcaccaacgggagctctgatagctatatctttctggagaaagatctttcagcgctcgactttatcggcgtgagcttttatcaattctctattagctggccgcgcctgttcccggatggcattgtcacggtggcgaacgctaaaggcttgcaatactatagcaccctgctggatgccctggtgctccgcaatatcgagcctatcgtgaccctgtaccactgggacctgcccttagctctgcaagagaagtatggaggctggaagaacgatacgataattgatatatttaatgattatgctacctactgcttccagatgttcggggatagggtgaagtattggattaccatccacaatccatacctggtcgcgtggcacggatatggtacgggcatgcatgcacctggcgagaaaggaaacttggctgccgtgtacaccgtgggccacaacttgatcaaggctcactccaaggtttggcacaattataacactcactttcgccctcatcaaaagggatggctcagtataaccctgggttctcattggatcgagccaaatcgcagcgagaacacgatggacatctttaaatgccaacagagcatggtatccgttctcgggtggtttgctaatcctattcacggcgatggagattacccggaaggtatgagaaagaaattgttctccgtgttgccaatttttagcgaagccgaaaagcatgagatgcggggaaccgcagacttctttgctttcagctttgggccgaataacttcaagccgctgaacaccatggcgaagatggggcagaatgtgtccctgaaccttagggaggcgctgaactggattaaactggagtataacaatcctcgcatcctgatcgcagaaaatggctggttcaccgactcccgcgtgaaaaccgaggataccacggcgatctacatgatgaaaaattttttgagccaagtgctgcaggccatccgactggacgagataagggtttttggatataccgcatggtctctgcttgatggttttgaatggcaggacgcgtatacgatccgccgtggcttgttttacgtcgactttaatagcaaacaaaaggaacggaaaccgaagtccagtgcacattactacaaacaaattattcgagagaatggcttttctttgaaagagagcacaccggacgtacaaggccagtttccttgtgacttcagctggggagtaacggagtccgttctcaagccggagagcgttgcgtctagcccgcagttttcggatccacacttgtatgtctggaatgcaactggtaaccgcctgctgcatcgcgtggagggcgtacgcttgaagaccaggcctgcgcagtgcaccgactttgtcaatattaagaaacagctggaaatgctggcgaggatgaaagtgacgcactatcggtttgccctggactgggctagcgtgctaccgaccggtaatctctccgcggtcaaccgccaggccttgcggtactacagatgcgtggtgagcgagggcctgaaactcggtatcagcgctatggtgaccctgtattacccaacccatgcccacctgggtctgccagagccactgctccatgctgacggttggctgaatccgtcaacagccgaagcgttccaagcatacgcaggtctatgcttccaagaactgggcgacttggtcaaactgtggatcactatcaatgagcctaacagactgagcgacatttataatcggtccggcaatgacacgtacggtgccgctcacaatctcctggtggcgcacgcgctggcctggcgcctgtacgaccgtcagtttcgcccttcccaacgcggtgcggtctctcttagcctacatgcggattgggctgaaccagcaaacccatacgcggactcccactggcgggccgcggagcgctttcttcaattcgaaattgcgtggtttgcggaaccgctgtttaagacgggtgattacccggccgcaatgcgcgaatatattgcttccaagcatagacgtggtctgtcctcatccgcgctccctcgcttgacggaagccgagcgccggctcctgaagggtactgtggacttctgcgcactgaatcatttcaccacgcgcttcgtgatgcatgagcagttggcaggctcccgttacgacagtgatagggatatacagttcttgcaagacatcaccaggctgagctcaccgacccgcctggcagttattccttggggtgtgcgcaaactgctgcgctgggtcaggaggaattacggggatatggacatttatatcacggctagcgggattgacgatcaagccctggaggatgacagacttcgcaagtattacctgggcaaatatttgcaagaagtgttgaaggcgtacttgattgataaggtccggatcaagggctattatgcttttaaactggcggaagaaaagtctaagcctagatttgggttcttcacgagcgacttcaaagcgaagtccagcatccagttttataataaagtcatcagcagccgcggttttccgttcgagaatagctcatcgaggtgttctcagacccaggaaaacaccgagtgtaccgtgtgcctgttcctagtccagaagaagcctctgatcttcctcggttgctgttttttctccaccttagttctgctgctgtccatagcaatcttccaacggcagaagcgccgcaagttctggaaggcgaagaatctccagcatatcccgctcaagaaggggaagcgcgttgtaagc

SEQ ID NO: 250594 - DNA, 3132 bp, synthetic construct
  misc_feature 1..3132: note = Description of Artificial Sequence: Synthetic coding sequence
  source 1..3132: mol_type = other DNA
atgaagccgggttgcgcagcaggttcaccagggaacgaatggattttcttcagcactgatgagatcaccacccgctaccgcaacactatgtcaaacggcggactgcaacgctcagtgatcctgtctgctctgatcctgctgcgggcggtgaccggcttctcgggagacggtagagccatctggtccaaaaacccgaactttacccctgtgaacgaaagccagctcttcctgtatgatacttttcctaagaacttcttctggggtattggtaccggggccctgcaagtcgaaggatcttggaagaaggatggaaagggaccctcgatctgggaccactttatccacactcatctgaaaaatgtgtcgtcgaccaacgggtccagcgactcctacatcttcctggaaaaggacctctcggcgctggatttcatcggagtttcgttctaccagttttccattagctggcctcggctgtttccggatggcatcgtgacggtggccaatgcgaaggggctccaatactactcaaccctgctggacgccctggtgctgcgaaacatcgaaccgatcgtcactctctaccactgggacttgccactggccctgcaagagaaatacggaggatggaagaatgacaccatcatcgacatctttaatgactacgcgacctattgcttccagatgtttggcgacagagtcaagtactggatcaccatccataacccgtacctggtcgcttggcatgggtacggcactgggatgcacgcaccgggagaaaaaggaaatctggcagcggtgtataccgtggggcacaacctcatcaaggcgcattccaaggtgtggcacaactacaatacgcatttccgcccgcaccagaaaggatggctttcgatcactctcggaagccactggatcgagccaaacaggtcggagaataccatggacatcttcaaatgccaacagtccatggtttccgtgctgggatggttcgccaacccaattcatggagatggagattatccggagggaatgagaaagaaactcttttcagtcctcccaatcttctccgaggcggagaagcatgagatgcgggggactgcagacttcttcgctttctcttttgggccaaacaatttcaagccactcaacactatggcaaaaatgggacagaatgtgtcccttaacctgcgggaggcactcaactggatcaaactggaatacaacaaccctagaatcctcatcgcggagaatggttggttcacggactcgagagtcaagactgaggacactaccgctatctatatgatgaagaacttcttgtcgcaagtgcttcaggccatcagactggatgagatcagggtctttggatacaccgcttggtcgctcctggacggattcgagtggcaggacgcatacactatccgccgcggacttttctacgtggactttaatagtaagcagaaggaacggaaaccgaaatcgtccgcacactactacaaacagatcattagagagaatgggttttccctcaaggaaagcaccccagacgttcagggacagtttccatgcgacttttcgtggggcgtgactgagtccgttctgaagcccgagtcagtggcgtcatccccacaattctcggacccgcacctgtacgtgtggaacgccaccggcaatcgcctgcttcatcgggtggaaggagtgagactgaagacccgcccggcacaatgtaccgactttgtcaatatcaagaagcaactggaaatgctggcgcgcatgaaagtcactcattaccggttcgcactcgactgggcctcagtgctcccgactggcaacctctccgctgtgaacagacaagccctgcgctactacagatgtgtcgtatcggagggtttgaagctgggtattagcgcaatggttaccctgtactacccaacccacgcccatctgggcctcccagaaccactgctccatgctgatggatggcttaacccatccactgcggaggccttccaggcctacgccggactgtgcttccaggagctgggagatctggtcaagctgtggatcactattaacgaaccgaaccggctgagcgacatctacaaccggtccggaaatgacacctacggggcggcacacaacctgctggtggcgcacgccctcgcctggagactgtacgacaggcaattccgcccgagccagagaggagctgtgagcctctccttgcatgcggactgggcagaaccggctaatccatacgctgacagccactggcgggccgcggaacgcttcctgcagttcgaaattgcctggttcgccgaaccgctcttcaaaacgggcgattaccctgctgctatgcgcgaatacattgcctccaagcatcggcgcggactgtccagctcagcgctgccgcggctgaccgaagccgagaggagactgctgaaagggaccgtggatttctgcgcgcttaaccacttcaccactcggttcgtgatgcatgaacagttggcggggagcaggtacgatagcgatcgggacatccagttccttcaggatatcactaggttgagcagcccgaccaggctggcggtcatcccatggggggtgcgcaagctgctgcggtgggtgagacggaattacggagatatggatatctacatcaccgccagcggcatcgacgaccaagcgttggaggatgatagactccgcaagtattacctggggaagtacttgcaggaagtgttgaaggcctacttgatcgacaaggtccggattaaaggatattacgccttcaaactcgccgaagaaaaatcaaagccaagatttggtttcttcacctccgatttcaaggcgaagagcagcatccaattctacaacaaggtcatctcgagcagagggttccctttcgagaactcaagctccagatgctcccaaactcaggagaacaccgaatgcaccgtttgcctgttcctcgtccagaagaagcccctgatttttctgggttgttgcttcttctcgactttggtcctgctgctctcaatcgccatctttcaacgccaaaagcgccgcaagttctggaaggcgaagaaccttcagcacatccctctgaagaagggcaaaagagtcgtctcc

SEQ ID NO: 250595 - DNA, 3132 bp, synthetic construct
  misc_feature 1..3132: note = Description of Artificial Sequence: Synthetic coding sequence
  source 1..3132: mol_type = other DNA
atgaaacctggttgtgcagccggttcacccggaaatgaatggatattcttctccacagacgagattacgacaaggtacagaaacacaatgagcaacggcggcttgcagcggtccgtcatcctgtcagccctgatcctcctgagggccgtcaccggattctccggagatggaagggccatctggtcaaagaatcccaactttacccccgtgaacgaatcacaacttttcctgtacgacactttccctaagaatttcttctggggaattggtactggagcgctgcaggttgagggttcatggaagaaggatggcaaggggccgtctatctgggaccattttattcatacacacctgaaaaacgtcagctccacaaatggctcttccgatagctacatctttttggagaaagatctctcagcacttgatttcataggagtgagtttttatcagttcagtatctcttggcccagacttttccctgacggaattgtcacagtcgcaaacgcaaaagggttgcagtactactccaccctactagacgctctcgttttacgcaacatcgaaccaattgtcacgctgtaccactgggatctccctctggcccttcaggaaaagtatggcggttggaagaatgacactatcatagatattttcaatgattacgctacctactgttttcagatgtttggcgaccgggtgaagtactggatcacgattcacaatccatatctcgtggcttggcacggctatggtacaggcatgcatgcaccaggcgaaaaaggcaatctggccgctgtgtacactgtgggacataatctaatcaaggctcattcaaaagtttggcataattacaacacccacttcaggccccaccagaaggggtggctttccattacactcggctcccactggatcgagccgaataggtccgagaatacaatggacatctttaagtgccaacagtcaatggtgtcagttctaggatggttcgccaacccaatccacggggatggcgattacccggagggcatgcgcaagaagttgttctcagtgctccctattttcagcgaggctgagaaacatgaaatgagaggcactgctgacttcttcgccttcagtttcggacctaacaacttcaagcccctaaataccatggccaagatggggcaaaacgtctctctgaatctcagggaagcacttaactggatcaaacttgagtacaataacccccggatcctcattgccgagaatggttggttcactgacagtcgcgtgaagacggaagataccactgccatttacatgatgaagaacttcctgtcccaggtcctccaagcgattcgcctcgacgaaattagggtgtttggttataccgcatggtctcttctggatggcttcgagtggcaggacgcatacaccattcggagggggttattctacgtggattttaactccaagcagaaggagaggaaacccaagtcatccgctcactactataaacagataattagagaaaatggtttctcccttaaagagtccactcctgacgttcagggccagtttccttgtgattttagctggggagtgacagaaagtgtgctgaagcccgaatctgttgcaagctcccctcagttcagtgaccctcacctgtatgtgtggaacgccactggcaaccgacttctccaccgcgtggaaggggtccggctgaagacccgacccgcgcagtgcacagactttgtgaatataaaaaagcagctggagatgctggccagaatgaaggtgactcattaccggttcgcactggattgggcaagcgtgctgcctaccggcaacctgtctgcagtcaatcgacaggctcttaggtattaccggtgtgttgtgagtgaagggctgaagctcggcataagtgccatggtgacactctattacccaacacatgcacatctgggcctgccagagccccttctccacgcagacggatggctgaaccccagcaccgccgaggcatttcaggcctacgcaggcctctgcttccaggagctgggggaccttgtaaagctttggatcactattaatgagccaaaccggctgtctgacatctacaacaggtccgggaacgacacgtacggagcagcccacaacttgctggtggcgcacgccctcgcttggcggctgtacgaccgccagtttaggccttcacagcgtggcgctgtcagtctcagcctacacgccgattgggctgagcccgctaatccatacgccgattctcactggcgggcggcggagagatttcttcagtttgagatagcatggtttgcagaaccgttattcaagactggagattaccctgccgcaatgcgtgaatacattgctagcaagcacaggcgcggcttatcatccagtgctctgcctcgcttaacagaggccgagagaagactgctgaagggcaccgtggacttctgcgcacttaaccactttacgacgcgatttgtgatgcacgagcagttggcggggtctaggtacgattctgacagagatatccaatttctccaagacatcacacggctctcaagcccaaccaggctcgccgtaatcccttggggggtgagaaagctgttgcgatgggtaaggcgcaattacggtgacatggatatatatatcacagcaagtgggatcgatgatcaggccctcgaggatgatcggctgcggaaatattatcttggcaagtacctccaggaggtccttaaagcatacctgattgacaaggtcaggattaaggggtactatgcctttaagcttgctgaggaaaaatctaagcccagattcggctttttcactagcgattttaaagccaaaagctctatccaattctacaataaggtaatcagctcccgaggttttccgtttgaaaactcaagcagccgttgctcccaaacacaggagaacacagaatgcactgtgtgtcttttcctcgtgcagaaaaagcctcttatcttcctgggctgctgctttttctcgacactggtgctgctgttatccatcgccatttttcagagacaaaaacgtcgaaaattctggaaagctaagaacctccagcacatccccttaaaaaaggggaagcgggtggtgtcg

SEQ ID NO: 250596 - DNA, 3132 bp, synthetic construct
  misc_feature 1..3132: note = Description of Artificial Sequence: Synthetic coding sequence
  source 1..3132: mol_type = other DNA
atgaaacctggatgcgccgcaggatctcctggaaatgagtggatcttcttctcaactgatgagataactacaagatataggaacactatgtcaaatggcgggctgcagaggagtgtgattctttccgcacttattctgctaagagccgtgactggcttttccggcgacgggcgggcaatctggagcaaaaacccaaattttactccagtaaacgaatcgcagttgttcttgtacgatacatttccaaagaatttcttctgggggatcggcaccggagcacttcaggtcgaaggttcctggaaaaaggatggtaaaggccctagcatatgggatcacttcatccatacccacctgaagaacgtttcatccaccaatggtagctcagacagttacatatttctcgagaaagacctctccgcgttggacttcattggcgtgtcgttctatcagttttcgatctcttggccacgactgttccctgatggcatcgtcactgtggccaacgcgaagggacttcagtattactccacactgctcgacgcactcgtgctgcgcaacattgagcctatagtgaccctttaccactgggacctgcccctagcactgcaggagaagtatggcgggtggaagaacgacacaatcatagatatctttaacgactatgctacatattgcttccagatgttcggggatagagtgaagtattggataaccatccacaacccgtatttggtggcgtggcacggctatggcactggtatgcatgcacctggggaaaagggtaacctagccgcggtatataccgttggtcataatctcattaaggcccacagcaaggtttggcataattataatacccatttcagaccccaccagaagggatggctcagcatcaccctgggctcccattggatcgagccaaatcgctccgaaaacaccatggacattttcaagtgtcaacagtccatggtgtccgtcttaggctggttcgcaaatcccatccacggcgatggggactaccctgaagggatgcggaagaaactgttttcggtgctgcccatattctccgaggccgagaagcacgagatgcgtggaaccgcggatttcttcgctttctcattcggccctaacaacttcaagcctctgaatacaatggctaagatggggcaaaatgtgagcctgaacctgagggaagcactcaattggatcaagctggaatataataatccgcgtatcctaattgcggagaacggatggtttaccgactcccgggtaaaaacagaagatactaccgctatctatatgatgaaaaatttcctgtctcaggtgctacaggccattaggttggacgagattcgcgtttttgggtacactgcctggagtctccttgacggcttcgagtggcaggacgcatataccattcgtcgcggcctgttttacgttgacttcaattctaagcagaaggaaagaaagcctaaatcttcagcccattattacaaacaaataatcagagagaacggcttcagcctgaaagaaagtactcctgacgtccagggccagtttccatgtgatttttcttggggtgtgaccgaatcagtgctcaagccagagagcgttgcaagttcaccacaattttctgacccacatctctacgtgtggaacgcaacaggaaatcggctattacaccgagtcgaaggggtacggttgaagacccgtccagcgcaatgcacagactttgttaacatcaagaagcagctcgagatgctcgccagaatgaaggtgacccactatcgcttcgcgttggattgggccagtgttctgcccacaggtaatttgtctgcagtgaaccgtcaggctctcagatactatcgctgcgtggtctccgagggactcaagttgggcatctccgctatggtgaccctttattacccaacccacgcccatctcggcttgcctgaaccgctgctgcacgccgacggttggctcaatccatcaacagccgaagctttccaagcctatgctggactgtgctttcaagaactcggggatctggtgaagctctggatcaccattaatgaaccgaatcgcctcagcgatatctataatcggtcggggaacgatacatacggtgccgcgcacaacctgctggtagcccatgccttggcatggcgcttatatgaccgccagttccgccccagccagcggggagcagtgtctctgagcctgcacgctgactgggcagaacccgccaacccatatgcggattcccattggagggcagctgagcgcttcctccagtttgagattgcgtggttcgccgaaccactgtttaagactggggactacccggccgccatgcgtgaatatatcgcctctaagcaccgccggggcctgtcatctagcgctctccccagactgacagaggcagaacggcgcctgttgaaaggtactgtggatttctgcgctttgaaccacttcaccacgcgtttcgtgatgcatgagcaactggccggcagcagatatgactctgacagagatatacagttcctgcaggacataactaggttgtcctcgcctacgcgcctggcggtgatcccgtggggtgtgagaaaattgctgcgatgggtgagacggaattatggcgatatggatatttacattacagctagcggaatcgatgatcaggccttagaggacgaccgcctgcgcaagtattatttagggaaatacctgcaggaggtactgaaagcctatctcatagataaggtgcggataaaggggtactatgcctttaagcttgcagaagaaaaaagtaaacccaggtttggattctttacgtctgacttcaaggccaagtccagcatccaattttacaacaaggtcatcagcagccgcgggttcccctttgaaaactcatcttcacgctgctcgcagacccaggaaaatacagaatgtacggtgtgtttattcctcgtccagaagaaaccactaatatttctggggtgctgcttctttagcaccctcgtgctgctgctgtccattgccatattccagcgccagaagcggcgaaaattctggaaggctaagaacctgcagcatatccccctaaaaaagggaaaaagggtggtctcg

SEQ ID NO: 250597 - DNA, 3132 bp, synthetic construct
  misc_feature 1..3132: note = Description of Artificial Sequence: Synthetic coding sequence
  source 1..3132: mol_type = other DNA
atgaagcccgggtgtgccgcagggtctccaggcaatgaatggatatttttctctaccgacgaaattacgacacgctatagaaacactatgtctaacggcggccttcaacgaagcgtgattctgtctgctctcattctgctcagagccgttacgggattctctggcgacgggcgtgccatctggtctaaaaaccccaactttactccagtgaacgagtcacagctgtttctgtacgacaccttccccaaaaactttttttgggggatcgggactggcgctctgcaggttgagggctcatggaagaaagatggaaagggtccgagcatatgggaccatttcattcatactcacctgaaaaatgtgtcaagcacaaatggttcctccgactcttacattttcttggagaaggacctatctgctcttgacttcattggagtatccttttatcaattctccatttcttggccaagactattccctgacggaattgtgaccgtggccaacgccaaaggactacagtactactcgacattgcttgacgcattagtgcttaggaatatcgagcctatagtaaccttgtatcactgggatttgccactggccctgcaggagaagtacgggggatggaagaacgacaccatcattgacattttcaatgattacgccacatactgtttccagatgtttggcgatcgcgttaagtactggataaccatccataacccctacctggtagcctggcatgggtatggaaccggaatgcatgccccaggtgagaaaggtaatctggccgccgtgtacaccgtcgggcataatctcattaaagctcacagtaaagtgtggcacaattacaatacccacttccgcccccaccagaaaggatggctatccatcaccctcgggagtcattggatcgagccaaatagatccgaaaataccatggatatttttaagtgtcagcagagtatggtgtcagtgctgggatggttcgctaatcccattcacggcgacggcgactaccctgaagggatgagaaaaaaacttttttcagttctccccatcttctcggaagctgaaaaacacgaaatgcggggcactgccgattttttcgcctttagctttgggccaaataacttcaagcccctaaatactatggctaaaatgggacaaaacgtgagcctcaaccttcgcgaagccttgaattggatcaaactggaatacaataatccgcgaattttgatcgccgagaatgggtggttcacagattcccgagtcaagacggaggataccaccgccatctatatgatgaaaaacttcctgagtcaggtactgcaggcgattagactagacgagatacgggtgttcggatacaccgcctggtctctactagatggttttgagtggcaggacgcttacaccatacggcgtggactgttttatgttgacttcaactccaaacagaaggaaaggaaacccaagtcttccgcacattattataagcagatcatccgagaaaatggattcagcctgaaggagtccactcctgacgtgcaaggtcagtttccctgcgatttcagctggggggtgacagaaagcgtccttaaacctgagtctgtggcctccagtccccagttctctgatccccacctgtacgtctggaacgctactgggaaccggctgctccatcgggtcgagggcgtgaggctgaagacccggcccgcccagtgtactgattttgtgaatatcaagaaacaactcgagatgctcgcaagaatgaaggtaacacattatagatttgccctggactgggcatctgtgctgcctaccggcaacttaagcgcggtgaatcgtcaggcattgagatattaccgttgtgtcgttagcgaggggctgaaacttggaatttctgcaatggtgacactctactatccaacccatgcccacctggggctgcctgagcccttactccacgctgatggctggttgaatcctagtactgcagaggcatttcaggcctacgccgggctgtgtttccaagaattgggcgatttggtcaagctgtggattaccatcaacgagcccaatagactctctgatatttacaaccgcagtggtaatgacacctatggtgccgcccataatctgctcgtagcgcacgccctcgcatggaggctctatgatcgccagtttcggccaagccaacgaggtgcggtctctctatcattgcacgccgactgggccgaaccggccaatccctacgcggactcccactggagggcagctgaacgcttcctgcagtttgagatagcttggtttgcagagcccctgttcaagaccggtgattacccagctgcgatgagggaatatattgcatccaagcacaggagggggctgtcttcatctgccctaccgaggcttactgaggccgagcggaggcttttgaagggaaccgtcgacttttgtgctttgaatcactttaccacccgattcgtcatgcacgaacagctcgcaggtagtcggtatgatagcgatagagatatccagttcctgcaggacataactcgcttgagctcccctacgcggttggccgtgatcccttggggtgtgcgcaaattgcttaggtgggtccgtcggaactatggagacatggacatctacattactgcttcaggaattgatgaccaagcactggaggacgatcgccttcgaaaatattaccttggcaagtatctccaagaggtgctgaaggcctaccttatcgacaaagtgagaatcaaaggctactatgcctttaaactggcagaggaaaagtcgaagcctcgattcggcttttttacttcagacttcaaggctaaaagctcgatccagttttataataaggtgatctcttcacggggatttccttttgaaaactccagcagccgctgttcccagactcaggagaatacagagtgcactgtctgcctcttcctggttcagaagaagcctcttatttttcttggctgttgctttttttctactctcgtcctactactgagcatcgctatcttccagaggcagaaaagacgcaagttttggaaggctaagaatttacagcacatccctctgaagaagggaaaacgagtggtgtca

SEQ ID NO: 250598 - DNA, 3132 bp, synthetic construct
  misc_feature 1..3132: note = Description of Artificial Sequence: Synthetic coding sequence
  source 1..3132: mol_type = other DNA
atgaagcctggatgcgccgctggctctcctgggaacgaatggatttttttcagcacagacgagatcaccacgcgctacaggaacactatgtcaaacggtgggctgcagaggagcgtgatcctttccgcgctcatcctgctgcgtgccgtaaccggattttccggcgacggccgcgccatatggagcaaaaacccaaatttcaccccggtaaacgagtcacagcttttcctgtacgacaccttcccaaagaactttttttggggtataggcaccggcgccctacaggtcgagggatcatggaagaaagatggcaaaggccccagtatttgggaccatttcattcatacccatctcaaaaatgtgtcctcaacgaacggttcgagcgactcttatatatttctcgagaaagacctgtccgcattggatttcatcggtgtaagcttctatcagttcagtatctcgtggcccagactcttccccgacgggatcgtaaccgttgctaacgctaaaggccttcaatactacagcactctgctggacgcccttgtgctgcgcaatatcgagcccatagtgacgctttatcattgggatctgccgcttgcgctgcaggaaaagtacggcggttggaaaaatgacaccatcatcgacatcttcaacgattatgcaacatactgtttccagatgttcggggaccgggtgaaatactggattacgattcacaatccatacctggtcgcctggcacggctacggtaccggcatgcatgcccctggagaaaagggaaatctggcagccgtttatacggtcggacataacctgatcaaggctcacagtaaggtgtggcataactacaatacccacttccgtcctcaccagaaaggctggctgagcatcaccctgggtagtcattggatcgagccgaacagatcagaaaacactatggatatattcaagtgccagcaatcaatggtttccgtcttgggctggtttgctaacccaattcacggggacggcgattaccctgagggcatgaggaagaaactcttctccgtcctccccatttttagcgaggccgagaagcacgagatgcgcggtaccgccgacttcttcgccttcagtttcggaccaaataacttcaagcccctcaacaccatggcgaagatggggcagaatgtgagcttgaatctgcgtgaggccctgaactggatcaaactggagtacaacaacccacgtattcttatcgccgaaaacgggtggttcaccgatagccgcgttaagaccgaagataccactgccatctatatgatgaagaacttcctgagtcaagttctacaggcaatccggctggacgagatacgtgtgttcggatacactgcatggtccctccttgatggctttgagtggcaggacgcctacaccatccgaagaggtctcttttacgttgatttcaactcgaaacagaaggagagaaagcccaagtcgagcgcacattactacaaacagatcattcgcgaaaatggttttagcctcaaagaaagtactcctgatgtccaggggcagttcccatgtgatttttcttggggcgtgaccgaatctgtgctaaaacctgagtctgtagccagtagcccccagttttccgacccgcatctctacgtctggaacgctaccggcaaccgtctgttgcatcgcgtcgaaggagttaggctcaagacccgccctgcccagtgtacagattttgtgaacattaaaaaacaactcgaaatgttggcccgaatgaaagtgactcactaccggttcgctctggactgggccagtgtgcttccaactgggaatctcagtgctgtcaatcgccaggctctgcgctactaccgctgtgtagtgagtgaaggcttgaagcttggcatctccgccatggtgactctgtactaccccacacacgcacaccttggcctgcctgagccacttttgcacgctgatgggtggctcaacccatcaaccgccgaggccttccaagcctacgcaggcctgtgcttccaagagctcggagacctcgtgaagttgtggattaccatcaatgaacccaacagattgagtgatatttataatagatcaggcaatgacacatacggggcggcccacaatctgctcgtggcccatgcactggcttggcgcctgtacgatcgccaatttagacccagccagcggggggcggtgtctcttagtctgcacgctgattgggcagagcctgctaatccttacgccgactcacactggcgagcggccgagaggttcctccagtttgaaattgcctggttcgcagagcctttgttcaaaaccggtgactaccccgccgccatgagggaatatatcgcttccaagcacagacgcggactctcttcctccgctctgccgagactaacagaggctgaaagaaggctgctcaagggcaccgtagacttctgtgctttgaaccattttacaactcggttcgtcatgcatgagcagcttgccggaagcagatatgactccgatagggatatacagttcctgcaggacataaccaggttgtcttcccctacgagacttgccgtgattccttggggtgtgagaaagctcttaagatgggtgcggagaaattatggcgacatggacatctatataacggcctctggcatcgacgatcaggctctggaggatgatagattacgcaagtactacctcgggaaatatcttcaggaagtcctaaaggcgtaccttatcgataaggtccgtatcaaaggctattatgccttcaagctagcggaagaaaaaagcaagccacgcttcggcttttttacgtcagactttaaggccaagtcctcaatccagttttacaacaaggtcattagcagtcgcgggtttcccttcgagaacagcagctcgagatgctcccagacacaggagaataccgaatgtacagtgtgcctttttttagttcagaaaaagcccctaatttttctgggctgttgttttttctccaccctcgtcttgctcttatctatcgcaatcttccaacgccagaaacggcgcaagttttggaaggctaaaaacctacagcatatccccttgaagaagggaaagagggtagttagt

SEQ ID NO: 250599 - DNA, 3132 bp, synthetic construct
  misc_feature 1..3132: note = Description of Artificial Sequence: Synthetic coding sequence
  source 1..3132: mol_type = other DNA
atgaagccaggctgtgctgctggctcacccggaaacgagtggattttcttttctactgatgagataaccactcggtatcgaaacactatgtctaacgggggactccagagatctgtgattctcagcgcgctcatcctgttgcgagccgttacgggcttctcaggggacggcagagccatttggtctaaaaaccccaactttacaccagtcaatgagagccagcttttcctctacgatactttccccaagaactttttctggggtattggtaccggcgcacttcaagtcgaaggctcctggaaaaaggacgggaagggcccatccatctgggatcattttatccacacccaccttaaaaacgtcagctccactaatggtagcagtgacagctatatcttcctggaaaaggacttgagtgccctcgacttcattggcgtaagcttctaccaattttccatcagctggcctagactattccctgacgggatcgttacagtggctaacgctaagggcctgcagtactactcaacattactcgacgcactggttcttcggaacattgaacctatcgtgaccctgtatcattgggatctgcctctggccctgcaggagaagtacggtggttggaaaaatgacaccatcattgacattttcaacgattacgcaacctactgctttcagatgttcggagatcgagtcaagtactggattaccatccataacccatatctcgtggcatggcacggctatgggacaggcatgcacgcgcctggggagaagggaaatcttgccgccgtctacacagtcggacacaacctgataaaggcacatagtaaggtatggcataattacaacactcacttccgacctcaccagaaggggtggctgtccatcaccctgggctcacactggatcgaacctaatcgctccgaaaatacgatggatatcttcaaatgccagcaatctatggtgtcggtgctgggctggttcgctaaccctattcacggggatggggattacccggagggcatgagaaagaagctgttctccgtcctacccatttttagcgaggcagagaagcacgaaatgagaggtaccgccgacttttttgctttcagttttggacctaacaacttcaagccacttaacacaatggcaaagatgggtcagaacgtttctttgaacttgagggaggccctcaattggattaagcttgaatacaacaatccacggatcctgatcgctgagaacgggtggttcacagactcgcgggtaaaaacagaagacactaccgcaatctacatgatgaagaacttcctgagtcaggtgctgcaggcgatacggcttgacgaaattcgggttttcggttacactgcctggtcactgttggacgggtttgagtggcaggacgcctatacaattaggcgagggttattctatgtggatttcaattctaaacagaaggagaggaagccaaaaagttccgctcactactacaagcaaattattagggagaacggcttctcactgaaagagtccacccctgatgtccagggccagttcccttgtgatttttcctggggagtaaccgaaagcgtgctgaagcccgagagcgtggccagttcaccgcagttcagtgatccccacctgtacgtgtggaacgcaaccggaaatcggctccttcatcgcgtcgagggagtgaggctcaagacacgccctgcccagtgcactgactttgtcaacattaaaaagcagctggagatgctggcccggatgaaggttacacattatagatttgctctggactgggcttccgtactgcccactggtaatctgagtgccgtgaatagacaagccttaagatactatcggtgcgtggtttccgagggtctgaaactcggtattagcgctatggttactctgtactaccccactcacgcccacctcgggctccctgagccactcctacacgctgacgggtggctcaacccttctactgcagaagcatttcaggcttacgccggtctgtgtttccaggaactgggcgacctcgtgaagctgtggatcaccataaatgaacctaatcggttatctgacatttacaatcgaagcggaaacgacacgtacggtgccgctcacaaccttctggtggcccacgctctcgcctggcgcttgtatgacaggcaattcaggccatcacagcgaggtgccgtttccttaagcctacacgccgattgggctgagccagcaaatccttatgctgatagtcattggcgcgcagctgagcgttttctccaattcgaaattgcatggtttgccgaaccactcttcaagactggcgattacccggccgctatgcgagaatacatcgcttctaagcaccgccggggactgtcctcttccgcactcccccgtttgactgaagctgagagaaggctgctcaaggggactgtggatttctgtgccctaaatcatttcactacccgtttcgtcatgcatgagcagctggccggtagcaggtacgacagtgatcgcgatattcagttccttcaagacattaccagattaagcagccccacccgactagccgtcatcccgtggggggtgcgcaaacttctgaggtgggtgaggcggaactacggagatatggacatctacatcactgcttccggcatcgacgatcaggctctcgaagatgatcggcttaggaagtattacctgggcaaatatctgcaggaggtcttgaaggcgtacctcatagacaaggttagaattaaagggtattacgcctttaagctcgctgaggaaaagagtaagcccaggttcggattcttcacctccgactttaaggccaaatccagtattcaattctacaacaaggttattagctccagaggctttccgttcgagaattcctcgtctagatgtagtcagacacaggaaaatactgagtgtaccgtgtgtttattcctcgtccagaaaaagcccctcatcttcctcggctgctgttttttttcaacactggtgctactcctgtctatcgctatcttccagcgtcagaagaggcgcaagttttggaaggccaagaacctgcaacatatcccacttaaaaaaggcaagcgggtggtctcg

SEQ ID NO: 250600 - DNA, 3132 bp, synthetic construct
  misc_feature 1..3132: note = Description of Artificial Sequence: Synthetic coding sequence
  source 1..3132: mol_type = other DNA
atgaaaccaggctgtgctgctggatcacccggaaatgagtggatatttttctccacagatgaaattactacgcgttatcgcaacaccatgtctaacggaggccttcagcgcagcgtgatactctctgcccttatcctccttagagccgtgacggggttcagtggcgatggcagggcgatatggtccaagaaccctaattttactcccgtcaacgaatcccagctctttctttatgatacatttccgaaaaactttttctggggaatcgggacaggagctcttcaggtggaaggaagctggaagaaggacgggaaggggccttccatctgggatcattttattcacacgcaccttaaaaacgtgagcagtactaatggcagcagtgattcttacatcttccttgagaaagacctatctgctttggatttcataggagtgtcgttctaccaattctctatctcctggccacggctcttccccgatgggatagttaccgtcgctaatgccaaaggccttcagtattattccacactcttggacgcactagtgctgaggaatattgagcctattgtgacactgtaccactgggaccttcccctcgctctgcaggaaaagtacggcgggtggaagaatgatacaattatcgatatcttcaatgactacgccacatactgtttccagatgtttggagaccgggtcaagtattggattacaatacacaatccctacctggtggcctggcacggctatgggacaggcatgcacgcaccaggtgaaaagggtaacttggccgccgtttacacagtaggccacaatctgattaaggcccactcgaaggtgtggcacaattacaacactcatttcaggccacaccaaaagggttggctgtccattactcttgggtctcattggattgaaccaaatcgaagcgaaaatactatggacatcttcaaatgccagcagagcatggtcagcgtgctgggctggtttgccaacccaatccatggagatggtgattacccggaaggaatgcggaagaagctgttttccgtactgcctattttctcagaggccgaaaaacatgagatgcgggggacggccgactttttcgctttctcattcggccctaacaacttcaagccactgaacaccatggctaaaatgggccagaacgtgtctcttaatcttcgggaggccctcaattggatcaaattagaatacaataatccccgaattctcattgcagagaacgggtggttcacagatagccgggtgaagaccgaggataccacagccatttatatgatgaaaaactttctaagccaggtgctacaggccatccgcttggacgagattagggttttcgggtatacagcttggagccttctcgacgggttcgagtggcaggatgcctacaccatcaggcgggggttgttttacgtggatttcaactctaagcagaaggagcgcaagcccaaatctagtgcacactactataaacaaatcattcgggagaacggctttagtctcaaggagagtactcccgatgtgcagggccagtttccctgtgatttctcttggggcgtgaccgaaagtgtcctcaagccggaaagcgttgcatcttcaccacagttcagcgacccccatctgtacgtctggaacgctacaggtaaccggctgctgcaccgggtagaaggggtgagactgaagaccagaccggctcagtgtacggattttgtgaacatcaagaaacagctggagatgttggccagaatgaaagtcacgcattacaggttcgctctggactgggcatcagtgcttcctaccgggaatctatccgctgtgaaccgacaggcgttgcggtactaccggtgtgtggtgtcagaagggctgaaactgggaattagcgcaatggtaacgctgtactaccctacgcacgctcacttgggattacccgagcccttacttcacgcagacggctggctaaacccatcgactgccgaggcttttcaggcgtacgcggggctctgttttcaggaactcggggatctcgtgaaactatggatcacaatcaatgagcccaaccggcttagcgacatctataaccggtctggtaacgacacttacggagcagcccataaccttctggtggcgcacgctttggcctggcggctgtatgaccgacagttcaggccaagtcagagaggagctgtgtctctatccctgcacgccgactgggctgaacctgccaacccatatgcggattcacactggcgcgccgctgagcgctttctgcagttcgaaattgcttggtttgccgagcctctgttcaaaactggagactacccagcggccatgcgggagtacatcgcttccaaacaccggagggggttatcttcgagcgctctgccccggcttaccgaagcggagcgtaggctgcttaagggcacagtcgacttttgcgctctgaaccacttcaccacaagattcgtgatgcatgagcagttggctggttcaaggtacgacagtgatagagatattcagtttctccaggacattacccggctgtcaagtcctacccggctggccgttatcccatggggagtgagaaaactcttaagatgggtgcggcgtaattacggggatatggatatctacataactgcctccgggatagatgaccaggccctggaagatgaccgactgaggaagtactaccttggcaaatacttacaggaggtgctgaaggcttatcttattgacaaggttaggatcaaagggtactacgccttcaagctggccgaagagaagtcgaaaccacgctttggattcttcaccagtgacttcaaggccaaatcatccattcaattctacaataaagttatctctagtcggggctttccatttgagaatagctcatcaagatgctctcagactcaggagaatacggagtgcactgtttgcctctttctcgtccagaagaagcccctaatctttctaggctgctgtttctttagcaccctcgtgcttctgctctctattgcaatctttcaacgccagaagcggcgtaagttctggaaagccaaaaacctccaacacattcccctaaagaaaggcaagagggttgtgtcc

SEQ ID NO: 250601 - DNA, 3132 bp, synthetic construct
  misc_feature 1..3132: note = Description of Artificial Sequence: Synthetic coding sequence
  source 1..3132: mol_type = other DNA
atgaagccgggttgcgcagccggatcaccaggaaatgaatggatattcttcagcacggatgaaattactacccgatacagaaacaccatgagcaacggaggtctgcagagatcagtcatcctctcagccctcattctgctgcgagcagtgactggtttttcgggggacgggcgggcaatttggtcaaagaacccgaacttcactccggtcaatgaatcccagctttttctttacgatacctttcctaagaactttttctggggcattggaaccggtgcgctccaggtggagggctcttggaagaaagacggcaaaggtccctccatttgggatcactttattcacacccatcttaagaacgtctcgtcgaccaacggatcctctgatagttacattttccttgaaaaggatctgtcggctcttgactttattggggtgtccttttatcaattttcgatctcctggccacgtctttttcctgacggaatcgtaactgtcgcgaatgcaaagggactccagtactactccacccttctcgacgcattggtgcttagaaatatcgagccaatagtgaccctgtaccactgggatctgcccctggctctgcaagaaaagtacggaggatggaaaaatgacacgatcatcgatatctttaatgattacgcaacgtactgtttccaaatgtttggggacagggtgaagtactggatcactattcataacccctatctcgtggcgtggcacggttacggcaccggaatgcatgcacccggcgagaagggaaacctggccgctgtgtataccgtcggacataacctcattaaggcccactcaaaggtgtggcataactacaacacccattttcgtccacatcaaaaaggatggctgagcataaccctcggttcccactggatcgaaccaaaccgcagcgagaacactatggacattttcaaatgccagcaatcgatggtcagcgtgttggggtggttcgcaaatcctatacatggagatggggattaccctgagggaatgaggaagaaacttttttcggtccttcctattttctccgaggcagaaaagcatgaaatgcggggaactgctgacttcttcgcattttcgtttggtcctaacaactttaagccattgaacaccatggcgaagatggggcaaaacgtatcccttaaccttcgcgaggccttgaactggatcaaacttgaatacaacaatcctagaatcttgatagccgaaaatggatggttcaccgactcgagagtaaagacggaggatactactgcgatctatatgatgaaaaacttcctgagccaagtgctccaggcaatcaggcttgatgagatccgggtgtttggttacaccgcctggtcgctgctggacggctttgagtggcaagatgcatacaccattcgtagaggcctgttctacgtggactttaactcgaagcaaaaggaaagaaagcctaagagctcggcgcattactacaagcagatcatccgggaaaatggattttcgcttaaagaatcgacccctgatgtgcaggggcaatttccctgcgacttctcatggggagtgactgaatctgtcctgaagccagaatccgtcgcctcgtcacctcaattttcagatcctcatctgtatgtgtggaatgcaacgggcaaccgtctgctccaccgggtggaaggagtgcgactgaaaactcgccctgcacagtgtaccgattttgtcaacataaagaaacaactcgagatgctcgccagaatgaaggtcactcattacagattcgctcttgattgggcttcagtgctgcccactggtaatctgtcggcagtgaatcggcaagcactgcggtactacagatgtgtcgtgtcagaaggccttaagctgggaatctcagcaatggtgacgctctactaccccacccatgcgcatctcggtctgccagaacctcttctgcacgcagatggatggctcaacccatcgactgcagaagcgtttcaagcatacgccggtctgtgcttccaggagttgggtgatcttgtgaagctctggattaccattaatgaacccaacaggctttcggacatctacaatagaagtggaaacgacacttacggagccgctcacaatctgctggtggcacacgcgctggcctggcgcctgtacgacaggcaatttaggccttcacaacggggagcagtttccctctcgcttcatgcagactgggctgaacctgcgaatccctacgcagactcccactggcgcgcggcagaaagatttcttcaatttgaaattgcttggtttgccgaaccacttttcaaaactggcgattacccagcagctatgcgggagtacatagcatccaagcatagacgtggcctgtccagttccgcacttccacgccttactgaagccgaaaggagactgttgaagggcactgtcgatttttgcgcacttaatcactttactactcgtttcgttatgcatgagcagctggcgggttcccggtacgattccgatcgcgatattcagttccttcaagatattactcgcctctcatcccctaccagacttgctgtcattccgtggggtgtcagaaaactcctgaggtgggtgcgacggaattacggagacatggacatctacattacggcgagcggaatagatgatcaggcactggaggatgatcgactgcgcaagtattatcttggtaaataccttcaggaggtgcttaaggcataccttattgataaagtgcggattaaagggtactacgccttcaaacttgcagaagaaaagtccaagccgagatttgggtttttcacctcagacttcaaggctaagtcctcgatacagttttacaataaggtaatttcaagcagaggttttccatttgagaactcctcgtcccgctgttcgcagacccaggagaacacggagtgtaccgtctgtctgtttctggttcagaagaaacctctgatcttcctgggctgttgttttttcagcaccctggtgttgttgctctccattgcgattttccagagacaaaaacggagaaagttctggaaggcaaaaaacttgcaacatatcccactcaagaagggaaaaagggtcgtgagc

SEQ ID NO: 250602 - DNA, 3132 bp, synthetic construct
  misc_feature 1..3132: note = Description of Artificial Sequence: Synthetic coding sequence
  source 1..3132: mol_type = other DNA
atgaagcctggatgcgccgcaggaagcccaggaaatgagtggatcttcttctcgactgatgaaatcaccactcgctacagaaatactatgagcaatggcggtctgcagcgctccgtgatcctctcggcgcttatcctgctgagggcagtgactggattttcgggagacgggcgggccatctggtcgaagaaccccaacttcactcccgtgaacgagtcacaattgttcctgtacgacacctttccaaagaactttttctggggaatcggcaccggcgcactgcaagtggaaggctcgtggaaaaaggacggcaaaggacctagcatctgggaccactttatccacacccatttgaagaatgtcagctccactaatggatcaagcgacagctacatctttctggagaaagacctctcagcactggatttcatcggcgtgtccttttaccaattctcgatttcatggccacgcctgtttccagacggcatcgtcaccgtggctaacgccaaggggctgcagtactactccaccctgctggacgcacttgtcctgcgcaatattgaaccgattgtcacgttgtaccattgggacctgcctctggccctccaggagaaatacggaggatggaagaatgatactatcattgacatcttcaacgactacgcgacgtactgtttccaaatgttcggtgatcgggtgaagtactggataacgatccacaacccgtacctggttgcttggcacggctacggaacgggaatgcacgccccaggggaaaagggaaacctggctgccgtgtacaccgttgggcataacctcattaaggcccactcgaaagtttggcacaactacaacactcacttcagacctcatcagaagggatggctgtccatcactctggggtcgcattggatcgagccgaaccgcagtgagaacaccatggacattttcaagtgtcagcagtccatggtgtcggtgcttggctggtttgcgaacccaatccatggtgatggggattatccggagggaatgcggaaaaagctcttctccgtgcttccgatcttctcggaagctgagaaacacgaaatgcggggaaccgccgacttcttcgccttttcctttggacccaataactttaagccgcttaatacgatggccaaaatgggccagaacgttagcctcaacctccgcgaggcactgaactggatcaaactggaatacaataatcctcgcatccttatcgctgaaaacgggtggttcactgactcaagagtgaaaactgaggatactactgctatttacatgatgaaaaactttctgagtcaagtgctgcaggcaatccggttggacgaaatccgcgttttcgggtacactgcctggtcactgttggatgggtttgagtggcaggatgcgtacactatccggcggggactgttctacgtggactttaactccaagcagaaggagcgcaaaccgaagagctcagcccactactataaacagattattcgcgagaacgggttctccctgaaagagagcaccccggacgtgcaaggacagttcccgtgtgacttcagctggggagtgactgaaagcgtccttaagcctgaatcggtcgcaagctccccgcaattctcggatccacacctgtacgtctggaacgctaccggaaatcggctgctgcacagagtggagggcgtgaggttgaaaacgcgccctgcacaatgcaccgatttcgtcaacattaagaagcagctggaaatgctcgccaggatgaaggtcacccactacagatttgctctggactgggcttcagtgctccctactggcaatctttccgctgtgaataggcaggcgctccgctactaccggtgtgtcgtgtcggagggactcaagctggggatctccgccatggtcactctgtactacccgacccacgcgcatttgggactgccggaaccattgctgcacgcagacgggtggttgaatccttccacggccgaagcctttcaggcgtacgccgggctgtgcttccaagaactgggcgacctggtgaagttgtggatcaccattaacgagcctaataggctctccgacatctacaaccggagcggcaatgatacttacggagccgcccataacctgttggtggcacacgctctggcatggagactctacgatcgccagttcagaccgtcgcagcgtggagccgtctcgctgtcactgcatgctgactgggccgaaccggcaaatccgtacgctgattcgcactggcgcgcggctgagcgctttcttcagttcgaaatcgcctggttcgcggaaccgctgttcaagaccggagactacccagcagcgatgcgcgaatacatcgcatcgaagcatagacggggactctcgtcctccgcacttccacgccttactgaagccgagcgccgcttgctgaaaggtaccgtcgatttttgtgcgctgaaccactttactacgaggtttgtcatgcatgaacaactcgccggaagcaggtatgattcggatcgcgatatccagttcctccaagacatcactagattgagctcccccactcgcctcgctgtgatcccttggggggtgcggaagctgctccgctgggtcagaaggaattacggggacatggatatctacatcacggcatcaggaatcgacgatcaggctctggaggatgacagattgagaaagtactacttgggaaagtacctgcaagaggtgctcaaggcatacctgatcgacaaagttagaatcaagggctactatgctttcaagctcgccgaagaaaagtctaagccgagatttggattcttcacctcagacttcaaggcgaagtcgtcgatccagttttacaataaggtgatctcatcccggggattcccgtttgaaaacagctcgagccggtgctcccagacccaagaaaatactgagtgcaccgtgtgtctgttcctcgtccagaaaaaacccctcatcttccttggatgctgcttcttctcaaccctggtgttgctgctctccatcgccatctttcagcgccagaagcggaggaagttctggaaggcgaagaacctccaacacatccctctgaagaagggcaaacgggttgtctcg

SEQ ID NO: 250603 - DNA, 3132 bp, synthetic construct
  misc_feature 1..3132: note = Description of Artificial Sequence: Synthetic coding sequence
  source 1..3132: mol_type = other DNA
atgaagcctgggtgtgcagcgggctctcccggtaatgagtggatctttttttcgactgacgaaataacgactcgataccgcaatacgatgtcgaacggaggactgcagcgctcagtaattctgtctgcgcttatattgctgagggcagtgacagggttctctggagacgggagggctatttggtccaaaaatcccaacttcacaccagtgaacgagtcacaactctttttgtatgacacttttcccaagaatttcttctggggcataggtacaggcgctttgcaggttgagggctcttggaagaaagacggaaaagggcccagcatttgggaccacttcattcacacgcatctgaagaacgtgtcatccacgaacggctcatccgattcttacattttccttgagaaggatctgtctgcgctggacttcattggtgtgtctttctaccagttcagcatttcatggccaagactgtttcccgacgggatcgtgactgtcgccaatgcgaagggcctacaatattattctaccctgctagatgcactggtcttgaggaatatcgagcccatcgtgactctctatcactgggacctcccattggctctccaggagaaatacggaggctggaaaaacgataccatcattgatatcttcaatgactatgctacctactgcttccagatgtttggggatcgagtgaaatattggatcaccattcataacccttacctggtggcttggcatgggtacggcacagggatgcatgcccctggcgaaaaggggaacctcgccgcagtatacaccgtgggccataacctgatcaaagcccactctaaggtgtggcacaattacaatacacacttcagaccccatcaaaaagggtggctgtccatcaccctaggttctcactggatagagccgaaccgttctgagaatacaatggatatattcaaatgccagcagtcaatggtgtcagttctcggctggttcgctaatccaatacacggagacggcgattatccagaggggatgcgaaaaaaattgttcagtgttttgcccatattctcggaagctgagaagcacgagatgagaggaacggcggatttcttcgcatttagttttggacctaacaacttcaagcctctgaataccatggcgaaaatgggacagaacgtgtcactgaacctccgtgaagccctgaattggatcaagctggagtacaataatccacgaatactgattgctgaaaatggctggttcactgactctagggtaaagactgaagatactaccgctatctatatgatgaagaacttcctgagccaggttcttcaggccatccggctggacgagattagggtcttcgggtataccgcctggagtttattggatgggttcgagtggcaggatgcttatacgattcggaggggcctcttctacgttgactttaacagtaagcagaaagaacgaaagcctaaatcgtctgcccattattataagcagatcatacgggagaacggctttagtttgaaagagtcaacccccgatgtgcaggggcagttcccatgtgacttctcatggggcgtgacggaaagtgttttgaaacccgagagtgtggcttcctctccccagttttccgacccacatctctacgtctggaacgccaccggtaatcggcttttgcaccgcgtggagggggtccgccttaagaccagacctgcccagtgtaccgactttgtaaatattaagaagcagctggagatgctggctaggatgaaagttactcactaccgcttcgccctcgactgggcatcggtgcttccaaccgggaacctcagcgccgtgaaccggcaggctttgcggtattaccggtgtgttgtgtccgagggcctaaagctcggcatctctgcaatggtgaccttgtactaccccacacacgcccatctgggccttcctgagccactcctccacgccgatggctggcttaacccctccaccgccgaggcctttcaggcttatgccggactgtgcttccaggagttgggtgaccttgtgaagctctggattaccataaacgagccaaatcggctctctgacatttataatcgaagcggaaatgatacttacggcgccgcccataacttactcgttgcccacgccctggcatggcgactatacgatcgtcagtttcggccgagccagagaggagcagtgtctttgagccttcacgccgactgggcagagcctgccaatccctatgctgacagccactggagagctgccgagcggtttctgcagttcgagattgcctggttcgctgagcctctgtttaaaactggcgattatcctgcagccatgcgagagtatatagcctcaaagcatcgcagaggccttagcagcagtgccctgcctcggcttactgaagccgagcgcaggctgttgaaaggcacagtggacttctgtgccttgaatcattttacaacccgctttgtgatgcacgagcagctcgcaggctctcggtatgattcagaccgtgacattcagttcctgcaagacattacacgcttgtcctcgccaacaagattagctgtaattccctggggagtgaggaagttattgaggtgggttcgcagaaattacggagatatggacatttacatcacagcttcagggattgatgatcaggctctggaggacgaccggctaaggaagtactacctcggtaaatatctccaagaggtcctcaaagcatacctcatcgataaggtgcgtattaagggctattacgctttcaaactggctgaagagaagagtaaaccaagattcggcttttttacaagcgacttcaaggcaaagtccagcatccagttttacaacaaagttatttcatcccgaggttttccgtttgaaaatagcagctctcgctgtagccaaacacaggagaataccgaatgcactgtgtgtctgtttctggtgcagaagaaacccctgattttcctggggtgctgctttttttcaacactcgtcttacttctttcaattgcaatcttccagcggcagaaacgccgaaagttctggaaagccaaaaatttacagcacatcccactgaagaaaggcaagagggttgtaagt

SEQ ID NO: 250604 - DNA, 3132 bp, synthetic construct
  misc_feature 1..3132: note = Description of Artificial Sequence: Synthetic coding sequence
  source 1..3132: mol_type = other DNA
atgaagccaggatgtgcggcaggttctcctggaaacgaatggattttcttttctaccgatgagattaccacgaggtatagaaacactatgtcaaatggtgggcttcaaagatcagtgatacttagcgcactcatccttctcagggccgtgacgggattctccggggacggacgcgcaatatggtcgaagaatccaaactttacgcccgtcaacgaatcgcaactttttctgtacgatacctttcctaagaatttcttctggggtattgggactggagcgcttcaagtggaaggatcctggaaaaaagatggcaagggcccctcgatctgggatcatttcattcacacccaccttaagaacgtcagctcgacgaatggttcatcggattcgtacatatttctggagaaagacctttcagccctggatttcatcggagtgagcttttatcaattttccatttcatggccgcgtttgtttcccgatggtattgttaccgtggcaaacgcaaagggcctccagtactactccacccttttggacgcactcgtgctgcggaacatcgaacctattgtgactctgtaccattgggatcttcctctcgcactccaagagaaatatggcggatggaaaaacgacaccattattgatatcttcaatgattacgctacttactgtttccagatgttcggtgatcgggtgaagtattggattaccatccataatccttaccttgtggcctggcatggttacggcaccggaatgcatgcgcctggagaaaaaggcaacctggctgcagtctacaccgtcggacataatctgattaaagcacactccaaagtgtggcacaattacaatacgcattttagaccccatcaaaaggggtggttgagcatcacccttggatcacattggatagaaccaaacaggtccgagaacactatggacatctttaagtgtcagcagagcatggtgtcggtcctgggatggtttgccaacccaattcacggcgatggggattaccctgaaggtatgagaaagaaactgttctccgtgctgcccattttctcggaagcagaaaagcatgaaatgcggggaactgcagacttcttcgcattctcgtttggaccaaataactttaaaccacttaacaccatggctaagatggggcagaacgtctccctgaacctgagagaagcgctcaactggattaaactcgagtacaacaaccctcgcatcctcattgcagaaaacggatggtttaccgattcgcgggtcaagaccgaagataccactgccatctacatgatgaaaaactttctttcccaagtgctgcaagccatccggctggacgaaattcgggtgttcggttacaccgcgtggtcactgcttgacggtttcgagtggcaagatgcttacaccattcgtcgtggacttttctatgtggactttaactcgaagcagaaggaaagaaagcctaagagctcagcacattactacaagcagataatccgcgaaaacggattttcccttaaggagtccactcctgatgtgcaagggcagttcccatgtgacttctcatggggagtgaccgaatcggtgctgaaaccggaatcggtggcctcatccccacaattttctgacccccatctttacgtatggaacgcaactggaaatcgtctccttcaccgcgtggagggagtgagattgaaaactaggcctgcacagtgtactgattttgtcaacatcaaaaagcaactcgaaatgcttgcacgtatgaaggtgactcactaccgcttcgcgctcgattgggcatcagtgctcccgacggggaacctcagcgccgtgaatcgccaggcgctgcggtactaccgctgcgtggtgtcggaaggtcttaagctgggcatttcagcaatggtcacgctgtactaccctacccatgcccatctggggcttcctgagccccttctgcatgcggacggatggctgaatccgtctaccgcagaggcatttcaagcatacgcaggactctgctttcaggaacttggagatctggtgaagctgtggattaccattaacgaacctaaccggctgagcgacatttacaaccgctcgggaaacgatacctacggagccgcacataatctcctggtggcccatgctcttgcatggagactctacgataggcagttccgcccgagccaaaggggggcagtgagcctgtcgcttcacgcagattgggcagaaccggcaaatccttacgcagacagtcattggagggcagcagaaaggtttttgcaattcgaaattgcgtggttcgcagaaccattgttcaagaccggagactacccagcagctatgcgggaatacattgcaagcaagcaccgccgcggcttgagctcgtcagcactgcctagacttactgaggccgagcggcgcttgctgaaggggactgtcgatttttgcgcattgaaccactttactaccaggtttgtgatgcatgaacaacttgccggatcgcggtacgacagcgatcgcgatattcagttcctgcaggatattactcgcctgtcctcacctactcggctcgcggtgattccttggggtgtgagaaagctccttcgctgggtgcggcggaattacggcgatatggatatctacattactgcctcggggatagatgatcaagccctggaagatgatcgtctgcgcaaatactacttgggtaagtatctgcaggaagtcctgaaagcatatctgattgacaaggtccgaattaaggggtactacgcattcaaacttgcggaggagaagtcgaagcctagatttggtttcttcacctccgatttcaaggctaaatcctccatccagttttacaacaaggtgatttcctcacggggtttcccttttgaaaattcgtcctcccgctgttctcaaacccaagaaaacactgaatgtacggtctgtctttttcttgtgcagaaaaagcctcttatctttctgggatgttgtttcttctccacccttgtcctgctccttagcattgcaatctttcagaggcagaagcgccggaagttctggaaggccaagaacctgcaacatattccgttgaagaaaggtaagcgcgtggtttct

SEQ ID NO: 250605 - DNA, 3132 bp, synthetic construct
  misc_feature 1..3132: note = Description of Artificial Sequence: Synthetic coding sequence
  source 1..3132: mol_type = other DNA
atgaagccgggatgcgccgcaggctcgccgggaaacgagtggatcttcttcagcacggacgagatcaccacccgttaccgtaacaccatgtcgaatggaggtctgcaacggtcagtgatcttgagcgccctgatcctcctccgcgctgtgacgggcttctctggagatggaagagccatctggtcaaagaacccgaactttaccccagtgaacgaatcacaactgtttctgtacgacacctttccgaagaacttcttctggggaatcggtaccggcgcactccaggttgaaggaagctggaagaaggacggtaaggggccatcgatctgggaccacttcatccacacccacctcaagaacgtgtcctcaaccaacggctcctctgatagctacatttttctcgagaaggatctctcggcgctggatttcatcggggtgtcattttaccaattctctatttcatggccccggctgttcccggacggaatcgtgaccgtggccaatgcgaaagggcttcagtattactccactttgctggatgccctcgtgctgaggaacatcgaaccgatagtgaccctgtatcactgggacctgccgctcgctcttcaagagaaatacggcgggtggaagaatgatacgatcatcgacattttcaatgactacgcaacctactgtttccagatgttcggagacagagttaagtactggattacgatccataacccttaccttgtcgcttggcatggatacggcaccggtatgcatgcaccgggagaaaaaggaaatcttgccgcagtctacaccgttggtcataacctcataaaggctcactccaaggtgtggcacaactataacacccatttccggccgcaccagaaagggtggctgtcgatcactttggggtcccattggatcgaacccaacagatcggagaatactatggatatcttcaagtgccagcagagcatggtgtcagtgttgggatggttcgccaatccgatccacggagacggcgactacccggaagggatgcgcaagaaactgttctcagtgctgcctatattcagcgaagcggaaaaacacgagatgagaggaactgctgatttctttgcgttctcgtttggacccaataactttaaacccctgaatacgatggctaagatggggcaaaatgtctccctgaatctgagagaggccctgaattggatcaagctcgagtacaacaacccaagaatactcatcgcagaaaacggttggttcaccgactcgagagtcaagactgaggacaccactgctatctacatgatgaagaatttcctcagccaggtccttcaagcaatccgcctggacgaaatcagagtgtttggttatacggcctggtccttgctcgatggttttgagtggcaggacgcctacactatccgaaggggactgttctacgtcgacttcaactccaaacagaaagagagaaagccaaaatcatcggcacattactacaagcaaatcattcgggagaacggcttcagccttaaggaatccacccctgatgttcagggacagttcccgtgcgattttagctggggggtgactgagagcgtcctgaaacctgaatcggtggcctcgtcgcctcagttctccgatcctcatctctacgtctggaatgctactggaaaccgcctgctccatcgggtggagggcgtgcggctcaagactagaccagctcaatgcactgattttgtgaacattaagaagcagctggagatgctggcgaggatgaaggtcacgcactatcgctttgccctcgattgggcatcggtgctgccgactgggaacctttcagccgtcaaccgacaagcactgcggtactacaggtgtgttgtgtcggagggcctgaaattgggaatctcggcgatggtcactctctactaccctacccatgcccatctgggactccccgaaccgttgctgcacgcagacggttggcttaacccgtcgaccgctgaggcgtttcaggcctatgccggactctgtttccaagaactgggagacttggttaagctgtggatcactattaacgaaccgaataggctcagcgacatatacaatcgctcaggcaacgacacctacggagcggcgcacaacctgctggtcgcgcacgcgttggcatggcggctgtacgaccgacagtttcgcccgtcccagcggggagccgtgtcgctgtcgcttcatgccgattgggcggaacccgcaaatccctacgcggactcccactggcgggcagccgaacgcttcctccagttcgaaatcgcatggtttgcggaaccccttttcaagactggagattacccggctgcgatgcgcgaatacatcgcatcaaagcaccggcgcggcctctcctccagcgcgctgccacggctcaccgaggccgagcgcagacttctgaaggggaccgtggacttttgcgcgctcaaccacttcaccactcgcttcgtgatgcacgaacaactggccggatccagatacgattcagacagggatattcagtttttgcaagacatcacccgcctgtcctccccaacgcgcctggcagtcatcccctggggcgtccggaagctcctgagatgggtgaggcggaattatggagatatggacatctacatcactgcctcaggtatcgatgaccaggctctggaggacgacaggctgagaaaatactacttgggcaagtaccttcaagaagtgcttaaggcgtacctgatcgataaggtccggatcaagggatactacgccttcaagctcgccgaagaaaaatcgaaaccacgctttggcttcttcacttcggactttaaggccaagtcgagcatccagttctacaacaaagtgatttcatcacgcggattcccattcgagaactcctccagcaggtgctcccaaactcaggaaaacactgagtgcactgtctgccttttcctggtgcagaagaagccactcatcttcctgggctgttgcttcttctcgaccctggtgctgctgttgagcattgctattttccaacggcagaagcgccgaaagttctggaaggctaagaatcttcagcatatccctttgaaaaaaggaaaacgagtggtgtcc

SEQ ID NO: 250606 - DNA, 3132 bp, synthetic construct
  misc_feature 1..3132: note = Description of Artificial Sequence: Synthetic coding sequence
  source 1..3132: mol_type = other DNA
atgaagccgggatgtgcagccggatcacctggaaatgaatggatattcttttcgacggatgagattacgaccaggtacagaaatacgatgtccaacgggggtctgcaacgctcagtcattctttccgctctcatcttgctgagagctgttaccggattttctggagatggacgggccatttggtcgaaaaacccgaatttcactcctgtgaacgaaagccaactttttctgtatgacaccttcccgaagaatttcttttggggtattggtaccggtgccctgcaagtcgaaggtagctggaagaaagacggtaagggaccatccatctgggaccactttatccatacccatcttaagaacgtgtcatcaacgaacggatcgagcgattcgtacattttcctcgaaaaagatctgtcggcacttgatttcattggagtgtccttttaccagttttcgatctcctggcctaggctctttcccgatggtattgtgaccgtggcaaatgcaaagggtctgcagtactactcgaccctcctcgatgcccttgtcctccgtaacatcgaaccaatagtgactctttaccactgggaccttcctctggcacttcaggaaaagtacggcgggtggaagaatgataccatcattgatatcttcaacgattatgccacctattgcttccagatgtttggagatcgcgtgaagtactggattaccatccataacccgtacctggtggcgtggcatgggtacggtaccggaatgcacgcgccaggcgagaagggaaacctggcagcagtgtacaccgtcggccataacttgataaaagcacattccaaggtgtggcataactacaacactcatttccgcccgcaccagaaaggatggctttcaatcaccctgggttcgcattggattgagccgaatcgttccgagaacacgatggacattttcaagtgtcagcagagcatggtgtcggtgcttggatggttcgccaatcccattcacggcgatggagattaccctgaaggtatgaggaagaagctcttttcggtgctgccaatattctccgaagcagaaaaacacgaaatgagggggacggccgacttttttgcgttcagcttcggaccaaacaacttcaagccccttaatactatggctaaaatgggtcaaaacgtgtcacttaacctgagagaggcacttaattggataaagttggaatacaacaaccccaggattcttattgcagagaacggctggtttactgacagccgagttaagactgaggataccaccgcaatctacatgatgaagaactttctgagccaggtgctgcaggcgatcagactggacgaaatacgggtctttggttataccgcctggtcattgctggatgggtttgaatggcaggacgcgtacactattcgcagagggctcttttacgtcgactttaactctaagcaaaaggaacgtaagcctaagtcctccgcacattactacaagcagattatcagagaaaatggtttctcgctgaaggagagcaccccagatgtccaagggcaattcccatgtgatttcagctggggagtcactgaaagcgttctgaagccggaatccgtcgcatcatcacctcaattttcggacccccatctctacgtgtggaatgcgactggcaataggctgctgcacagagtcgagggagtccgccttaaaacccgccctgcccagtgtactgattttgtgaacattaagaaacagctggaaatgctggccagaatgaaagtcactcactaccgttttgcactggactgggcatcagtgctgcctaccggaaacttgtccgcagtgaatcggcaagcactgcggtactaccgctgcgtcgtctcagaaggactgaagttgggtatctcagcaatggtgaccctgtactaccctacgcatgcacacctcggtctgcctgagccgctgctgcacgcagatggctggctcaatccttccactgcggaggcgtttcaggcatacgcgggactttgctttcaagagctgggagatctggtgaagctctggatcaccatcaatgaacctaatcgcctttctgatatctacaatcgaagcggcaatgacacttacggagccgcccacaacctgctggtggcccatgcacttgcctggcggctgtacgacagacaatttcgcccgtcacagcggggtgcagtgtcacttagcctccatgcagattgggctgagccggccaacccatacgccgactcgcattggcgtgccgcagagaggtttctgcagtttgaaattgcatggttcgccgaaccactcttcaaaactggtgactaccccgcagcaatgcgagagtacattgcctcgaagcaccgacgtgggctcagctcctccgcactgcctaggctgaccgaagcagaacgaaggcttctcaagggaaccgtggatttctgcgcactcaaccattttaccactcgatttgtcatgcatgaacaactggcaggaagccgctacgatagtgatagagacatacagttcctgcaggacattactcgattgtcaagcccaacgagactggcagtgatcccctggggagtgaggaagctcctgcgatgggtccgacgaaactacggggatatggacatctatatcactgcttcagggattgacgatcaggctcttgaagatgatcgtcttagaaagtactacctgggaaagtatctccaggaagtcctgaaggcctacctcatagataaggtgagaattaaggggtactacgcctttaaactcgcagaggaaaaatccaaacctaggttcggcttctttacgtccgatttcaaagcaaagagctcaatccagttttacaataaagtaatttcgtcgcgtggatttccttttgagaactcctcctcgaggtgctcgcagactcaagaaaacactgaatgtaccgtgtgcctttttctggtgcagaagaagcctctgatatttcttggttgctgtttcttctcgactctcgtgctccttctgtcaattgccatttttcaaaggcagaagcggaggaagttctggaaggctaagaacctccaacatattccgctcaaaaagggcaagcgggtcgtgtcg

SEQ ID NO: 250607 - DNA, 3132 bp, synthetic construct
  misc_feature 1..3132: note = Description of Artificial Sequence: Synthetic coding sequence
  source 1..3132: mol_type = other DNA
atgaagccaggttgtgcggcggggagccccgggaatgaatggatttttttctcaacagatgaaataacaacacggtaccgcaataccatgtccaatgggggcctgcagaggtccgtaatactgagcgcattgattctactgagggcggtgactgggttttcaggcgatgggagggccatttggagcaaaaacccgaatttcacgcctgtcaatgaatctcagcttttcctgtatgatacgtttcccaagaacttcttctggggaattggaaccggcgcgctgcaggtagaagggagttggaaaaaggacgggaaagggccatccatatgggatcactttattcatactcacctgaagaacgtcagctctacaaatgggtcgagtgactcctacatcttcttggagaaagatctaagtgcacttgactttataggcgttagcttctaccagttcagtatatcgtggccccggctgttccctgacggaattgttacagtcgcgaatgctaagggactgcaatactactccactcttctcgatgccctcgttctgaggaacatcgagccgatcgttacgctgtaccattgggacctgccactagccttacaggagaaatatgggggctggaagaatgacaccatcatcgatatttttaacgattacgccacatattgcttccagatgtttggcgacagagtcaagtattggattactatccacaacccttatctggtagcatggcatggttacggaaccggtatgcatgccccgggcgagaagggcaacctggccgccgtgtatactgtcggccacaacctcattaaggcacactccaaagtgtggcataattacaacacacacttcagaccgcaccagaaagggtggctgtccattacccttggaagtcactggatcgagcctaacaggagcgagaatacaatggacatcttcaagtgccagcagagcatggtctcggtgctcgggtggtttgccaacccaattcacggggacggcgactaccctgagggcatgcgcaaaaagctatttagcgtgctccctatcttcagcgaagccgagaagcatgagatgcgggggactgccgacttttttgctttttcttttggtccaaataacttcaaacccttgaatacaatggcgaaaatgggacaaaatgtgtcgcttaatcttagagaagccctgaactggataaaacttgagtacaataacccacgtatcttgatagccgagaacggctggttcaccgattcacgggtgaaaactgaggacaccacggcgatttatatgatgaagaacttcctttctcaggtgctgcaagcaatacgactggacgagattagggtctttggctacacagcctggtccctacttgatggttttgaatggcaagacgcctatactatccggagaggcctgttttatgtggatttcaattcaaagcaaaaagagcgtaaaccaaagtccagcgctcattattataagcagataattagagaaaatggtttctctttaaaagagtctacacctgatgtgcagggccagttcccttgcgactttagttggggagtgaccgagtcagtcctgaaaccggagtctgtcgctagcagtcctcagttctcggatccccatttgtacgtgtggaacgctacagggaatcgactgctgcacagggtagagggagtcagactgaagacccggcctgctcagtgtaccgactttgtaaatattaagaaacagctggagatgctcgccaggatgaaggtgacccactacaggtttgcactggactgggcatcagtgctgccgactgggaatctgtctgctgtcaacagacaggctctgcgctattacaggtgcgtggtgagcgaaggactcaaactggggatctccgcgatggtgactctgtattaccccacccacgctcacctgggcctcccagagccgctcctccacgccgatgggtggctcaacccttctaccgcagaggcgtttcaggcgtatgccgggctgtgtttccaggaacttggtgacctcgtgaagctgtggatcaccatcaatgaacccaacaggctgtccgacatctacaaccgttctggtaatgacacatacggagccgctcataatcttttggtggcacatgccctggcttggaggctgtatgacagacagttccggccttcacagcgtggcgcagtgtctctgagtctgcacgccgactgggcagaacccgctaatccgtacgccgatagccactggagagctgctgagcggtttctccagttcgaaatcgcatggttcgcagaacctctattcaaaactggcgactacccagctgcaatgcgcgaatacatcgcatccaagcaccggcgtggcctgagttcctccgccctcccacgactcaccgaagccgagagacgcttactcaagggcacggtggacttttgtgccttgaatcatttcacaaccagattcgtgatgcacgaacagcttgctgggagccggtatgactctgacagagacatacaatttttacaggatatcacgcgtctcagcagtccaacacggttggcagtcattccatggggtgtccggaagcttcttcggtgggtgaggagaaattacggggatatggatatctatataaccgcttcaggcatcgatgatcaagccttggaggacgacagactgcggaaatattatctgggcaagtacctgcaggaagttcttaaggcctatcttatcgacaaggtgaggattaagggatactacgcattcaaattagctgaggagaaatccaaaccgagatttggattctttacaagtgacttcaaggccaagtcttccattcaattttataacaaagtgattagctcaagaggattcccctttgagaactcctcttctcggtgttcccagacacaggagaataccgaatgcaccgtgtgtctctttttggttcagaagaagcccctgatatttctcggttgctgttttttcagtactctcgtgcttctcttgagcatcgccattttccagaggcaaaagagacggaagttctggaaggcaaaaaatctacaacatatccccctgaaaaaagggaaacgggttgtgagc

SEQ ID NO: 250608 - DNA, 3132 bp, synthetic construct
  misc_feature 1..3132: note = Description of Artificial Sequence: Synthetic coding sequence
  source 1..3132: mol_type = other DNA
atgaagcccggttgcgcagcgggttcgcctggaaacgaatggatcttcttctcgactgacgagatcaccacgcgctacagaaacactatgtcaaatggcggtttgcagcgctccgtgattctttcggcacttattcttttgagggcagtgaccggttttagtggagacggacgcgcaatctggtccaaaaaccccaatttcacgccagtgaatgaatcacaactctttctttacgacactttccctaaaaacttcttttggggcatcggaaccggagctctgcaggtggaaggctcctggaagaaggacgggaagggccccagcatttgggatcactttatccatacccatcttaagaacgtgtcgagcactaacggatcatccgattcatacatcttcctggagaaggatttgagcgccctcgacttcattggcgtgtcattttaccagttctccattagctggcctcgcctttttccagacgggatagtgactgtggcaaacgccaaggggcttcaatactacagcaccctgctggacgctctcgtgcttagaaatatcgaacctattgtcaccctttatcactgggatctgccacttgcgctccaggaaaagtacggaggttggaagaatgatactatcattgatatcttcaatgattacgcaacttactgttttcaaatgtttggtgatagagtgaagtactggattactatacataacccctatctggtggcatggcacggatacgggaccggaatgcatgcacccggagaaaagggaaaccttgccgccgtttacactgtgggacataacctgatcaaggcacactcaaaggtgtggcataactacaacacccattttagaccccatcagaaaggttggctcagcataactcttggctcccactggattgagccaaataggtcggagaataccatggacattttcaagtgtcagcagtcaatggtgtccgtgcttggttggtttgccaaccctatccatggcgacggtgattatcctgagggaatgcggaaaaagctgttctcggtgcttccaatcttctccgaagcggaaaaacatgagatgagagggactgccgacttttttgcattcagctttggtccaaacaactttaagcccctcaacaccatggctaaaatggggcaaaacgtgtcgctgaatcttagagaggcgcttaactggattaagctcgaatacaataaccctcggatactcatcgcggaaaacggatggttcaccgattccagagtgaaaactgaagataccactgccatatacatgatgaaaaactttctttcccaggtacttcaagcaatcaggttggatgaaatccgggtctttggatacaccgcctggagcctcctggacggttttgagtggcaagatgcatacactattagacgaggcttgttttatgtagactttaactccaaacaaaaggaacgaaaacctaaatccagcgctcattactacaagcagattatccgtgagaacggtttttccctgaaggaatcgactccagatgtgcaaggccagttcccctgtgatttttcctggggagtgaccgaatcagtccttaaaccagaatcggtggcaagcagcccacaatttagcgacccacacctgtacgtctggaacgccactggcaaccggctgcttcatcgcgtggagggagtcagactcaagacccgtccagctcagtgtaccgatttcgtgaacatcaagaaacaactggaaatgttggcacgcatgaaggtgacccattaccggtttgccctggattgggcatcggttctgccaaccggtaatctgtccgcagtgaacagacaagctcttagatactacagatgtgtggtgtccgaaggtcttaaactcggtatttccgcgatggtgaccctgtactaccctacccacgcacatctgggactgcccgaaccacttcttcacgcagatggctggcttaacccttcaaccgcggaagcatttcaagcatacgcagggttgtgttttcaggagctgggggacctggtgaagctgtggattaccatcaatgaacccaaccggctgtcagacatatacaatcgatccggaaatgatacgtacggcgcggcacacaatcttttggtggcacacgcactggcatggcgactgtacgatcgacagtttcgtccttcgcagagaggagcagtctcgctgagcctgcatgcagattgggccgaaccggcaaacccttacgcagattcacattggcgggcggcggagcgtttcctgcagtttgaaattgcgtggtttgcagaaccacttttcaagacgggggattaccctgccgccatgcgtgagtatatagcaagcaagcatcggagagggctgagcagctcagcacttccccgccttactgaagcagaacgtagacttctcaagggtaccgtggatttctgtgcgctgaatcattttaccactcggttcgtgatgcatgagcaacttgcgggatcgcggtacgatagcgacagggatattcaatttcttcaggatattaccaggctttcttcccctacccgcttggcggtgataccttggggagtgcgcaagctgcttcgttgggtgagaaggaattacggagacatggacatatacattactgcctcaggaatcgatgaccaagccctcgaagatgatcggcttcgcaaatactacctgggtaaataccttcaggaagtgctgaaggcctacctcatcgacaaggtgcgtattaagggatactacgcattcaagctggcggaagagaagagcaagcccagatttggttttttcacttccgactttaaggcaaagagctcgattcagttctacaacaaagtgatctcatcacgtggattcccttttgagaacagctcgtccagatgctcccaaactcaagagaatactgaatgtaccgtgtgtttgtttctcgtgcagaagaagcccctgatatttctgggttgttgctttttctcgacgctggtgctgctgctgtccattgctatctttcagcgccagaagcggagaaagttctggaaagcaaagaatcttcaacacattccactgaagaaaggaaagcgcgtcgtgtcc

SEQ ID NO: 250609 - DNA, 3132 bp, synthetic construct
  misc_feature 1..3132: note = Description of Artificial Sequence: Synthetic coding sequence
  source 1..3132: mol_type = other DNA
atgaagcctggttgcgcagcgggatccccgggaaacgaatggatcttcttctctaccgacgaaataactactcggtaccgcaataccatgtcgaacggtggtttgcagcgtagcgtgatcctcagcgcactgattctcctgcgggccgtcactggcttcagcggcgatggaagagccatctggtccaagaaccctaacttcacccctgtgaatgaatcccagctgttcctgtacgacaccttcccgaagaatttcttctggggaattggtacgggcgcactccaagtggagggaagctggaagaaggacggaaagggaccctcgatttgggaccacttcatccacacccacctcaagaacgtcagctcaaccaatggatcatcggatagctacatctttttggagaaggacctgtcagccctggactttatcggagtctcgttttaccagttctccatctcctggccaaggctctttccggatgggatcgtgaccgtcgcgaatgctaagggcctgcaatactactcgaccctgctggacgccctggtgctgcgcaatatcgagccaatcgtgactctgtaccactgggatcttccactggctctgcaagaaaagtacggaggttggaagaacgacactatcatcgacatcttcaacgactatgctacctactgtttccaaatgtttggggaccgcgtgaagtactggattaccatccacaatccgtacttggtcgcatggcatggatacgggacgggtatgcacgccccgggagaaaagggcaatctggccgctgtttacactgttggccacaacctcatcaaggcacattcgaaggtgtggcataactacaatactcattttagaccccatcagaagggatggctgtcgatcactctcggctcgcactggattgagcctaacaggagcgaaaacaccatggacatcttcaagtgccaacaaagcatggtcagcgtgttgggatggttcgccaatccgatccatggggacggagactaccccgagggtatgagaaagaagctgttctcggtgctgccgatcttttcagaggccgaaaagcacgagatgaggggaaccgcggacttttttgccttctcgttcggacctaacaacttcaagccattgaacaccatggcaaaaatgggccaaaacgtttccctgaacttgagagaggctctcaactggatcaaacttgaatacaacaatccacgcatcctgatcgctgaaaatggctggtttaccgatagcagagtcaaaaccgaggacactactgccatctacatgatgaagaacttcctctcccaggtgctgcaagccatcagactcgatgaaattagagtattcggatacactgcctggagcctgctggacggtttcgaatggcaagacgcctatactattaggcgcggactgttctacgtggacttcaactccaaacaaaaggaacgaaaacctaagtcgagcgcacattactataagcaaatcattcgcgaaaatggattcagcctgaaggagtcaactccagacgtccagggacagtttccttgcgatttcagctggggggtgaccgagtcggtcctcaagccagaatccgtggcgagctcaccacagttttcagaccctcacctgtacgtgtggaacgcgaccgggaaccgcctcctgcacagggtggaaggggtgcggctcaagaccagaccagcccagtgcaccgacttcgtcaacatcaagaagcaattggagatgcttgcgcggatgaaagtcacccactaccgctttgcactggattgggctagcgtgctccccacgggcaatctgtctgcggtgaatcggcaggcgctccgctactacagatgtgtggtatcagaaggcctcaagctgggaatctccgccatggtgaccctgtactaccctactcatgcacatttgggcctgccggagccacttctccacgcagatggatggctcaatccctcaactgccgaggccttccaggcctacgcgggcctttgcttccaggagctgggtgaccttgtcaagctgtggatcactatcaacgagcctaatcgccttagcgatatctataaccggtcgggtaacgacacctacggagcggcgcacaatctgctcgtggcgcatgccctcgcgtggcggctctacgatcggcagttccgcccgtcccagcggggcgccgtgagtctgtctctgcacgccgactgggcagaaccggcaaacccgtacgccgacagtcactggcgggccgcagaacgcttcctgcaattcgaaatcgcctggtttgcggaaccattgtttaagaccggagattacccagccgctatgcgggagtacattgcgtctaagcatagacggggactctcgtcctcagctctccctcgccttaccgaagccgaacgacggctgctcaaaggcacggtggacttctgcgccctgaaccattttacgacccgattcgtgatgcatgagcaacttgccggatcaaggtacgattcggatcgggacatccagtttctccaggatatcaccagactcagctcaccgacgcgccttgccgtcatcccgtggggcgtgcgcaaattgctccgctgggttaggcgtaactacggtgacatggatatctacatcacggccagcggaatagacgatcaggcgctggaggacgatcgcctgcggaagtactacctgggaaagtatctgcaggaggtcctgaaagcgtacttgatcgataaggtccgcatcaagggttattacgcattcaagctggccgaagaaaaaagtaagccacgcttcggattctttacgagcgatttcaaggcaaagtcatcgattcagttttacaacaaagtgattagttcgaggggattcccgttcgaaaattcttcttcacgctgcagccagactcaagaaaacaccgagtgtactgtctgcttgttcctcgtgcagaaaaaacccctgattttcttgggatgttgcttcttttcaactctcgtgctgctcctctcgatagccatcttccagcggcagaaacggagaaagttctggaaagcaaagaatctccagcacatcccgctgaaaaaaggaaaacgggtggtcagc

SEQ ID NO: 250610 - DNA, 3132 bp, synthetic construct
  misc_feature 1..3132: note = Description of Artificial Sequence: Synthetic coding sequence
  source 1..3132: mol_type = other DNA
atgaaacctggctgcgctgcaggtagtcccggaaatgagtggatattcttttctactgacgagattacaacgagatacagaaacacaatgtcaaacggtggtttacaaagatccgtgattttatccgcactgatactcctgcgggcagtcacagggttcagcggggacgggagagctatctggagtaaaaatccaaactttacacccgtcaacgaaagtcaactcttcctttatgatactttccctaagaacttcttttggggaatcgggacaggggccctgcaggtcgaagggtcctggaaaaaagatggcaaagggccttcaatttgggatcatttcatccacacacatctgaagaacgtgagtagtactaacgggtcgtccgatagctacatctttttggagaaggacttgtccgccctcgatttcatcggcgtgagtttctaccagtttagtatctcttggccaagattattccccgacggcattgtgacggtggcaaacgcgaaaggcctgcaatactactccacattgcttgatgccttggttttgagaaacattgagccaatcgtgacgttataccattgggatttaccacttgctctgcaggagaaatacggaggttggaagaatgacactatcatagatatctttaacgactatgcaacttactgtttccagatgttcggtgatagggtaaagtattggattaccatacacaacccatacttagttgcctggcacggctacggcaccgggatgcacgcccccggcgagaagggaaatttagccgccgtttatacagtgggtcacaacctcattaaggctcattctaaggtgtggcacaactataatacacatttcaggccacaccaaaagggatggttatccatcacattgggctcacattggatcgagcctaataggagcgaaaacacaatggatatttttaagtgccagcagagcatggtaagtgtcctgggctggtttgctaaccctattcatggcgatggcgactatcccgaggggatgagaaagaagcttttcagcgtgttacccatcttcagtgaagctgagaaacatgaaatgcgagggaccgctgatttcttcgctttttcattcggccccaacaactttaaacctctcaacacaatggccaagatgggacagaatgtgtctctgaacctgcgtgaagccttgaactggatcaagctggaatacaacaatccaagaattcttatcgccgaaaacggatggttcacagattctcgagtcaaaacagaagatacgactgccatatatatgatgaaaaacttcctaagtcaggtgctgcaagccattagactggatgaaataagggtttttggatacacagcgtggagcctcttggatggtttcgaatggcaggacgcttatacgatccgaaggggactgttctatgtggatttcaattctaagcaaaaggagcgaaagccaaaaagttccgcccactactacaagcagattatccgtgaaaacgggttttctctgaaggagtccactcctgatgtgcagggccagttcccttgcgacttcagctggggagttactgagtcagtgctgaaacctgaaagtgtggctagtagccctcagttttcagacccccatctgtatgtgtggaatgccactggcaacaggctattgcatagggtggaaggtgtaaggctgaaaaccaggcccgcgcagtgcacagatttcgttaatattaagaaacagctggagatgctcgcaaggatgaaggtaacacactaccgttttgccctcgactgggccagcgtactgccaaccggcaatctctcagcagtgaataggcaagcgctgcgatattaccgatgtgtcgtgtcagaagggctcaaactgggaatcagtgccatggtgactctgtactatcctacgcacgctcaccttggactgcctgagccgctgctgcacgcagacgggtggctgaatccgagtactgctgaggcatttcaagcctatgccggcctgtgctttcaagaattaggcgatctggtaaaattatggatcaccatcaacgagcccaatagactaagtgatatctacaaccgctccggaaatgatacctatggcgcggctcacaatcttctagtcgcccatgctctagcttggagactttacgacaggcagttcagaccaagccaacgaggggcagtcagcctttcccttcacgccgactgggccgagcctgctaacccatatgccgactctcattggcgagcagccgagaggttccttcagttcgaaattgcctggttcgctgagcctctgttcaagaccggtgactatccggccgccatgcgagagtacatagcaagtaaacatcgacgaggcctttcatctagcgccctgccgagattgacagaggctgaacggagactactgaaagggacagtcgatttttgtgccctcaatcactttacaacacgtttcgtcatgcacgaacagctcgccggaagccgatatgacagtgaccgagatatccagttccttcaagacattacccgattatcttcacccacacgactggcggtgatcccatggggcgttcgaaagctcctgcgatgggtgcgcaggaactacggagacatggacatctacataacggcgtccggcatagatgaccaggcactcgaggacgatcgcctcagaaagtattacctaggcaaatatcttcaggaagtgctgaaggcatatctgatcgataaggtgagaatcaagggctattatgcctttaaattggcggaggaaaagagcaagccccgattcggcttctttaccagcgactttaaggccaaaagtagtattcagttctacaataaggtgatatccagtagagggttcccctttgagaattctagcagccggtgctctcagacccaggagaacaccgaatgcaccgtgtgcctatttctggtccagaagaagccactgatttttctcggttgctgtttttttagtaccctggtcctactgctcagcattgccatctttcaacggcagaagaggcgcaagttctggaaggccaaaaacctccaacacattccattgaagaaagggaaaagagtcgttagc

SEQ ID NO: 250611 - DNA, 3132 bp, synthetic construct
  misc_feature 1..3132: note = Description of Artificial Sequence: Synthetic coding sequence
  source 1..3132: mol_type = other DNA
atgaaacctggatgtgctgcaggaagtcccggcaatgagtggatctttttcagtactgacgagatcacaactcgatatcgaaacacgatgtctaatggaggcctgcaaagatcagtgatcctttccgccctaatcctgctcagggccgtgacgggcttcagcggggacggacgagcgatatggagtaagaatcctaactttactccggtgaacgagagtcagcttttcctgtacgacacctttccaaaaaactttttctggggaattggaacaggggcattacaggttgaagggtcttggaaaaaggatggcaaggggcccagcatctgggaccatttcatacatacgcatctgaagaatgttagctctacaaacggctcctcagacagctacatcttcctggagaaagacctaagcgctctggacttcataggcgtgagtttttatcagttcagtattagttggcctcgtctgtttccagacggaatcgtgactgtggccaacgcgaaaggtctccaatactactctactttgctggatgcccttgtgctgcgcaacatagagccgatcgttacactctatcactgggaccttcccctggccctccaggagaaatacgggggttggaagaatgacacaatcatcgacatcttcaatgattatgccacctattgctttcaaatgttcggggatcgggtcaagtattggattacaatccacaacccttacctggtagcatggcacgggtacggtaccgggatgcacgctcccggtgagaagggcaatctcgccgcagtctacaccgtaggacacaatctaattaaggcgcactctaaagtttggcacaattacaacacacatttccggccccatcaaaaagggtggctgtctattacgctcggatcacactggattgagccgaataggtctgaaaatactatggacattttcaagtgccagcagtctatggtgtccgtgttgggatggttcgcgaatccaatccatggggatggggattatcccgaagggatgcgcaaaaaactgtttagtgtcttgccaatcttctccgaggccgagaaacatgaaatgagaggaacagcagactttttcgccttttcatttggacccaacaatttcaaaccccttaataccatggctaagatgggacagaatgtgtccctgaacctaagagaggctttgaactggataaagctggaatataataatccgcggatactcattgccgaaaacggttggttcaccgactccagagtgaagactgaagacactaccgcgatctacatgatgaagaactttttaagtcaggttctgcaagcgatcagattagacgagatccgtgtgttcggatatactgcttggagtctgctggatggcttcgaatggcaagacgcttacaccattcgccgcgggttgttctatgtggattttaacagcaagcagaaggagcgtaaacccaagagttctgcccactactacaaacaaatcattagagaaaacgggtttagcttgaaggagtctaccccggacgttcagggccaatttccttgtgacttctcatggggggttaccgaatcggtgctgaagcccgagagcgtggcaagttccccacaattctctgatccccatctgtacgtgtggaacgccacgggcaataggctgctgcatcgcgtcgagggtgtcagattgaagactcggccagcccagtgtactgattttgttaatatcaagaaacaactcgaaatgttagcacggatgaaggttacccattatcgctttgcgctcgactgggccagcgtgctaccaaccggaaatctgtccgccgtgaatagacaagcgctgcgctattatagatgcgtcgtatctgaagggctcaaactcgggatttccgcgatggtcacactatactatcccactcatgcccatctagggttgccagagccacttctgcacgcagatggatggctgaatccaagtacagccgaggcgtttcaggcctacgcggggttatgctttcaggagctgggcgacttggtaaagctgtggatcactatcaacgagcccaatagactgagcgatatatataacagaagtggcaacgacacgtacggggcggcgcacaatctgttagtggcccatgctctggcttggcgcttgtatgaccgacagttcaggccctcccagcgcggtgccgtctccctttctctgcacgccgattgggctgagcccgctaatccctatgcggactcacactggagagctgccgagcgatttcttcagtttgagatcgcctggtttgctgagccgctgttcaaaaccggcgactatcctgccgccatgcgcgaatatatagcatctaagcaccggcgcggcctgtcttcaagcgcccttccccgcctcaccgaagcagaaagaagattgctgaaggggaccgtggatttttgtgctttgaaccactttactaccagatttgttatgcacgagcagctggcaggaagtcgctatgattctgatagggatatccagttcttgcaggatattactcgtttgagtagtccgacgcggctagcagtgatcccttggggagttcggaagctgttgaggtgggtgcggcggaattacggagacatggacatttacattaccgcctccgggatcgacgatcaggcccttgaagacgatagattgcggaagtactatctggggaaatatctccaagaagttttaaaagcctatctaattgacaaggtgagaatcaaaggatactacgcctttaagcttgccgaggagaagagcaagcctcgatttggcttttttaccagcgacttcaaagccaaatcctcaatccagttctataataaagtcatatcttctaggggcttccctttcgagaacagttctagtagatgttcccagacccaggaaaacaccgagtgtacagtatgcctgttcctcgtgcaaaaaaaaccccttatctttctcggttgttgtttcttttccactctagtacttctcttgtccatcgccatattccaacggcagaagcgtagaaaattctggaaagctaagaatttgcagcacatccctctcaagaagggaaaaagggtggtgtct

SEQ ID NO: 250612 - DNA, 3132 bp, synthetic construct
  misc_feature 1..3132: note = Description of Artificial Sequence: Synthetic coding sequence
  source 1..3132: mol_type = other DNA
atgaagcctgggtgtgccgccggctcccccggtaacgagtggatctttttctctaccgatgaaataaccactcgctacagaaacactatgtcgaacgggggactgcagcggagcgttattcttagcgccctgattctgctgcgcgccgtcactggattctcgggagatggcagggcaatatggtcgaagaatccaaatttcaccccagtgaacgaatcacagctgttcttgtacgatactttccccaagaatttcttttggggcatcggtaccggtgcactgcaagtggaaggatcgtggaaaaaggacggtaaagggccttccatatgggatcacttcatccacactcatctcaagaacgtgtcgagcactaacggttcgtcagattcgtacatattccttgaaaaggacctgtcggctttggatttcataggagtgtcgttttatcaatttagcatttcctggccgcggctgtttccagacggtattgtgactgtcgcaaatgcaaaggggctgcagtattactcgaccctgttggacgccctggtgctgcggaatatcgaaccaatcgtgacgctctatcactgggaccttcctctggcattgcaagagaagtacgggggctggaagaatgataccattatcgatatctttaacgattacgcaacctactgttttcagatgttcggggatagagtcaagtattggattactatccataatccctacctcgtggcctggcacggatacggaaccggcatgcatgcaccaggagaaaaaggtaaccttgcagcagtctacactgtcggacataacctgattaaagcccactccaaagtgtggcataactacaacactcattttcgccctcaccagaagggttggttgtcaattacgctgggcagccattggattgaacctaaccggtccgaaaacactatggatatcttcaagtgtcaacaatcaatggtgtcggtcctgggatggtttgcaaatccaatacatggcgacggagactatccggagggtatgcgtaagaagctgttttcagtgctgcctattttcagcgaagcggagaagcatgaaatgagaggtaccgcagactttttcgcattcagctttggacctaataactttaagccgctcaacactatggcgaagatgggacaaaacgtgtcgcttaatctccgtgaagccctcaattggattaaactcgagtacaacaaccctcgaatcctgattgcggaaaatggatggtttaccgattcgcgggtcaagaccgaagatacgactgccatatacatgatgaaaaacttcctgtcccaagtgctgcaggccattcgtcttgatgagatacgggtgttcggttatacggcctggagcttgctcgatggatttgaatggcaggatgcatacaccatacgtcgcgggctgttctacgtggatttcaatagcaagcagaaggagcgtaagccaaagtcgtccgcacactactacaaacagattatcagggaaaatggattttctctgaaggagtccacgccagatgttcaaggccagttcccatgcgacttctcgtggggagtgacggaaagcgtgctgaaacctgaatcagtggcatcgtcaccccagttcagcgacccacatctgtacgtctggaatgctaccggtaacagacttttgcatcgtgtcgaaggagtcagactcaaaactcgacccgcacagtgcaccgacttcgtgaacattaagaagcaactcgagatgcttgcgaggatgaaggtgactcattaccggtttgcacttgattgggcatcagtcctccccaccggtaaccttagcgcagtgaaccgccaggcacttcgatactaccgatgtgtcgtgtctgaggggcttaagctgggaatttcggcaatggtgaccttgtattaccctacccatgcccatcttggactgcccgagcctctccttcatgcagacggttggctcaacccttcaaccgcagaagcattccaagcgtacgcagggctctgttttcaagagctcggtgatcttgttaagctgtggatcactatcaacgaacccaataggttgtcggacatttacaacagatcaggaaacgacacctacggagctgcacacaacctgcttgtggcacacgcactggcatggaggctgtacgacagacagtttcgtcctagccaacggggagcagtttcgttgtcgctgcatgctgattgggcagaacccgccaacccttacgcggattcgcactggagagcggctgaaagatttttgcaattcgaaatcgcatggtttgctgaaccccttttcaaaacgggagactaccccgccgccatgcgggagtacatcgcaagcaagcatcgccggggcctcagctcatcggcgcttccaagactgactgaagctgagcgacgcctgctgaagggaactgtcgacttttgtgccctcaatcacttcaccactcgtttcgtcatgcatgagcaactggccggcagccgctacgattccgatagggacatccagtttctgcaagatatcactaggctgagctcacccacccgcctggccgtgatcccctggggcgtgagaaaacttcttaggtgggtgagaaggaattacggggatatggatatctacataaccgcctctggaatcgacgatcaggcactcgaggatgataggctgagaaaatactacctcggtaaataccttcaagaagtgcttaaggcgtaccttatcgacaaggtccgcataaaaggatactacgcatttaagctggcggaagagaagtcgaagccgagatttggcttctttacttcagactttaaagcaaaaagctcgatccaattctacaacaaggtgatctcgtcgaggggatttccttttgaaaattcctcgtcgcgatgctcccaaactcaagaaaacaccgaatgtaccgtgtgtcttttcctcgtgcagaaaaagccgttgatttttctcggatgctgcttctttagcaccctggtgctcctcctgtccattgcgatttttcaaaggcagaaacgccggaagttttggaaggccaaaaaccttcaacacattccactcaagaaggggaagcgggtggtgagc

SEQ ID NO: 250613 - DNA, 3132 bp, synthetic construct
  misc_feature 1..3132: note = Description of Artificial Sequence: Synthetic coding sequence
  source 1..3132: mol_type = other DNA
atgaagccaggatgtgcagccggaagccccggcaatgaatggatctttttcagcactgatgaaattactacccgataccgcaacaccatgagcaacggaggattgcaacgttcggtgattctttcggcgctcatattgctgcgagcagttacgggtttttcaggggatggtagggcaatttggtcgaaaaacccgaatttcacgcctgttaacgagagccagctctttctgtacgacacctttcctaaaaactttttctggggaatcggaaccggcgcattgcaggtggaaggatcgtggaaaaaggatggtaaggggccttcgatttgggatcactttatccatacccacctgaagaacgtaagctccacgaatggctcgtccgacagctacatttttctggaaaaagatctgtccgcacttgacttcataggtgtgagcttctatcaatttagtatttcgtggccgcgcctgttccccgacggaattgtgacggtcgcaaatgcaaagggcctgcaatactattcaactcttctcgatgcactggttctccgaaacattgagccaattgtcactctgtaccactgggatctgccattggccctccaagaaaagtatggaggatggaagaacgatacgatcatagacatctttaacgattacgccacctactgtttccagatgtttggagatagagtcaagtactggatcactatacacaacccctacctcgtggcatggcatggatacggaaccggcatgcacgcacccggcgagaagggtaacctcgctgctgtatacaccgtgggacacaatctgattaaagcgcactccaaagtgtggcacaactacaatactcattttcgcccccatcagaagggatggctgtctattactctgggttcccattggatagagccaaatcggtccgagaataccatggacatctttaagtgccagcagtcaatggtatcggtgctgggttggttcgctaaccctattcatggtgatggtgactaccctgaggggatgaggaaaaaacttttttcggtgcttcccattttctcggaagccgaaaaacatgaaatgcgtggtactgcggatttcttcgccttctcctttggtccaaacaactttaagcctctgaatactatggcaaagatggggcagaatgtgtcattgaatctccgggaggccctgaattggataaaactggaatacaataaccctcggattttgatagcagaaaatggttggtttactgatagccgagtaaagacggaggataccaccgccatttacatgatgaagaactttctcagccaggtccttcaggccatacgcctcgatgagatcagggtgttcggctacacggcatggtcgcttcttgatggatttgaatggcaagacgcgtacaccattcgcagaggactgttttacgtcgacttcaactccaagcagaaggagagaaaacctaagagctcggcacactactataagcagatcatcagagaaaacggtttctcccttaaggaatcgacccccgatgtccagggccaatttccttgtgatttctcatggggcgtgactgagagtgtcctgaaaccagaatcagtggcatcttcgccgcaattctccgatccccatctgtacgtgtggaacgctaccggaaacagactgctgcatcgtgtggaaggagtgaggctcaagacccggcccgcacaatgcactgactttgtgaacatcaagaagcaactggagatgttggcccgaatgaaagtgactcattaccggtttgcacttgactgggcgtcggtgctgccaaccggaaacctttccgcagtgaacagacaagcacttaggtattaccgatgtgttgtgtctgaaggtctgaagctggggattagcgcgatggtgaccctctactacccaacgcatgcccatcttgggcttccagagcctctcctgcatgccgatggttggcttaacccttcgaccgcagaagcatttcaagcgtacgctggtctgtgttttcaggaactcggagacttggtcaaactgtggattactatcaacgagcctaacaggctgtcagatatctacaaccgtagcggtaacgatacttacggcgctgcccacaatctgttggtcgctcatgctctcgcatggagactttacgatagacaatttcgcccaagccaacgtggggcagtgtccctctcactccatgccgattgggcagaacctgctaatccttacgcagactcacactggagagctgcagagcggtttcttcagttcgaaatcgcctggttcgcagaacccctctttaagactggtgattacccggcagcaatgcgtgaatacatcgcatccaagcatcgccgaggactgtcgagctcggcgcttccgcgtcttactgaagcggaacgcagacttctgaagggtacggttgatttctgcgcgcttaaccattttaccaccagattcgtgatgcatgagcagctggctgggagtagatacgactccgatcgggatattcagtttctgcaagacattactcgcctctcgtccccaactcgacttgctgtcatcccttggggagtgagaaaacttctcaggtgggtgcggcggaactatggtgatatggacatatacattaccgcatccggaatcgacgaccaagcactcgaagatgatcggcttagaaaatactacctgggcaagtacctgcaagaggtcctgaaagcgtaccttattgataaggtgagaataaagggctactacgcattcaagctcgccgaagaaaagtcgaagccaaggttcgggttctttaccagcgactttaaggcaaagtcgtcaattcagttctacaacaaggtcatttccagccgaggatttccgtttgaaaattcgtcctccagatgttcgcaaacccaagagaataccgaatgcactgtgtgtctgtttctcgtccagaagaagccgctcatctttcttggctgttgcttcttttcaacccttgtcctcttgctgtcaatcgcaatctttcaacgccaaaaacgccggaagttttggaaggcaaaaaaccttcagcacatcccccttaagaagggaaagcgcgtggtgtcg

SEQ ID NO: 250614 - DNA, 3132 bp, synthetic construct
  misc_feature 1..3132: note = Description of Artificial Sequence: Synthetic coding sequence
  source 1..3132: mol_type = other DNA
atgaaacccggatgcgcagcaggttcgccagggaatgagtggatttttttctcgacagatgagattacaacgcgctaccgcaatacgatgagcaatggcgggctccaacgttctgtgattctctcagcactcatcctccttcgtgcagttacaggattctcgggcgacggccgtgccatatggtctaagaacccgaattttacaccagtcaatgaaagccagttgttcctatatgatacattccccaagaacttcttttgggggattgggacaggagcccttcaagttgagggctcgtggaagaaggatggcaagggaccctctatatgggatcattttattcatactcacttgaaaaacgtctcatctactaacggtagttcggacagttacatatttctcgagaaagatctttcagcgctcgattttattggagtgagcttctaccagttcagtatctcgtggcctcggctctttcccgatgggatcgtaacggtagccaatgctaaaggcttgcagtattactccactcttttagacgcactcgtattgcggaacattgagcctatcgtgaccctctaccattgggatttgcctctggcattacaagagaagtatggcggctggaaaaacgataccatcattgatatcttcaacgattacgcgacctactgttttcagatgttcggcgacagagtcaagtactggatcacgattcacaatccctatctcgttgcttggcatgggtacggcactgggatgcacgctcctggtgaaaagggtaatctcgctgctgtgtacacggtgggccacaaccttatcaaggctcactcgaaggtctggcataactataacacacacttccggcctcatcagaaaggttggttgtcaattactctcggcagccactggatcgagccgaaccgctccgaaaacactatggatattttcaaatgccaacaatcaatggtatctgtgcttggctggttcgctaaccccattcacggcgatggtgactatcctgaaggaatgaggaagaagttgttttccgtattgccgatcttctccgaagcagaaaaacatgagatgcgcggaaccgctgacttcttcgctttcagttttggccccaacaacttcaaaccccttaacaccatggcgaagatgggccagaacgtctccctaaacttgcgagaagccctgaactggatcaagttagagtataataatcctagaattttgatcgcagaaaatggttggtttactgattcccgtgttaagacagaagatacgactgcgatatatatgatgaaaaactttcttagccaggtattgcaagcgatccgactcgatgagattcgggtattcggatacactgcatggagccttctggacggctttgagtggcaggacgcttatacaattcgacgcggacttttctatgtggactttaactccaagcagaaggaaaggaagcccaagtcatccgctcactattacaaacagatcattagggagaacggcttctccctgaaggagtcgactcccgatgtccaaggtcaatttccctgtgatttctcatggggagtgaccgaatccgtcttgaagccagagtccgtggccagcagccctcagttctcggacccacacctgtacgtctggaatgctacgggtaaccgtctcctccatagagtcgaaggcgttcgattgaaaacccgaccggctcagtgcaccgacttcgtaaacatcaagaagcaactagagatgctagccagaatgaaagtaacgcattatcggttcgctttggattgggcaagtgtccttccgaccggaaacttgtctgctgttaatcggcaagctctacgttactaccgatgtgttgtttctgaaggtcttaagctcggcatcagcgcgatggttaccttgtactatcctactcacgcacatctcgggcttccggaacctctgttgcatgcagatggctggctgaatccttctactgcggaggcgttccaggcttacgcaggcctttgttttcaagagctcggggatctcgtaaagttgtggattacaatcaacgagccaaacagattgtcagatatttataatcggtcgggcaatgatacctacggtgccgcacataatttattggtcgcccacgctcttgcctggcgattatacgaccgccaattccgtcccagtcagcgcggtgctgtctctctgagcttacacgccgattgggccgagcctgccaacccttatgccgatagccattggcgggccgctgaaagattcttgcagttcgaaattgcctggttcgcagaaccgttattcaaaaccggagattatccggccgcaatgcgggagtatatcgccagcaagcatcggcgagggctgtcgagctcagcgctgccacggcttaccgaagctgaacggcggctgctgaagggtaccgttgacttctgcgcacttaatcattttacaactcgttttgtcatgcacgagcaacttgcaggtagtcgatatgatagcgatagggatatccaatttttacaggatatcacccgcctgtcctcgcccactagacttgcagtcatcccatggggggtgagaaagttgcttcgctgggttcgacgtaactatggtgacatggatatatacattacggccagtggtatcgacgaccaggcgctggaagatgatcgcctcaggaagtactacctcggaaagtatctccaagaggtgctgaaggcatatctcattgacaaagtgaggatcaaggggtattacgcctttaagctcgccgaagagaaaagcaagcctagattcggttttttcacgtctgactttaaggctaagagctccattcagttctacaataaggtcatttcctctcgtgggttcccgtttgaaaacagcagcagtcgttgtagtcagactcaagagaacactgaatgcacagtttgtctctttttagtccagaaaaagccactaatatttctaggttgctgcttctttagcacgcttgtcttattgctctcgatcgctatcttccagcgacaaaagcgtcgcaagttctggaaggcgaaaaacttacaacatattccgttaaagaagggcaaacgggtggtaagt

SEQ ID NO: 250615 - DNA, 3132 bp, synthetic construct
  misc_feature 1..3132: note = Description of Artificial Sequence: Synthetic coding sequence
  source 1..3132: mol_type = other DNA
atgaaaccgggctgcgcagcaggaagcccgggaaacgaatggatctttttctctaccgatgagatcaccaccaggtaccgcaacaccatgagcaacgggggtctgcaacggtccgtgattctgtccgcgctgatcctgctcagggcggtgacggggttctcgggagacgggcgcgcgatctggtcgaaaaacccgaacttcactccagtcaacgaaagccaactgttcctgtacgacaccttccctaagaacttcttctgggggatcggaactggagccctgcaagtcgaaggatcgtggaagaaggacggaaaagggccgtccatctgggaccatttcattcacactcatctgaagaacgtgtcgtccaccaacggatcgtccgattcatatatcttcctggagaaggatctctcagccctcgactttatcggcgtgtcgttttaccaattctcaatcagctggccgcggctgtttccggacggaatcgtgactgtggcgaacgccaagggcctgcagtactactcaacccttctggatgctctggtgctgcggaacattgaacctatagtcaccctctaccattgggacctccctttggctctgcaggagaagtacggaggatggaaaaacgataccatcatcgatatctttaacgactacgcgacgtactgctttcagatgtttggggatcgggtgaaatactggatcaccattcacaacccttacctggtggcctggcacggctacggcactggaatgcatgctcctggagagaagggaaacctggcagctgtgtacaccgtgggccacaatctgatcaaagctcactcgaaggtgtggcacaactacaatactcacttcagaccccaccaaaaggggtggttgtccatcaccctgggctcgcattggatcgaaccgaaccggtccgagaatactatggatatcttcaaatgtcaacaaagcatggtgtccgtgctcggctggtttgcaaatcccatccatggagacggtgattaccccgaagggatgcgcaagaagctgttttcggtgctgccgatcttctcggaggcggagaagcatgaaatgcggggtactgccgacttctttgccttttcattcgggccgaacaatttcaaaccgctgaacactatggctaagatgggtcaaaacgtgtccctgaacctgagggaagctctcaactggatcaagctcgaatacaataatccgcgcatcctgatcgccgaaaatggctggttcaccgactcacgagtgaaaactgaagataccaccgccatctacatgatgaagaatttcctctcccaggtgctgcaggctatcagacttgatgaaatccgggtgttcggctacactgcatggagcctgctcgacggattcgagtggcaagacgcgtacaccatccgcagaggacttttctacgtcgacttcaacagcaagcagaaagaaaggaagccaaagtcctcggcgcactactacaaacagattatccgggaaaacggattctcactcaaagaatcgactccggatgtgcaaggacagttcccgtgcgatttctcctggggagtcactgaaagcgtgcttaagcctgagtccgtggcttcctccccacagttctcggatccgcacctgtacgtgtggaacgcaactggtaacagactgcttcatagagtggaaggagtgcggctcaagacccgcccagcccagtgcacggattttgtcaatatcaagaagcaactggaaatgctcgcaaggatgaaggtgacccactacaggttcgccctggattgggccagcgtcctccccactggaaacctctctgccgtgaaccgacaggcactccgctactaccgctgcgtggtgtcagaaggactgaaactgggcatctccgcgatggtgactctctactaccctactcatgcccatcttggtctgccagagccattgctgcacgccgatgggtggcttaatccctcaaccgccgaggccttccaggcttatgccggcctctgcttccaggagctcggggatctggtgaagctgtggattacgatcaacgagccaaatagactctcggacatctacaaccgctccggcaatgacacctacggggccgcgcacaatttgctggtcgcccacgctctcgcctggcggctctacgatcgccaattccgcccttcgcagagaggtgcggtttcactgtcattgcatgcagattgggcagagccggcaaacccgtatgcggactcccattggcgcgctgccgaacgctttctccagtttgagatcgcctggttcgcggaaccgctgttcaagaccggggactatccggcagctatgcgggagtacatcgcatcgaagcatcggcgcgggctttcctcgagcgcgctgcctaggctcactgaggcagagcggaggctcctgaagggtactgtggacttctgtgcgttgaaccacttcactaccagattcgtcatgcacgaacaattggcggggtcacggtacgactccgatagagatatccaattccttcaggacatcacccggctcagctcgccgactcggctcgcagtcattccttggggggtccgcaagctgctgaggtgggtccgcagaaactacggagacatggacatctacatcactgcttcaggcatcgacgaccaggcactggaagatgatcggctgaggaagtactacttggggaagtaccttcaggaggtgctgaaagcctacctgatcgacaaggtgcgcattaagggttactacgctttcaagctggcggaggagaagtcgaagcctagattcggtttctttacctcagatttcaaggcgaaatccagcatccagttctacaacaaagtgatcagctccagggggttcccgtttgagaattcatcatcccggtgcagccaaactcaggaaaacactgaatgcacggtgtgcctgttccttgtgcaaaagaaaccgctgattttcctgggatgctgcttcttctcaactctggtgttgctgctgtcgattgcaatcttccaacggcagaagcgccggaagttctggaaagccaagaacctgcaacatatccctctcaagaagggaaaacgcgtggtgtct

SEQ ID NO: 250616 - DNA, 3132 bp, synthetic construct
  misc_feature 1..3132: note = Description of Artificial Sequence: Synthetic coding sequence
  source 1..3132: mol_type = other DNA
atgaaaccgggttgtgcagcgggctcgcccggcaatgagtggatcttcttcagtacggacgaaattactacccgctatcggaataccatgagcaatggagggctgcagagatccgtgatcttgagcgccctcatcctgctccgggctgtcaccggattctcgggcgacggaagggccatctggtccaagaaccctaacttcaccccggtaaacgagtcacaattgttcctgtacgacacgtttccgaaaaacttcttctggggaatcggcaccggagcgttgcaggtcgagggttcgtggaagaaagatgggaaggggccgtccatctgggaccacttcattcacactcatctcaagaacgtctcgtcgacgaacggttccagcgacagctacatcttcctggaaaaggacctgtcggcactggacttcatcggcgtctctttctaccagttctccatcagctggccaaggctcttccctgacggaatcgtgaccgtggcaaacgcaaagggactgcaatactactcgaccctcctggatgccctggtactccgcaacattgaaccaatcgtcaccctgtaccactgggatctcccactcgcgctgcaggagaagtacgggggatggaagaacgatacgattatcgatatcttcaacgactacgctacttattgtttccagatgtttggggacagagtgaagtattggattactatccacaacccttacctcgtcgcatggcatggctacggcacgggcatgcatgctcccggcgagaagggtaacctcgcagctgtctacactgtcgggcataacctgatcaaggcgcacagcaaagtgtggcataactacaacacccacttcagaccacaccaaaaaggctggctgtccataacgctgggatcgcactggatagagccgaacagatctgagaacaccatggatatcttcaaatgccagcagtcgatggtgtccgtgttgggctggtttgcaaatccgatccacggagatggcgattacccggagggaatgagaaagaagctgttcagcgtgctcccgatcttctcggaagccgaaaaacacgaaatgcgcggcactgccgactttttcgcattttcattcggaccaaataacttcaagccgctgaataccatggccaagatgggtcaaaatgtgtcgctgaaccttcgggaggccctgaactggatcaaactggaatacaacaacccaagaatcctgatcgcggagaacggctggtttaccgactcgagagtcaagacggaggacactactgctatctacatgatgaagaatttcttgtcgcaggtgctgcaagcgatccgcctggacgaaatcagagtgttcggatacactgcttggtcgttgctggatggattcgaatggcaagatgcctacactattcgccgggggctcttctatgtggatttcaattccaagcagaaagaaagaaagccaaaatcctccgcacactactacaagcaaatcatcagggagaacgggttcagcctgaaggagtccaccccagacgtgcagggacagttcccgtgcgatttctcatggggagtgactgagtcggttcttaagcctgagtcggtggcttcctcaccgcagttttcagaccctcacttgtacgtctggaatgccaccgggaatcggctgctgcatagagtcgaaggtgtccgtctgaaaacccggccggcccagtgtactgactttgttaacatcaagaaacaactggaaatgctggcccgaatgaaggtcacccactaccgattcgccctggattgggcttcggtgctcccaactgggaatctctcagctgtgaaccgccaggccctccgctactaccgctgcgttgtgtccgagggactgaagttgggcatctccgctatggtgactctgtactacccgactcacgcacatttgggactgccagagccgctgctgcacgccgacggttggctgaacccctcgaccgctgaagcattccaggcatacgcgggactgtgttttcaagaactcggggacctcgtgaagctgtggatcactatcaatgagccgaaccgcctctccgacatctacaaccggtcgggaaatgatacttacggtgccgcgcataacttgttggtggcgcacgccctggcgtggagactgtatgatcgccagtttagaccgtctcagcggggagccgtgtccctgtcactccatgccgactgggcagagcccgcgaacccatacgccgactcccattggcgcgccgccgagagattcctgcaattcgaaatcgcgtggttcgccgaaccgctcttcaagaccggagactaccccgccgccatgcgggaatacatcgcctcgaagcatcggcgcggactctcatcgtcggccctgccaagattgaccgaggcggaacggagactgcttaaaggtaccgtcgatttttgtgccctgaatcacttcactactcggttcgtgatgcacgagcagcttgcaggatcgagatacgattccgacagagatattcagtttctgcaggatatcacgcgcttgtcctctcccacccgcctcgcggtgatcccgtggggagtcaggaagctgctgagatgggtgagacgtaattacggagatatggacatttacataacggcctcaggaattgatgaccaggcgcttgaagatgataggcttcggaagtactacctgggaaaatacctgcaagaagtgcttaaggcgtacctgattgacaaagtgcggatcaaggggtactatgcctttaaacttgcggaagaaaagagcaagcctcggttcgggtttttcacgagcgacttcaaagcaaagtcatccatccagttttacaacaaggtgattagctcaagaggattcccgtttgaaaattcctcgtcccgctgttcgcagacccaggaaaacaccgaatgcaccgtgtgtctgtttctggtgcaaaagaagccgctgatctttctgggttgctgcttcttctcgactctggttcttctgctcagcatcgcgatcttccagaggcaaaagcgcagaaagttctggaaagccaaaaacttgcagcacatccctctcaagaaaggcaagcgtgtggtttcc

SEQ ID NO: 250617 - DNA, 3132 bp, synthetic construct
  misc_feature 1..3132: note = Description of Artificial Sequence: Synthetic coding sequence
  source 1..3132: mol_type = other DNA
atgaaaccaggctgcgcagctggctctcccggcaacgaatggatcttctttagcacggatgaaatcactactcgttatcgcaacaccatgtccaacggagggctgcagagatcagtgatactatctgccttaatcctcctgcgcgctgtaaccggcttcagcggcgatggcagggctatttggagtaaaaaccccaatttcacaccggtaaatgagtcccagctcttcctgtacgatacgttcccgaagaacttcttctgggggattggtactggcgcgctccaagtcgaaggcagttggaagaaagacggtaaaggcccatctatatgggatcatttcatccacacacatctaaaaaatgtgagttctacaaatggcagttccgattcttacatcttcctggaaaaggatctgtcggccctggactttatcggcgtctctttctatcagttttcaattagctggcctaggctattccctgacggaatcgtgacagttgccaatgccaaagggcttcaatactactctactcttttagacgcgctcgtgcttagaaacattgaaccaatcgtgactctctaccactgggatctgccactcgcattacaagaaaaatacggcggatggaaaaacgacaccatcattgacatcttcaatgattacgcaacctactgttttcagatgttcggagacagagtgaagtactggataactatccataatccttatttggtcgcttggcacggctatggaactgggatgcatgcccccggcgagaagggcaacctcgcagccgtctacaccgtgggtcataatctgatcaaagctcactcaaaggtgtggcataactataacacccacttccggccccaccagaagggctggctttccatcactttaggcagtcattggattgagccaaatcgttccgagaacaccatggatattttcaaatgccaacaatccatggtttccgtcctgggttggtttgccaacccaatccatggcgacggtgactatccggaagggatgcgaaagaaactgttttccgtgctacccattttctccgaggctgagaaacatgagatgcgcggaacggccgatttttttgctttctctttcggacctaacaatttcaagcccctgaacaccatggccaaaatgggccaaaacgtgtcactcaatttgcgagaagctctcaattggatcaaattagagtacaataaccccagaatactaatcgccgagaatggatggttcacagattctagagtcaagactgaggacactacagcgatctatatgatgaagaatttcttatcacaagtcctgcaggccattaggctcgatgagataagggtctttggatatactgcctggagtctgctcgacgggtttgaatggcaggatgcctatacaattagacgcggcctcttttatgtcgatttcaattctaaacaaaaggagaggaaaccaaaatctagtgcccattattataagcagatcatcagggaaaatggtttcagccttaaagagtccacaccggatgtgcagggccagttcccgtgcgattttagctggggcgtgactgaaagcgtgctgaagccggaatccgttgcctcaagcccacagttctctgatccacacctgtacgtgtggaacgctactggcaaccgcctgctccacagagttgagggggtaaggctgaagactcgtccagctcaatgcactgacttcgttaacataaaaaagcaacttgagatgctggcccgcatgaaggttacacattatcgattcgcccttgattgggcatccgtccttcccaccgggaatttgtcagcagtgaaccgtcaggctctccgttactatcgatgtgtcgtgtcggagggattaaagctcgggatctctgcaatggtcacactatattacccaactcatgctcatttaggcttacctgaaccacttcttcatgcagatggatggctgaatccttcaactgccgaagcgtttcaggcctacgccgggttgtgctttcaagaattgggtgatctggtgaagctatggatcacaatcaacgagcccaaccgactgtctgacatatataatcgcagtggcaacgacacctatggcgctgcccataacctgctggtggcacacgccctggcctggagactgtatgacagacagttccgaccgagtcagaggggtgcagtgagcctatcgttacatgccgactgggccgaaccagcgaatccatatgccgactctcattggagagccgcagagcgatttcttcaattcgaaattgcgtggttcgctgagccactgtttaagacaggcgattacccagcagcaatgagggaatatatcgcaagcaaacatcgacgcggattgtcctcaagcgccctgccccggctgactgaagctgagcggagattgctgaaaggcaccgtcgacttctgcgccctgaaccactttacaactagatttgttatgcatgaacagctcgcgggcagtagatatgactccgaccgcgatattcagtttttgcaggatatcacacggctgtcttctccaaccagactggccgttatcccgtggggggtgcgcaagttattgaggtgggtaagacggaattatggcgatatggacatatacatcacagcctcaggcatagacgaccaggcgctggaagatgacagactcagaaaatactacctcggaaagtacctgcaagaggttttgaaagcctatctgatcgacaaagtgcgcatcaagggctattatgcgttcaagctggcagaagagaaatccaaacctaggttcggcttcttcacgtctgatttcaaagcaaagagctccatccagttctacaacaaggtcatctccagccgcggttttcccttcgaaaatagcagttcaaggtgcagccagacccaagaaaacacagagtgtacagtctgcttattcctggtgcagaaaaagcccctgatattcctcgggtgctgtttcttctccaccctggtgctgctcctgtctatcgctatattccaaaggcaaaagaggcgcaaattctggaaagctaagaacctccagcacattccattgaagaaaggcaagcgagtggtcagt

SEQ ID NO: 250618 - DNA, 3132 bp, synthetic construct
  misc_feature 1..3132: note = Description of Artificial Sequence: Synthetic coding sequence
  source 1..3132: mol_type = other DNA
atgaaacccggctgcgctgccgggagccccggcaacgagtggatttttttctccacggatgaaataactactcggtaccgcaatacgatgtccaatggtggcctgcagcggagcgtgattctgagtgcccttatactgttaagggccgtcactggatttagcggagacgggcgtgccatttggtcgaagaaccctaacttcacgccagttaacgagtcacagttgttcctatatgatacctttcccaagaatttcttctggggcattggaaccggggccttgcaggtagaggggagttggaagaaggatgggaagggtccgagtatatgggaccactttattcatacccacttgaaaaacgtcagctccacaaatggatccagtgactcttacattttcctggaaaaagatctgtccgccctagacttcatcggcgtctccttctaccagttttcgatttcttggccccggttgttcccagatgggatcgtgacagttgccaatgcaaaaggcctccagtactattctaccctgctcgatgctcttgttcttcgcaacattgagcctatcgttaccctataccattgggacctccctttagctttgcaggagaagtacgggggatggaagaatgatactattatagacatatttaacgattacgccacttattgttttcagatgttcggagaccgagtgaaatactggatcaccatccataatccctaccttgtggcttggcatggttacggtaccggtatgcatgcccccggggagaaggggaacctcgccgccgtgtacactgtggggcacaaccttataaaggcccactccaaggtgtggcataattacaatactcactttcgaccacatcagaaaggctggctttcgatcacgctgggcagccactggattgagccaaaccggtctgagaataccatggatatctttaagtgtcagcaaagtatggtgagcgtactgggctggttcgccaaccccatccacggggacggagactaccccgaaggaatgcgcaaaaagttgttctctgtgctccctattttctcagaggctgaaaagcacgaaatgagaggaacagcggacttttttgcgtttagtttcggcccgaataactttaaaccccttaacactatggctaaaatgggacaaaacgtctcactgaatctgcgcgaggccctgaactggatcaagctggaatacaataacccccggatcctaattgccgagaatggctggtttactgattctcgggtgaaaactgaggatacgaccgccatttacatgatgaagaacttcctctcccaggtcctgcaagctatcagactagatgagattagggtgttcggctataccgcctggagccttttagacggattcgaatggcaagacgcctacacaatacgacgcgggttattctacgtcgacttcaacagtaagcagaaggaaaggaaacccaaatccagcgcccactactacaagcagatcatcagagagaacggattttccctaaaagaatcaactccagacgtgcaaggacagtttccgtgcgacttctcatggggcgtcactgagtctgttctcaagccagagtccgtcgcctctagcccacagttctccgaccctcacctgtacgtgtggaacgctactggcaatagactgctgcacagagtggagggcgtccggctgaagacgaggcctgctcaatgtaccgacttcgtgaacattaagaagcagttggaaatgttggcacggatgaaggtcacacattaccgctttgccctggattgggcttcagtgctccccacagggaatctctcagctgttaatagacaagctctacgctactaccgctgcgtggtgtccgaagggcttaaacttgggatttccgccatggtgacgctgtattatccaacacacgcccacctgggcctcccagagcccttgctgcatgcggacgggtggttgaacccgagcacggccgaggcctttcaggcatacgcgggtctctgctttcaggagttgggagacttagttaagctctggatcaccattaatgagcccaataggctgagtgatatctataatcgttctggcaacgatacatatggcgccgcacataacctgctcgtggcccacgccctagcctggcggctttatgacaggcagttcagaccatcacagaggggtgctgtttcgcttagcctccatgcagattgggctgagcccgcaaatccatatgctgattcccactggcgcgcagccgagcgctttctgcaatttgagatcgcctggttcgctgagcctctctttaaaaccggcgactacccagcggctatgagggaatatatagcctctaagcaccgcagaggtctaagcagttccgctctaccccgcctgactgaagcggagagacggttgctgaagggcacagtggatttttgcgcactcaaccactttaccactagatttgtgatgcatgagcagctggccggaagccggtacgatagcgaccgcgacatacagtttttgcaagacattaccaggctgagtagccccactcgtctagccgtgatcccttggggcgtccggaaactgctcaggtgggtacggcgcaactatggcgatatggatatctatatcaccgccagcggaattgatgaccaggccctggaagatgaccgattgcgcaagtattacctggggaaataccttcaggaagtgctgaaggcatacctgatcgacaaggtccggattaaaggatactatgcttttaagctggctgaggaaaaatctaaacccaggttcggcttcttcacctccgacttcaaggcaaagagctcaatccagttttataataaagtcatctcctcgcgcgggttcccctttgaaaacagctccagcaggtgcagccaaacacaggagaataccgagtgcactgtctgccttttcctggttcagaaaaagcctctgatcttcttaggatgttgcttcttttctaccctcgtcctgctgctgtctatcgccattttccagcgccaaaaaaggagaaaattttggaaagccaagaatctacaacatatacccctaaaaaaggggaaacgagtagtgtcc

SEQ ID NO: 250619 - DNA, 3132 bp, synthetic construct
  misc_feature 1..3132: note = Description of Artificial Sequence: Synthetic coding sequence
  source 1..3132: mol_type = other DNA
atgaagcccggatgcgcagctggaagccctggtaacgaatggatcttcttcagcactgacgaaataaccaccagatatagaaacacgatgagcaacggaggcctgcaaaggtcagtcatacttagcgcgcttattctcctgagggctgttactgggttctcgggagacggtagggcgatttggtcgaagaaccctaactttacccctgtcaatgaatcgcagctcttcctctatgacacgttccctaaaaacttcttttggggaatcgggaccggagcacttcaggtggaaggatcgtggaagaaggatgggaaaggcccatcgatctgggaccacttcatccacactcatctcaagaacgtgtcatcgaccaacggttcttccgattcatacatctttcttgaaaaggatctctccgccctcgatttcatcggtgtgtccttttatcagttttccatttcgtggcctagactgtttcccgacggtattgtgacggtggctaatgcaaagggtctgcaatactactctactctccttgacgccctggtcctcagaaacatagaaccgatagtgacgctgtaccattgggaccttccactggcacttcaagagaagtacggaggttggaagaacgatacgattattgacatattcaacgattacgctacttactgttttcaaatgtttggcgatcgcgtgaaatactggatcaccatccataatccttatctcgtagcatggcatggttacggaactggcatgcatgcgcctggcgaaaagggaaaccttgcggcagtctacaccgtcggacacaacctcataaaggcccactccaaggtctggcacaattacaacacgcattttcgccctcatcaaaaggggtggctttcaattaccctcggttcgcactggattgaacccaatcgttcagagaacaccatggacattttcaaatgtcagcagtcgatggtttcggttctgggctggtttgccaacccaattcacggggacggagactaccctgaaggtatgagaaaaaagctctttagcgtattgcctattttctccgaagcagaaaaacacgaaatgcggggaaccgcggactttttcgccttttcgtttggtccgaacaatttcaagccgctgaacaccatggcaaagatgggtcagaatgtgtcgctgaatctgcgcgaggcactgaactggataaagctggagtataacaatcctaggatactgattgccgagaacggatggtttactgattcaagagtgaaaaccgaagataccactgccatttacatgatgaagaattttctttcacaggtcctgcaagcaatcaggcttgatgagattcgcgtgtttgggtacaccgcctggagccttttggatggatttgaatggcaagatgcttacactatcagacgggggcttttctacgtggactttaactcaaagcaaaaggaaagaaagcccaagtcctcggcgcactactacaagcaaatcattcgtgaaaatggttttagcctgaaggagagtactccagatgtgcaaggccagtttccgtgtgatttttcgtggggggtgactgaatcagtgctgaaaccagaatccgttgcgtcgtcgccacagtttagtgatccccacctgtacgtgtggaacgcaaccggcaaccggctcctgcatcgtgtggaaggagtgagactcaagacccgcccagcacaatgtaccgattttgtcaacatcaagaagcagctggaaatgcttgcacggatgaaagtgacccattacagattcgcactggactgggctagcgtgttgcctaccggaaatctctctgcggtgaaccgtcaggcgctgagatactaccgctgtgtggtgagcgaagggcttaagctgggtatctccgcaatggtgactctgtactacccgactcatgcacatcttggcctgccagagcctcttttgcatgccgatggttggctgaatccaagcactgctgaagcgttccaggcatacgcaggactctgttttcaagaactgggcgacctcgtgaagttgtggattaccatcaacgagcctaataggctgtccgacatttacaatcgatcgggaaacgatacctacggagcagcccacaacctgctggtggcacatgcactcgcatggaggctttatgatcgccaattccggccatcccagagaggagcagtgtccctctcattgcacgcagattgggcggaacctgcaaacccctacgccgactcacactggcgtgcagcagaacgttttctgcaatttgaaattgcctggttcgcggaacccctgtttaagaccggtgattaccccgcagcaatgagggaatacatcgcgtctaaacatcgacggggtctttcctcttcggcactcccgagactgactgaagccgaacgacgtttgctgaaggggactgtggacttctgcgcactgaaccacttcaccactaggtttgtgatgcatgaacaactcgctggatctcgctacgattcagacagagacatacagttcctgcaagatattactcgtctttcatccccgactcgactggcagtcatcccatggggtgtgcgcaaacttcttcgctgggtccgccgcaattatggagacatggacatttacatcactgcttccgggattgatgatcaggcacttgaggacgaccggcttagaaagtattacctcgggaagtacctccaagaggtgctgaaagcatacttgattgacaaagtgcgaatcaagggttactacgcctttaagctcgcagaggaaaagtccaaaccacggtttggctttttcacgtccgatttcaaagcaaagtcctcgatccagttctacaataaggtaatatcatcccggggtttcccctttgagaattcatcgtcgcgctgtagccaaacccaggaaaacaccgagtgcacggtgtgcctgtttctcgttcagaagaaaccacttatctttctgggatgttgctttttctccactttggtgctcctgctctcgattgcgatattccaaagacaaaaaagacggaagttttggaaggccaagaacctgcagcatattccactgaaaaagggaaaacgcgtcgtgagc

SEQ ID NO: 250620 - DNA, 3132 bp, synthetic construct
  misc_feature 1..3132: note = Description of Artificial Sequence: Synthetic coding sequence
  source 1..3132: mol_type = other DNA
atgaagcccggatgcgcagcaggcagccctggaaatgagtggatatttttctctacagatgaaataaccactcgatatcgcaacacaatgtctaatggggggcttcagcgctctgtcattctgtctgctctgatcctgctgcgggccgtcaccggtttcagcggggatgggcgagccatatggtcaaagaacccaaattttacacctgtcaatgaatctcagctcttcctttatgatactttcccaaagaacttcttctggggaatagggacgggcgccctgcaggtcgagggctcctggaaaaaagacggaaaagggccatcgatttgggatcacttcatccatacacacctcaagaacgtttcctctaccaatggcagttccgacagctatatttttctcgagaaagacctgtccgccctcgactttattggtgtgagtttttatcagtttagtattagttggccccgactcttcccggatggtatagtgaccgtcgctaacgcaaagggactgcagtactactccactctgctcgatgctctagtgctgagaaacatcgagcccatagtcactctttatcactgggatcttcccctggcgctgcaggagaaatacggtggttggaagaatgacacgattatcgatatttttaatgactacgccacttattgctttcagatgtttggtgacagggttaaatactggatcaccattcacaatccctacttggtggcgtggcatgggtacgggactggcatgcacgcaccaggtgagaagggcaacttggccgctgtttacacggtcgggcataacctaattaaagcacactccaaggtttggcataactataatactcattttagaccccaccagaagggatggttgagcataacccttgggagccactggattgagccgaaccgcagtgagaacacaatggatatcttcaaatgccagcagtccatggtatctgttctaggttggttcgctaaccccattcacggagatggcgactatcccgagggaatgagaaagaaactgttttctgttctcccaattttttccgaagcagagaagcacgagatgagggggaccgctgatttcttcgccttcagcttcggtcctaacaatttcaagcccttgaacacaatggctaagatggggcaaaatgtgagtctgaatctgagagaggctttaaactggatcaagctggagtataacaacccaagaatactgatcgctgaaaacgggtggttcactgatagtcgtgtaaagaccgaggacactaccgccatctatatgatgaaaaactttctgtctcaggtattgcaggcaattcgcctagatgagatccgggtgttcggctacacagcttggagcctgctggatggatttgaatggcaggatgcgtataccatccggcgcgggcttttctacgtggattttaattccaagcagaaggagcgcaagcccaagagctcggcccattattacaagcagataatccgggagaacggcttttcactgaaggagagcaccccagatgtccagggtcagttcccctgcgacttctcctggggcgtgacagaaagtgttctgaaaccggagagtgtcgcctcgagcccccagttctccgatccccacctgtatgtgtggaacgctactgggaatcgccttctgcaccgcgtggagggagtcaggttgaagactcggcctgcacagtgtaccgacttcgtaaatatcaagaagcaactggaaatgctggcccggatgaaagtcacccactacaggttcgccctggactgggctagcgtactgccaacagggaacctcagtgctgtgaacaggcaggcgctgcgctactacaggtgtgttgtaagcgaggggcttaaactagggatttccgcaatggtgactctatactatccaactcacgctcaccttggcttacctgagccactgcttcatgctgatggatggctcaatccgagtaccgctgaggccttccaggcctatgccggcctttgctttcaggagctgggggatctcgtgaagctatggattactattaacgagcctaacaggctgagtgacatctacaacaggagcgggaacgatacttatggtgccgcacataacctgctagtggcacacgcgttggcttggcgtctctacgataggcagttcaggccctcgcagagaggcgccgtgagtctgtccctgcacgcagactgggccgagccagccaacccttacgccgattctcactggcgggcggctgagaggtttttgcaattcgagattgcgtggtttgctgagcccctgttcaagaccggcgattaccccgccgcgatgagagagtatatcgccagcaaacaccgcaggggcctgtctagctccgctctgcctaggctcaccgaggccgaacgccgtctcctgaaaggcaccgtagacttttgcgccctcaaccactttacaaccagattcgtcatgcatgaacaattggcaggttctcgatacgacagcgatagagacattcaattcctgcaggacataactcgcctgagttctccaactagactcgcggtgattccctggggcgtaaggaagttgctgaggtgggtgcggagaaactatggtgacatggatatttacataacggcaagcggcatagatgatcaggcgctggaagatgatcgactgcggaagtattatctcggcaagtatctgcaggaagtcctgaaagcctatctgatagacaaagtccggattaaaggatactacgcctttaaactcgcagaagagaagagcaaacctcggttcgggttcttcacctccgattttaaggctaagagtagtatacagttctataataaggtgatctcatccaggggatttccctttgagaattcgagttctagatgtagccagacccaggaaaataccgaatgtaccgtgtgtctcttcctggtccaaaaaaagcccctgatattcctgggttgctgttttttttctactctggtgctgctactcagcatcgccatctttcaaagacagaagcgacggaagttttggaaggcgaagaacctgcagcacatcccgctcaaaaagggcaaaagggttgtgagc

SEQ ID NO: 250621 - DNA, 3132 bp, synthetic construct
  misc_feature 1..3132: note = Description of Artificial Sequence: Synthetic coding sequence
  source 1..3132: mol_type = other DNA
atgaaacctggctgtgccgctggtagccctggcaatgaatggatattctttagcaccgacgaaattaccactcgatacaggaatactatgtctaacggtggtttgcagcgctcagtgatcctgagcgcacttattctgctgcgggcggtgaccggattctcgggagatgggagagcaatctggtcaaagaacccaaactttaccccggtgaacgagtcgcaactgttcctttacgacactttccctaagaatttcttttggggcatcggcacgggtgctctgcaagtggaaggatcctggaagaaggacgggaagggaccttcgatatgggatcatttcattcatacccaccttaagaacgtgtcgagcactaacggatcgtcagattcgtacatttttcttgaaaaggatctgtccgcacttgatttcatcggtgtctcgttttaccagtttagtataagctggcctagactgtttcctgatgggattgtgactgtggcaaacgcgaaggggctccagtactattcgaccctgctcgatgccctggtgttgaggaacattgaacccatcgtcactctctaccattgggatctgccattggcccttcaggagaaatacggaggatggaagaatgataccatcattgacattttcaatgattacgcaacttattgtttccaaatgtttggagatcgtgtcaagtattggatcaccattcataatccctaccttgtggcgtggcacggctacggtactgggatgcatgctccaggggaaaagggaaatctggcagcagtttacactgtgggacataatctgataaaggcgcattccaaggtttggcataactacaacacccattttaggccacatcaaaagggctggctgagcattaccctcggatcccactggattgaaccaaacaggtcggagaacactatggatatctttaagtgtcaacagtctatggtttcggtgctcggatggtttgccaatcctatccatggtgatggggactacccagaagggatgcgcaagaaacttttttcagtgctgcctatcttttcagaggcagaaaaacacgaaatgcggggcactgccgacttttttgcgttcagctttgggcccaacaatttcaaaccactgaataccatggcgaagatgggacagaatgtgtcactcaacctgagggaggcactgaactggattaagctggaatacaataatccccgaatcttgatcgctgaaaatggctggttcactgattcacgtgtaaagactgaggacactaccgccatttacatgatgaagaacttcctttcccaagtcttgcaagccatacgactggacgagattagagtgttcggatacacggcgtggtcacttctggatggttttgagtggcaggatgcatacactattcgccgcggactgttctatgtggactttaactccaagcaaaaggagcgcaaaccaaagtcatcagcacactactataagcagattattcgcgaaaacgggttctccctcaaagagagcacgccagatgtgcaggggcaatttccctgcgacttttcatggggagtgaccgaatccgtcctgaagcccgaatctgttgcatcatcgcctcaattttctgatccccatctctacgtgtggaatgccactgggaaccggcttctgcatagagtggagggtgtgcgtcttaagactagacccgcacagtgtaccgactttgtgaacataaagaagcagctggagatgctggcgagaatgaaggtgacgcactaccgcttcgcacttgattgggcatcagtgctgcccaccgggaacctgtcagcagtgaaccgccaggcactgagatactaccgttgcgtagtctcagagggattgaaactcgggatttcagcaatggtgaccctgtactaccccactcatgcacatctgggccttccagaacctcttctgcatgcggatggatggctgaacccgtccacggctgaggcctttcaggcctacgcaggcctgtgttttcaggaacttggcgacctcgtgaaactttggataaccattaacgaacccaacaggctctccgatatctataatcgctcagggaatgacacttatggagcggcacacaacttgctggtggctcacgcacttgcatggcgactttacgaccggcagttccggccttcgcaacgtggagcagtgagcctgagcctccatgcagactgggcagaaccagccaacccttacgcagactcacattggcgggcagcggaacgcttcctccagtttgaaattgcatggtttgcagaaccccttttcaagaccggtgactaccctgcagcaatgcgtgaatacatcgcgtccaaacatagaagaggacttagcagctccgccttgcctagactgaccgaagcggaacgcagactcctgaaaggaactgtggatttttgcgcccttaaccatttcactaccaggttcgttatgcatgaacagcttgcggggagcagatacgattcggatcgggatatccagtttcttcaggatattactagactctcgtcgcctactcgccttgcagtgatcccttggggggtgcggaagctcctgcgctgggtccgccgaaactatggtgatatggacatctacataaccgccagcggtattgatgaccaagcactggaggacgatagattgcggaagtactacctgggaaagtatctgcaagaagtcctgaaagcatacctgatcgacaaggtgcgtattaagggttactacgcatttaagctggcggaggaaaagtcaaaacctcggtttggttttttcaccagcgactttaaagcaaagtcgtcgatccagttttacaataaggtcatttccagccgcggttttccctttgagaactcgtcgtcccggtgttcacaaactcaagaaaataccgagtgcaccgtgtgtctgtttcttgtccaaaagaagcctctgatctttctcggatgttgctttttctccacgctggtccttctgctttcgatcgccatatttcaacgccaaaagagaaggaaattctggaaagccaagaatcttcaacacatcccattgaagaaagggaagagagtcgttagc

SEQ ID NO: 250622 - DNA, 3132 bp, synthetic construct
  misc_feature 1..3132: note = Description of Artificial Sequence: Synthetic coding sequence
  source 1..3132: mol_type = other DNA
atgaagccgggttgcgccgcagggagcccggggaacgagtggatctttttctcgaccgacgagattaccaccagataccgcaataccatgtccaatggaggattgcaacggagcgtcatcctgtcagcgcttattctgctccgcgcagtgactggcttctcgggagatgggcgcgcgatctggtccaagaatcccaacttcacccccgtgaatgagagccagctgttcctctacgatacctttccgaagaactttttctggggcatcggaacgggggccttgcaggtggaggggtcgtggaagaaggacgggaaaggcccatcgatttgggaccacttcatccacactcatctgaagaacgtgtcatcaactaacggaagtagcgattcatacatcttcctcgaaaaggatttgagcgccctggacttcattggagtgtccttttaccagttttccatctcgtggccacgcctgtttccagatggcatcgtgactgtcgccaatgctaagggcctccagtactacagcaccctcttggacgcccttgtgctgcggaacatcgaacccattgttactctttaccactgggacctgccgctggccttgcaagagaaatacgggggatggaaaaatgatactatcatagacatcttcaacgattacgctacctactgcttccaaatgtttggagatagagtgaagtattggatcaccatccacaatccgtacctggtggcctggcatggctacgggactggaatgcacgcgcccggcgagaagggaaacctcgcggcggtgtatacggttggacacaatctgatcaaggcccattcaaaagtgtggcacaactataacactcacttcagaccgcatcaaaaaggctggctctccatcacccttggctcacattggatcgagcccaacagatccgaaaacaccatggatatcttcaagtgccaacagagcatggtgtccgtgctgggatggttcgccaacccgatccatggagacggagactaccctgaaggcatgaggaagaagctgttcagcgtccttccgatcttctctgaggccgaaaagcacgagatgcggggcaccgctgatttctttgcattttcgtttggaccgaataactttaagccgctgaacactatggctaaaatgggtcagaatgtctcgcttaacctgcgcgaggcactgaactggattaagctggaatacaacaaccctcggatcctgatcgctgagaatggatggtttactgactcgcgcgttaagaccgaggacacgaccgccatctatatgatgaagaatttcctgagccaggtgctgcaggcaatacggcttgatgaaatccgcgtctttggatacactgcctggtcgctccttgatggattcgaatggcaggatgcatacaccatcaggagaggactgttctatgtggactttaactcgaagcaaaaggagcggaaaccgaaatcctcagcccactactacaagcaaatcatccgagagaacgggttcagcctcaaggaatcgactccggatgtgcaaggacagttcccatgcgacttctcctggggggtgactgagtcggtgctgaagccagaatcagtggcatccagccctcagttctccgatccacatctgtacgtctggaacgccaccggaaacagactgctgcaccgggtggagggagtgagactgaaaacccggccggcgcaatgcacggacttcgtgaacatcaagaagcaactcgagatgcttgctcgcatgaaagtcacccattacaggttcgcactggactgggcttcggtgctgccgactggcaacctctccgccgtgaatcggcaggcgcttagatactaccgctgtgttgtgtcggaggggctgaaactgggaatcagcgccatggttaccttgtactaccccacccacgcacacctgggattgcctgaacctctgctccatgccgacggatggcttaacccttcgactgctgaagccttccaagcatatgctgggttgtgctttcaagagctgggcgacctcgtgaaactctggatcacgatcaatgaaccgaatcgattgtcggacatctacaatagatcggggaatgacacttatggagccgcccacaacctcctggtggcgcatgcgctggcctggaggctgtatgacaggcaattccggccgtcacagcggggagcagtgtcactgagcctgcacgccgactgggcggagccggccaatccatacgctgactcccactggcgcgcagcggagagattccttcagtttgagatcgcttggttcgcagagccgctgttcaaaacgggcgactacccggctgcgatgagggagtacattgcctcgaagcaccgccgaggcctctcctcctccgctctcccacggctgactgaggctgagagacgcctgctcaagggaactgtggatttctgcgcactgaaccactttaccactcgcttcgtcatgcacgagcagctggctggaagccgatacgactctgatagagacatccagttcctgcaggacatcactcggttgtcctcgccaactcgcctcgcggtgatcccgtggggcgtgagaaagctgttgcgttgggtgcggaggaactacggtgatatggacatttacatcactgcctcaggaatcgatgatcaagctctcgaagatgaccgcctgcggaagtactacctcggaaagtacctgcaggaggtgttgaaggcttatctgatcgacaaggtcaggatcaagggatactacgccttcaaactggccgaagaaaagagcaagccgcgattcggatttttcaccagcgactttaaggctaaatcctcgattcagttctacaataaggtgatcagcagccgcggcttccctttcgaaaactcgtcgtcgcgctgctctcaaactcaagagaacactgaatgcactgtctgcctgttcctcgtgcagaagaagccactgatcttcctgggctgttgcttcttctcgaccctggtgttgctgctgtcgatcgcgatcttccagcggcagaagagacggaagttctggaaggctaagaatctgcagcacatccctctgaagaagggcaagagggtggtgtcg

SEQ ID NO: 250623 - DNA, 3132 bp, synthetic construct
  misc_feature 1..3132: note = Description of Artificial Sequence: Synthetic coding sequence
  source 1..3132: mol_type = other DNA
atgaagcccggttgcgcagctggtagtcctggcaatgaatggattttttttagtactgacgagatcacaaccaggtacagaaatactatgagcaacggtggactgcaaaggtcagtaatcctcagtgctctgatccttcttcgcgcagtcaccggcttcagcggagatggccgcgcaatttggagcaagaatcccaatttcacccctgttaacgaaagccagcttttcttgtacgatacattccccaaaaacttcttctggggtatcggaaccggtgccctccaagtggaaggttcatggaagaaggacggtaagggcccttcaatctgggatcatttcatccacacacaccttaagaacgtatcttccactaacggtagctctgattcttacattttccttgagaaggatctgagcgcactggacttcatcggagtttccttctatcagttcagtatctcttggccccgcctgttccctgacggtatcgtgaccgtggcaaatgccaaaggcctgcaatattactctactctgttggacgctctcgtgttgcgcaacatcgaacctattgtgaccctgtatcactgggacctgcctctggccctgcaagaaaaatacggcggctggaaaaacgacacaattattgacatcttcaacgactacgctacttactgcttccagatgtttggagatcgtgtgaaatactggatcaccatccataacccttaccttgtggcttggcatggctatggaacaggcatgcatgcccctggagagaaaggcaacctcgcagctgtctacactgttggtcacaatttgatcaaagcccacagtaaggtctggcataattacaatactcacttcagacctcaccagaaaggttggcttagcattacactgggcagccactggattgaacctaatcgtagtgagaacactatggacatctttaagtgccagcagagtatggttagcgtcctgggttggtttgccaaccctattcacggagacggtgactatcctgagggcatgaggaagaaattgttctccgtcctgcctattttctcagaagccgagaagcacgagatgcgtggtacagccgatttctttgcttttagcttcggacctaacaattttaaaccccttaacactatggccaagatgggacaaaacgtctccttgaatctcagagaggccttgaattggatcaagctggagtataacaatccccgcattttgatcgcagagaacggatggttcaccgactccagagtcaagacagaagacacaactgccatatatatgatgaaaaatttcttgagtcaggtactgcaagccatccgccttgacgaaattagggtattcggatatactgcatggtccctgctggacggttttgagtggcaggacgcttacaccatcaggcgtggcttgttttacgtcgactttaactccaagcagaaagaaaggaaacccaagtccagcgcccactattacaaacagatcattagggagaacggtttctctctcaaggagtcaacaccagatgtgcagggccagttcccttgcgactttagctggggagtgaccgagtccgtgctgaaacccgagtccgttgcctcatctcctcaattttctgatccccatctttacgtctggaacgccactggtaaccgtctgttgcacagggtggagggcgtaagattgaagactagacctgcacaatgtacagactttgtcaatatcaagaaacagctcgaaatgctcgctcgcatgaaggtcactcactacaggttcgccttggattgggcctctgttctccctactggtaaccttagcgctgtaaacaggcaggccctccgttattaccgctgcgtggtctcagaaggcctgaagctgggcatctctgccatggtgacactgtactatccaacacatgctcacctcggactgcctgagcctcttttgcatgctgatggctggctgaatccttctaccgctgaagctttccaagcctatgctggtctgtgcttccaggagctcggtgatcttgttaagctctggattaccatcaatgagccaaacaggctgtccgacatctataaccgcagcggtaacgacacttacggtgcagcccataatctgttggttgctcatgcacttgcatggcgtttgtatgaccgccagttcaggcccagccagaggggcgccgtatccttgtctttgcacgctgattgggccgagccagctaacccctacgccgactcccactggcgcgctgccgagcgtttcctccaattcgagatcgcatggttcgctgagcccttgtttaagacaggtgactatcctgcagccatgagggaatacatagcttccaagcacaggcgtggcctttcatcttctgctcttccaagactcaccgaggctgaacgtcgccttctgaagggtacagtggatttttgcgccctgaaccatttcaccacaagatttgtgatgcatgagcagctcgctggatctcgttatgacagcgatagagacatccagttcctgcaagatatcaccagactctcctctcccactcgcttggctgtgatcccttggggcgttaggaagttgctccgctgggtcaggcgtaactatggtgatatggatatatacataaccgcctcaggtatcgatgaccaagccctggaggatgacaggctgcgtaaatactacttgggtaaatacctccaagaggtgttgaaggcctatctcattgacaaggtgaggataaagggctactacgcattcaagttggccgaggagaagagcaagcctaggttcggcttttttacctcagacttcaaagcaaagtcatccatccagttctataacaaggtgatctccagtaggggattccccttcgaaaacagctcttctcgttgctcacaaacccaggaaaacacagagtgtactgtatgtctctttcttgtgcaaaagaagcctctcatcttcttgggctgttgcttcttctctacactggtcctcctcctctccatcgctatttttcagcgtcaaaagcgtcgcaagttctggaaggcaaagaaccttcagcacatccctctgaagaaaggaaaacgtgtggtcagc

SEQ ID NO: 250624 - DNA, 3132 bp, synthetic construct
  misc_feature 1..3132: note = Description of Artificial Sequence: Synthetic coding sequence
  source 1..3132: mol_type = other DNA
atgaagcctggatgcgctgcggggagccccggtaatgagtggatatttttttcgaccgacgagataacaacaaggtaccggaataccatgtccaatggaggcctgcagcgttccgtgatcctttcggccctgattctgctccgagcggttactggcttctcaggtgacgggcgcgccatttggagcaagaacccaaatttcactccggtcaacgagtcacagctgttcctgtatgacaccttcccgaagaattttttctggggcattggcacgggagccctgcaagtggagggcagttggaagaaagacggcaagggccccagtatatgggaccatttcatccacacacatctcaagaatgtgtcctcaaccaacggttcgagcgactcttacatattccttgagaaggacctgtcagccctggactttatcggcgtgagtttctatcaatttagcatctcgtggccgcgactgtttccggatggcatagtgaccgtcgccaatgcgaagggccttcagtattactcgaccctgcttgacgcactggttctgcgcaacatcgagccaatcgtgacgttgtatcattgggatctgcctctggccttgcaggagaaatacggagggtggaagaacgacacgattattgatatatttaacgattacgctacttattgttttcagatgtttggggatcgggttaagtactggattacgattcacaacccgtaccttgtcgcctggcacggttacggcacgggaatgcatgccccaggggagaaaggcaacttagcggcggtttacaccgtcgggcacaacctcattaaagcacatagcaaggtgtggcacaactacaacacccattttaggccgcaccagaaggggtggctttccataactttgggttcccactggattgagccaaatcgatctgagaacacgatggacatcttcaagtgtcaacaatccatggtgagcgttctgggttggtttgccaaccctatccatggagatggcgattacccagaggggatgcgtaagaagctgttctctgtactccccatcttctccgaggctgagaagcatgagatgagggggacagccgatttttttgcatttagtttcggaccaaacaatttcaagcctctcaatacaatggcgaagatgggccagaatgtctctctgaacctccgcgaggcactgaattggataaagctggagtacaacaacccccgaatattgatagctgagaacggctggtttaccgatagccgggtgaaaaccgaggatacgaccgccatctacatgatgaagaatttcctgtcccaagtactgcaggccattcgcctggatgaaattagggtgttcggatatacggcctggtcgctactcgacggctttgagtggcaggatgcatacacgatccggcgtggactgttttatgtggatttcaatagtaagcaaaaagagcggaagcccaaatcttcagcccattactacaagcagataatcagagagaacggtttctcccttaaggagagcaccccagatgtccaaggtcagttcccctgtgatttttcgtggggggtgactgagtccgtgttgaagcccgagagcgtcgcgtcaagtcctcaattttccgatccacatctgtacgtgtggaacgcgaccggcaatcgactgctgcatcgagtggaaggggtgaggcttaagacgcgtccagcgcagtgcacagatttcgtcaacatcaagaagcaactcgagatgctggccaggatgaaagtcacccactaccgctttgcacttgactgggcctctgtcctgcccacaggtaacttaagcgccgtcaatcgccaagcactgcgctactaccgttgcgtcgtaagtgaaggcttgaagctaggaattagcgcgatggtcacattgtactatcccactcacgctcatttgggcttgcccgagccactgctgcatgccgacggttggctgaacccgagtactgccgaggcgtttcaggcctacgctggcttgtgcttccaagagctgggagacctcgtgaaattgtggataactatcaacgagccaaatcgcctgtcagacatatacaacaggtcaggaaacgacacgtatggagctgctcacaacttacttgtggcccatgccttggcctggcgcctgtacgacaggcagttccgcccctcgcaacgcggagcagtaagtttgtccctgcacgctgattgggcggaaccggccaacccatatgccgattcgcactggcgggccgccgagcggttcctccagttcgagattgcgtggttcgcagagcccctattcaagacaggagattatccagcagctatgcgcgagtacatcgcatccaaacaccgtagaggcctgtcgagttcggcactaccgagactgaccgaggcggagcggcgtctgttgaagggcacggttgatttttgtgccctgaatcattttactacaaggtttgtgatgcatgagcagctggcaggcagtcgctatgatagtgaccgcgacatccagttcctccaggacatcacgcgactgagctcgcctacgaggctggccgtgattccctggggcgtccgtaagttgctgcggtgggtgcgtcggaattatggcgacatggatatttacatcaccgcctctggcatcgatgatcaggccctcgaagacgatcgtctccggaaatactatctgggaaagtacctacaggaggtgttaaaagcctacctgatcgacaaagttcgaatcaaaggttactacgccttcaagctggccgaagagaagtcgaagcctcgctttggcttcttcacttccgactttaaggcgaaaagcagcatccaattctataacaaggtgatctcctcgcgaggcttcccgtttgagaactcatcctcgcggtgctcgcagacacaagagaacaccgagtgcacggtgtgcctgtttctggtccaaaagaagcccctgatcttcttgggctgctgcttttttagcacgctagtgttgctcctatctatcgcaatctttcaacgacagaagcggagaaaattctggaaagccaagaatctgcagcacatcccgctcaagaaaggcaaaagggtggtctcg

SEQ ID NO: 250625 - DNA, 3132 bp, synthetic construct
  misc_feature 1..3132: note = Description of Artificial Sequence: Synthetic coding sequence
  source 1..3132: mol_type = other DNA
atgaagccgggatgcgcggccggatcaccaggcaacgaatggatattcttctctacagacgaaattaccacccgatatcggaatacaatgagtaacggcgggctccagcgctctgtcatcctgagcgctctgatcctgctcagagccgttacagggttcagcggcgacggccgagctatctggagcaaaaaccccaacttcacccccgttaacgaaagccagttgtttctgtatgacacattccccaagaacttcttttggggcattgggactggtgcactacaggtcgaaggcagctggaagaaggacggaaagggcccttcaatctgggatcatttcattcatactcacctgaagaatgtttcttccaccaacggatcctcagattcatacatattccttgagaaagacttatcagctttagactttattggggtcagtttctaccagttcagcatttcttggccacgcctcttcccagatggaatcgtgacagtggccaacgcaaaggggctccaatactactctactttactggatgccctggttttgcgcaatatagagccgattgtgactctgtaccattgggatctgcccttagcactgcaggaaaagtatggtgggtggaagaacgacacgatcatcgatattttcaatgactatgccacttattgtttccagatgttcggcgatcgggtaaagtactggatcaccatccacaatccatatctggtggcatggcacggctacggcaccggcatgcacgcacccggcgaaaagggaaacctggccgccgtgtatacagtagggcataacctgataaaggcgcacagcaaggtctggcataattataacacacactttcggcctcaccagaagggttggctttctatcaccctgggctctcactggatagagcccaataggtcagaaaatactatggacatctttaagtgccagcagagcatggtcagtgtactgggctggttcgcaaatccaattcacggtgatggggactacccggaaggtatgcgtaagaagctcttttcagtgctgcctattttttcagaggccgagaaacacgagatgcgaggaaccgcagatttctttgctttttcatttggccctaataactttaagccgcttaacactatggccaaaatgggacagaacgtgtctttgaatctgcgtgaagctctaaactggattaaactagaatacaacaacccgcggatacttatcgctgagaacggatggttcactgactccagagtcaaaactgaagacaccacagcaatctatatgatgaagaacttcctctctcaggtcctgcaagcaatccggctggacgagatccgcgtgtttgggtacacagcatggtcacttctggacggctttgaatggcaggacgcctatactatacgacgagggctattttacgtggattttaactctaaacagaaagagagaaaaccgaagtcttccgcccactattacaaacaaattatcagggagaatggattcagtctcaaggaatccaccccagacgtacagggccaattcccctgcgatttttcctggggagtcaccgaaagcgtattgaagcctgagtcagtcgcctcatcaccgcagttctctgatccacacctgtatgtatggaacgcaacgggaaatcggctactccatagagtggagggcgtgcgcttgaagacacggccggctcagtgtacggattttgttaatattaagaaacagctggaaatgctggcgagaatgaaggtgacccactatcgctttgccctcgactgggccagtgtcctccccacaggtaacctgagtgccgtcaatcggcaggcactgcggtactataggtgcgtagttagcgaaggcctgaagctaggtatcagcgccatggtaaccctgtactatcccacccatgcccatctgggactgcctgaaccgcttctccacgcagatggctggctcaatcctagcactgcagaagcatttcaggcatatgcaggcctgtgcttccaggaactaggcgatctggttaagctttggattacgatcaacgaacctaaccgcctgtctgacatctacaatcggagcggcaacgatacttatggagcagctcataacctgctcgtcgcacatgcactcgcttggcggttgtacgataggcaatttagaccatcgcagcgcggcgctgtgagtttaagcctccatgcagactgggccgagccagctaacccgtatgccgattcccactggcgcgctgctgaaaggttccttcagttcgagatcgcctggtttgcggaacctctgtttaaaaccggcgattaccccgcagctatgcgggaatatattgcctccaaacaccggagaggactaagtagttcagcactgcccaggctcacagaggcggaacgacgtcttctgaagggaactgtggatttctgtgctctgaaccacttcaccacccgcttcgtcatgcatgaacagctggctgggagcagatatgactctgacagagacatacagtttctgcaagacatcacccgacttagctcaccaaccaggctagctgttatcccatggggcgtgcgcaagctcctgaggtgggttcgcagaaattacggcgacatggacatctacatcactgcatccggaatcgacgatcaggccctggaagatgacaggcttcggaagtactatctgggtaaatacctgcaggaggtcttgaaagcgtaccttattgacaaagttagaatcaaggggtactatgcgtttaagcttgccgaggagaagagcaaaccgagatttggattttttaccagtgattttaaggcaaagtcgtccattcagttctataacaaggtgatcagttctcgaggcttcccttttgagaacagctctagtaggtgctcccaaacccaagagaacaccgagtgcaccgtgtgtctgttcctcgtccagaagaagcctctgatcttcctgggttgctgcttcttttccacacttgtgctgctcttgtcaattgctatctttcagagacagaaacgccgaaagttctggaaggcaaaaaacctgcagcacattcctttgaagaaggggaaacgagtggtttcc

SEQ ID NO: 250626 - DNA, 3132 bp, synthetic construct
  misc_feature 1..3132: note = Description of Artificial Sequence: Synthetic coding sequence
  source 1..3132: mol_type = other DNA
atgaagcctggatgcgctgcgggctcaccgggcaacgaatggatcttcttctcgacggacgaaatcaccacgcggtaccgcaacactatgtcgaacggcggactgcagcgctcagtgatcctttcggctttgatcctgctgagagcggtgactggtttcagcggagacgggagagccatctggtccaagaaccccaactttacccccgtaaacgaatcgcaactcttcctgtacgacacctttccaaagaacttcttctggggaatcggaaccggcgccctccaggtggagggaagctggaagaaggatggaaaggggccgtcgatttgggaccacttcatccatactcacctcaaaaatgtgagctctacgaacggaagctcggattcgtacatcttcctcgagaaggacttgtcggcgctcgatttcatcggagttagcttctatcagttttccatctcgtggcctaggctgttccccgacggcatcgtgactgtcgctaacgccaagggactgcagtactattcaactctgctcgatgcactcgtgcttagaaacatagaaccgatcgtgacgttgtaccattgggacctcccgctggcgctgcaggaaaagtatggaggttggaagaatgacacgatcatcgacatcttcaacgactacgcgacgtactgtttccaaatgttcggagatagagttaagtactggattactatccacaatccatacctcgtggcctggcacggatacggcacggggatgcatgcacccggagagaaaggaaatctggcagccgtttacacggtaggacataacttgatcaaggctcattccaaggtgtggcacaattacaacacccatttcaggcctcaccagaaggggtggctgtccatcaccctgggatcccactggatagaaccaaaccggtcggagaatactatggatatctttaagtgtcagcagtcgatggtgtctgtgctgggatggtttgcgaatcctattcatggagatggtgactaccctgaggggatgcggaagaaacttttttctgtgctgccgatcttctctgaggccgaaaagcacgagatgcggggcactgcggacttctttgccttctcatttggcccaaacaacttcaaacccttgaacaccatggctaagatgggacagaacgtcagccttaacttgagagaagcactgaattggatcaaacttgagtataacaatccgaggatcctgatcgcagagaacggttggttcaccgatagtagagtgaaaactgaggacactactgccatctacatgatgaagaattttctgtcccaagtcctccaagcaatcagactggacgaaatccgcgttttcgggtacaccgcatggtccctcctcgatgggttcgagtggcaagacgcctacaccatccggaggggactgttttacgtggacttcaactcaaagcaaaaagaacgcaagccgaagagctcggcgcactactataagcagatcatccgggaaaacggcttctcactgaaagaatcgaccccggacgtccaaggtcagttcccatgcgatttcagctggggcgtgaccgaatcggtgctcaagccggaatccgttgcgtcatcccctcagttttctgatccgcacctgtacgtgtggaacgccaccggcaaccgactcctgcaccgggtggagggcgtgcgactcaaaaccagaccagctcaatgcaccgacttcgtgaacatcaaaaaacaactggagatgctggcgcgcatgaaggtaactcactaccgcttcgccctggactgggcctccgtgttgcccaccggaaacttgtccgcggtgaacaggcaagctcttcgctactaccggtgcgtcgtgtcggaaggactcaagctggggatttccgccatggtgactctttactaccctacgcatgcgcatctcgggctgcccgagcctctgctccatgccgatggttggctgaatccgtcaaccgccgaagccttccaggcatacgctggactgtgcttccaggaactgggagatctcgtgaaactgtggatcaccatcaacgaaccgaaccggctgtccgacatctacaaccgatcaggaaatgacacttacggagcagcacataatctgctggtggcgcacgccctggcatggcgcttgtacgacagacaattccgcccatctcaacggggagcggtgtcactttccctgcacgcagattgggctgaaccggctaacccgtacgccgacagccattggagggcagcagaaagattcctgcagttcgagatcgcatggttcgccgaacctctgttcaaaactggtgattacccagcggccatgagagagtacatcgcatccaagcacagacgcggccttagctcttcagccctcccccgcctgactgaggctgaacgccggctgctgaaagggacggtcgatttttgcgccctcaatcacttcaccacccggttcgtgatgcacgagcagttggctggatcgcgctacgacagcgatcgagacatccaattcctgcaggacatcacccgactctcctcacccaccaggttggccgtgatcccgtggggcgtccggaagctgctgagatgggtgcgccggaattacggagatatggacatctacataaccgccagcgggatcgatgaccaggccctggaggatgacaggctgcgtaaatactaccttggcaagtacctccaggaagtgctgaaagcctaccttattgacaaggtccggatcaagggttactacgcgtttaagctcgccgaagaaaagtcgaagccgcgctttggtttcttcacttccgactttaaggcaaaatcgtcgattcagttctacaataaggttattagctcacgcggatttcctttcgagaattcatccagccgctgctcgcaaactcaggaaaatactgagtgtactgtctgtctttttctggtgcagaagaagcctctcatcttccttggctgctgctttttctcaacccttgtgctgctgctgtccatcgccatcttccaacgccagaaacggcggaagttttggaaggcgaaaaaccttcagcacattccgctcaagaaaggcaagagggtcgtttcc

SEQ ID NO: 250627 - DNA, 3132 bp, synthetic construct
  misc_feature 1..3132: note = Description of Artificial Sequence: Synthetic coding sequence
  source 1..3132: mol_type = other DNA
atgaagccaggatgcgcagccggctccccgggcaacgagtggatcttcttctccaccgacgagatcacgacccgatacagaaacactatgtcaaacgggggccttcagagaagcgtgatcctgtccgccttgatcctgttgcgcgccgtgaccgggtttagcggggacggaagagcaatctggtcaaagaatccgaacttcactccggtgaacgagtcccagctgttcctgtacgacaccttccctaagaacttcttctggggaatcggaactggggcattgcaagtggaaggctcatggaaaaaggacggaaaaggaccatcgatctgggatcacttcatccatactcatctgaagaatgtgtcgagcacgaacggatcctccgattcgtacattttcctcgagaaggacttgagcgctctcgactttatcggagtgtcattctaccagttttctataagctggccgcgcctcttccctgatggcatcgtgaccgtggcaaacgccaagggactgcagtactactcgaccctgctcgatgctctcgtgctgcggaacatcgagcctatcgtgaccttgtaccattgggacctcccgctggccctgcaagagaaatatggtggatggaagaacgataccatcattgacatcttcaacgattacgctacctactgctttcagatgttcggcgatcgtgtgaagtactggatcactatacacaacccgtaccttgtggcatggcacggttacggcaccggcatgcacgcccccggagaaaaggggaatctggccgccgtgtacaccgtgggacacaacctgatcaaagcccacagcaaggtctggcataactacaacacccacttccgcccgcaccagaagggttggctcagcatcaccctcggttcacattggatcgaacctaacagatcggaaaatacgatggatatcttcaagtgtcaacaatcaatggtgagcgtgctcgggtggttcgcaaatccaatccacggtgacggcgactacccggagggaatgaggaagaaactgttctccgtgctccccatcttttcggaagcagaaaaacacgaaatgcgggggactgccgacttcttcgccttctccttcgggccgaacaacttcaaacccctcaatactatggcgaaaatgggccagaatgtctcactgaacttgcgggaggctctgaactggatcaagttggaatacaacaatccgcggatcctgatagcggaaaacggctggtttacggacagccgcgtaaagactgaggacactacggcaatttacatgatgaagaatttcctctcgcaagtgctgcaggcgatcagattggatgagatccgggtgttcggatataccgcgtggagcttgctggacggatttgaatggcaagacgcctacactatccggcgggggctcttctacgtggatttcaatagtaagcaaaaggaacggaagccgaaatcatctgcgcattactacaagcagattatccgcgagaacggattctccctgaaggagtcaactccagatgtccagggacaattcccatgcgacttttcgtggggagtcactgagtcggtgctgaagcctgaaagcgtggcaagctcgccacagtttagcgacccgcacctctacgtctggaacgccaccggcaatagactgctgcacagagtggagggcgtgaggctgaaaactcggcctgcccaatgcaccgatttcgtgaacatcaaaaagcagctggaaatgctcgctcgcatgaaagtgacgcactataggttcgcattggactgggcatcggtgttgccgaccggaaatctttccgctgtaaacaggcaggctctgcgatactaccgatgtgtcgtctctgagggcctgaagctgggtatctcagcgatggtcaccctgtactacccaactcatgcgcatctgggtctgccggaacctctgctccatgccgatggatggctgaatcccagcacggccgaagcatttcaagcctatgcgggcctgtgctttcaggaattgggagatcttgtgaagctctggattaccattaatgagccgaaccggctgtccgacatctacaataggtccgggaatgatacttacggcgccgcacacaacctgctggtggcacatgcccttgcatggcgcttgtacgatcggcagttccggccctcacaaagaggagccgttagcctttccctgcatgcggactgggctgaacctgcgaacccatacgcggactcccactggcgcgccgctgagcggttcctgcagttcgagattgcttggttcgcggaacctctgttcaagaccggagattacccagcggccatgagggaatacatcgcttccaaacaccgccgcggactctccagttcggcgctgccaagactgactgaagcagaacggaggttgctgaaagggactgtcgatttttgcgcactgaatcactttaccactagattcgtgatgcacgaacagctggcgggatccagatacgactcggaccgggacattcaatttctgcaggatattactagactctcgtcgccgactagattggccgtaatcccgtggggtgtgcgcaaattgcttcgctgggtgcggagaaactacggagacatggacatctatatcactgcctcgggaatcgacgatcaggcattggaggacgaccgcctcaggaagtactaccttggtaagtatctgcaggaggtcctgaaagcctacctcatcgataaggtgcgcatcaagggatactacgcattcaagctggcagaagagaagtccaagccgcgctttggtttcttcacttccgatttcaaggcaaagtcatccatccagttctacaataaggtcattagctcccgtggattcccattcgagaattcgagcagccggtgctctcagacccaggaaaataccgagtgcaccgtgtgcctcttcctggtgcaaaagaagccactcatctttctgggatgttgtttcttttccactctcgtcttgttgctctcgatcgctatctttcaacgtcagaagaggcggaagttctggaaagcgaagaatctccagcatatcccactcaaaaaggggaaaagagttgtgtcc

SEQ ID NO: 250628 - DNA, 3132 bp, synthetic construct
  misc_feature 1..3132: note = Description of Artificial Sequence: Synthetic coding sequence
  source 1..3132: mol_type = other DNA
atgaaaccgggatgcgctgcaggcagcccaggcaatgaatggatctttttttccactgatgaaatcactaccagatatagaaataccatgtctaacgggggacttcaacggagcgtgattctgtctgctctcattctgctcagggcggtcacggggttttctggcgatggccgggccatctggtcaaagaatcctaattttactcctgttaacgaaagtcagttgttcttgtatgatacctttccaaagaactttttttggggtattggaaccggcgcgctgcaagtggaaggctcttggaagaaagatggaaaaggcccttctatttgggatcacttcatccatacgcatctcaagaacgtaagttctaccaatgggagctccgatagctatatattcttggagaaggatctttctgcactggactttatcggcgtgtccttctatcagttcagcatatcatggccgagattgtttccagatggtatagtgaccgtggctaacgccaaaggactgcagtactactctaccctcctcgatgctcttgtgctgcggaacatcgagcccattgttactctctaccattgggacctgcccctggcccttcaagaaaaatatggaggctggaaaaacgatactataatcgatatctttaacgactacgccacgtactgctttcagatgttcggagaccgggtgaaatattggatcactatccacaatccatatctggtagcctggcatggctatggcacagggatgcatgctccaggtgagaaaggaaacctggccgctgtttacacagtgggccacaacctgatcaaagcccactctaaagtttggcacaattacaacacccactttagacctcaccagaaaggctggttgtcaatcaccctcggatcccattggatcgagcctaatcggagcgaaaacaccatggacatctttaaatgccaacagtccatggtttccgtactcggttggttcgccaatcccatacacggcgacggcgattaccctgaaggcatgcggaaaaaactcttcagtgtactgccaattttctccgaggcagagaagcatgaaatgcggggcactgccgacttcttcgcgttttccttcgggccaaataattttaaaccgctgaacactatggcgaagatgggacagaatgtgtccctcaatttgagggaggcactgaactggattaagctcgagtataataacccgaggatcctgatcgcagaaaatggctggttcactgacagcagagtcaagacagaagataccactgccatatatatgatgaagaacttcctgagccaggttcttcaggctatccgactcgatgagatccgggtgttcggctatactgcatggtcactgctcgacggtttcgaatggcaagacgcctacaccattcgaaggggcctgttttatgtggatttcaacagtaaacagaaggagagaaagcctaagagctccgcccactattacaaacaaattatacgagagaacggctttagcctgaaggaaagtacccctgacgttcaggggcagtttccatgcgacttctcatggggtgtcaccgagtcagtgctgaagccggaatccgtggctagcagtcctcagttttctgatccccacctgtatgtgtggaatgccaccggcaaccgactgctgcatcgagttgagggcgtgagactcaagacacggccagcacaatgcacagacttcgtgaacatcaagaaacaactggagatgctggcgagaatgaaagtgactcattataggttcgcactcgattgggcgagcgttctgccaactggcaatctgagtgcagtgaaccgacaggcccttaggtattatcggtgtgtggtatctgaaggcttgaagctgggtatttccgctatggtcaccttgtactaccccacacacgcccacctgggcttgcctgagcccctgctgcacgctgacggttggctgaacccctcaactgcagaggctttccaggcctacgcagggctgtgcttccaggagctgggcgatctggttaagctgtggatcacaattaatgagcctaacaggttgtcagatatctataaccgctccgggaatgacacatatggtgccgcccataatctgttggttgcccacgctttggcctggcgcttgtacgatcgccagttccgccccagccaacgcggtgccgtatcactgtcacttcacgctgactgggctgagcctgccaatccatacgccgactcccattggagagccgccgagagattcctccagtttgaaatcgcgtggttcgccgagcctctgttcaagaccggcgattatcctgccgctatgcgggaatacattgcaagtaaacaccgccggggccttagctcaagcgcactcccaaggttgaccgaagctgagaggcgcctgttgaagggtacggtggatttctgcgcactgaatcattttacaaccaggttcgtgatgcacgagcagctcgccggttccagatacgactccgaccgcgacatacaattcctgcaggacataaccaggctgagcagcccgaccagactcgctgtcattccctggggcgttcggaagctgctgcgctgggttcggaggaattatggtgatatggacatttatataaccgcgtccgggattgacgaccaagcactcgaggatgacagacttaggaagtattaccttgggaaatatttgcaggaggtgctcaaggcttacctgatcgataaggtcagaattaagggctactacgctttcaagctggctgaagaaaagagtaaaccccgcttcggcttcttcacgagcgacttcaaagcaaagtccagcatacaattttataacaaagtaatcagtagtcgggggtttcctttcgagaacagcagttcaagatgctctcagacccaagaaaacactgaatgcacagtatgccttttcctggtgcaaaaaaagcccctgatctttctcggctgctgtttcttctctactcttgtcctgttgctgtccatcgccatcttccagcgccagaagaggagaaagttctggaaggccaagaatctgcagcacatccctctgaagaaaggaaagagggtggtttct

SEQ ID NO: 250629 - DNA, 3132 bp, synthetic construct
  misc_feature 1..3132: note = Description of Artificial Sequence: Synthetic coding sequence
  source 1..3132: mol_type = other DNA
atgaaaccaggatgtgcagcaggcagcccggggaatgaatggattttcttctccaccgatgaaatcaccactcgttaccgaaacacgatgtcgaatggtggtctgcaacggtccgtgatactgagcgcactgattcttttgagggctgtcaccggattctcgggagatggcagagcaatatggtcgaagaaccctaactttactcccgtcaatgaaagccagctgttcctctatgacacgttccccaagaatttcttctggggaatcggtaccggagctctgcaagtggaaggttcctggaagaaggacggcaaggggccctccatttgggaccactttatccacacgcatcttaagaacgtctcctcgaccaacggatctagcgatagctacattttcctggagaaggatctgagcgcacttgatttcattggcgtgtccttttaccagttttccatcagttggcccagactcttcccagacggaatcgtcactgtcgcaaacgcaaaaggccttcaatactactcgactttgcttgatgcactggtgctgagaaacatcgaaccgattgtcactctgtaccactgggatttgccccttgcgctccaagagaaatacggcggttggaagaacgatacgattattgacatctttaacgactacgcaacctactgttttcagatgtttggtgaccgagtcaagtactggattaccatccataacccttacctggtggcctggcatggatatggcaccggtatgcatgcgcctggcgaaaaaggaaacctggcagccgtgtacactgtgggacataacctgatcaaggcacattcaaaggtgtggcacaattacaatacccattttagaccacaccaaaaaggttggctctccattaccctgggatctcattggattgaacctaacagatcggaaaataccatggatatctttaagtgtcagcagtcgatggtgtccgtcctcggctggtttgctaacccaatccatggggatggcgactaccccgaaggaatgaggaaaaaactcttctccgtgcttcccattttcagcgaagccgaaaagcatgagatgcgggggaccgctgatttctttgcgtttagttttggccctaataactttaaaccacttaacacgatggcaaagatgggacaaaacgtcagccttaaccttcgtgaagccctcaattggatcaagctggaatacaacaatcctagaatccttattgcagaaaacggatggttcaccgattccagagttaagactgaagataccacggcaatctacatgatgaagaattttctctcgcaagtgctgcaagctattcggttggacgaaataagagtgtttggatacaccgcatggtcgcttctcgatggattcgaatggcaagatgcttacactataaggcggggtttgttctacgtggatttcaattctaagcaaaaggagcgtaagcctaagagctccgcacattactacaagcaaatcatcagagaaaatggtttctcccttaaggaatcgaccccagatgtgcagggacaattcccatgcgacttctcctggggagtcaccgagagcgtgcttaagccggaatcggtcgcctcatcgccacaatttagcgatccgcatctttacgtttggaatgctacgggaaaccggcttcttcatcgcgtggaaggcgtgcgcctcaagactcgccccgcccagtgtaccgattttgtcaacattaagaagcagctggagatgttggcacgcatgaaagtcacgcactaccggtttgcgcttgattgggccagcgtccttcctaccggaaacctttcggcagtgaaccgccaagcacttcggtactacagatgcgtggtgtccgaggggcttaagctgggtatctccgcaatggtgactctttactaccctacccacgcgcatctgggactgcctgagccgcttctgcacgccgatggttggctgaacccaagcaccgccgaagcatttcaggcctacgcaggcctgtgtttccaagaacttggggaccttgtgaagctgtggatcaccattaatgaacctaatcgcctgtccgatatctacaatcggtcgggaaatgatacctacggggcagctcacaacttgctggttgcacatgcgctggcatggaggttgtacgatcgacaatttcgcccctcacagcgcggagccgtttccctgtcgttgcacgcggattgggccgagcctgcaaacccgtacgcagattcccattggcgcgcagcagagcgcttcctgcaatttgagatagcatggttcgcagagcctcttttcaagaccggggactaccccgcagcaatgcgggaatacatcgcaagcaaacatagacgagggctgtcgtcgtcagcactccctcgacttaccgaggcagaaagacgactcctgaagggcaccgttgatttctgtgcgctgaaccactttactactagatttgtcatgcacgagcagcttgcaggatcccgttacgatagcgatagagatatccagttccttcaagatattactcgtctgtcgtcccctactcggctggcagtgatcccttggggagtcaggaagttgctgcgctgggtgcggagaaactacggggacatggatatctatatcaccgcgagcggtattgacgatcaagcacttgaagatgaccggttgagaaagtactaccttggaaagtaccttcaagaagtcctgaaggcatacctgattgacaaggtgaggattaaagggtactacgcattcaaactggcagaggaaaaatcgaagccgcgatttggatttttcacttcagactttaaggcaaagtccagcatccaattctacaataaagtcatctcctcaagaggtttcccatttgaaaacagcagcagcagatgctcgcagacgcaggaaaacacggagtgcactgtgtgtctgtttctggtgcagaaaaaacccctgatttttctcggttgctgcttctttagcaccttggtactgctgctctcgatagcaattttccagcgccagaaaagacggaagttttggaaggccaaaaaccttcaacatattcctctcaagaaaggaaaacgggttgtctcg

SEQ ID NO: 250630 - DNA, 3132 bp, synthetic construct
  misc_feature 1..3132: note = Description of Artificial Sequence: Synthetic coding sequence
  source 1..3132: mol_type = other DNA
atgaaacccggctgtgccgcgggatcccccggcaatgagtggatttttttttctacagacgaaattacgacccggtatagaaataccatgtccaacggtgggttgcagagatccgtaattctgtccgctcttattctgttgcgcgctgttacaggcttttccggcgatggcagagcgatttggtctaaaaacccaaacttcactcctgtcaacgagtctcaactcttcctgtacgacacatttccaaaaaacttcttctggggcattgggacaggagcgcttcaagtcgaaggatcctggaagaaagacggcaagggcccctctatatgggaccactttatccacacacatttgaaaaacgttagtagcaccaatggtagcagcgacagttatatcttcctggagaaagacctttctgctttggactttatcggcgtttcgttttaccaattctctatcagctggcctcgcctgtttccagacggtatcgtgactgtagcaaacgctaaaggcctccagtattactccacacttctggacgccctggtgcttcgcaacattgagcctattgtgacgctttatcattgggatctcccactcgccctgcaggaaaaatatgggggctggaagaacgacacaatcatcgatattttcaatgattatgccacctactgtttccagatgtttggcgaccgagtgaaatactggattactattcataacccatacctagtggcgtggcacggatatgggactggaatgcatgcccctggagaaaaaggcaacctagccgccgtgtataccgttggacacaatctgattaaggcacatagtaaagtgtggcacaactacaacactcacttcagacctcaccaaaaaggctggctgtcaatcaccctcggttcgcattggattgagcccaatcgcagtgaaaacacaatggatatcttcaaatgccagcagtctatggtgtcggtcttgggctggttcgccaacccaatacatggagatggcgattaccccgagggtatgcgcaaaaagctgttcagcgtgctgcctattttttctgaagcagagaagcatgagatgagagggacagccgatttttttgcattttcttttggacccaacaactttaaaccattgaataccatggccaagatggggcagaatgtatccctgaacctccgggaagctcttaattggatcaagctcgagtataataatccccgcattctcatcgctgagaatggatggttcacagattcccgcgtgaaaactgaggatactactgccatatacatgatgaaaaactttctcagtcaggtgctccaggcaatccgtttggacgaaattcgcgtattcgggtacaccgcctggtccctccttgatggtttcgagtggcaggacgcgtacaccatacggcgaggcctcttctatgtagattttaattcaaagcagaaagagcggaagcccaaatctagtgcacattactataagcagattattcgagaaaacgggttttccttgaaggagagcacccctgacgtccagggacagtttccttgtgacttttcttggggcgtaaccgaaagcgtgctgaagccggagagtgtggcctcaagcccacagttctctgatcctcatctctatgtttggaacgctaccggcaaccgactgttacacagggtggagggtgtgcgtcttaagacccggcctgcgcagtgcacggacttcgttaacattaagaagcagctcgagatgctcgcgcgaatgaaagtgacacattaccggtttgcactggattgggcgtcagtactccctacgggaaatttgtcggcagtaaaccgacaagccctccggtactaccggtgcgtcgtcagcgaaggtctaaaactgggcattagcgccatggtgaccttatattaccccactcacgctcatcttggacttcctgaaccgctactgcacgctgacggctggctcaatccgtctactgcagaggcctttcaagcctatgcgggcctttgttttcaagagctgggggatctcgtgaagctgtggatcactataaacgaacccaaccgattgagtgacatttacaacaggtcaggcaatgacacctacggggccgcgcacaatctcttagtggcccacgccctggcatggagactttatgaccggcagttccgcccctctcaacgtggtgccgtgtcactaagtttgcacgcagactgggccgaaccagcaaacccctacgcagatagccattggagggcagcagaacgctttctgcaattcgaaattgcctggttcgccgagccactgtttaaaactggggattatcccgcagcaatgagggagtatattgcctccaaacacaggcggggtctgtcgtcctccgccctgccaaggctaaccgaagcagagcgacgactcttaaaagggacagtagacttctgtgctctcaatcactttaccacccgatttgtcatgcacgagcaactggccggctctcgatacgactccgaccgcgacatccaatttctgcaagacattaccaggctgagctctccaactaggctggcagtgataccatggggcgtacgtaagcttctacggtgggtgcggagaaattacggggatatggatatttacattaccgcgtccggcatagatgaccaggctctagaagacgatcgcctgagaaagtactacctcggaaagtacctgcaggaagtactgaaagcatatctcatagataaggtcagaataaaaggctactatgcattcaaactagctgaggaaaagtccaagcctagattcgggtttttcaccagtgacttcaaagctaagtcatctattcagttctataataaagtgatatcctccaggggatttcctttcgagaacagcagttcccgctgttcacagacgcaggaaaataccgaatgcactgtctgtttattcctggtgcagaaaaagccactcatctttctgggatgttgtttcttttccaccctggtgttactgctgtcaatcgcgattttccagcgtcaaaagcgtagaaaattctggaaggctaaaaaccttcagcacattcctctaaagaaagggaagcgtgttgtgagc

SEQ ID NO: 250631 - DNA, 3132 bp, synthetic construct
  misc_feature 1..3132: note = Description of Artificial Sequence: Synthetic coding sequence
  source 1..3132: mol_type = other DNA
atgaagcccggatgtgcagctgggtccccagggaatgagtggattttcttctctacagatgagataactacacggtataggaacactatgagtaatggaggtctacaaaggtctgtcatactgtctgctctgatattgctgagggctgtgacaggctttagcggagatgggcgagctatctggtctaagaaccctaattttacgcctgttaatgagtcacagctttttctgtatgacacttttcccaaaaatttcttctggggcatcggcacgggggccctccaagtggaaggttcttggaaaaaggacggcaaaggcccatcaatttgggaccattttatacatactcacctgaagaacgtctcctctactaacggttcttctgactcctacattttcctcgagaaggacctgtccgccctggatttcatcggcgtttctttctatcaattctctatttcttggcctcggctcttccctgatggcattgtgacagttgctaatgctaaagggctccagtactacagcacactgctggatgccttggtgttgcgtaatattgagccgatcgtgaccctgtatcactgggatctgcccttggcactccaggagaaatatggtggatggaaaaacgacacgattatcgacatttttaacgactacgcaacctactgcttccagatgtttggtgacagggttaagtattggattactattcacaacccatatctggtcgcttggcatggttacgggacggggatgcacgcccctggagaaaaaggaaacttggcggcagtgtatacagtcggccataatctgattaaggctcatagcaaggtgtggcacaactacaacactcactttcgcccacatcagaaaggctggctttctatcaccctgggttcccattggattgaaccaaaccgatcggagaacaccatggacatctttaaatgccaacaaagtatggtgagcgtcctagggtggttcgccaatccgattcacggagatggggattacccagagggaatgcgcaaaaagctcttttcagtgctccctatcttctccgaggcagaaaagcatgagatgagagggactgctgacttctttgccttttcatttggtcctaataacttcaaaccactgaacacgatggccaagatggggcagaatgtgtccttgaacctgagggaggccctcaattggataaaactagagtacaataacccacggatcttgattgcagaaaatggttggtttaccgatagcagggtgaagactgaagacaccacagccatttacatgatgaaaaatttcctgtctcaggttctacaggctatacgtctggacgagatacgcgttttcggatacactgcatggtcgctccttgacggcttcgagtggcaagatgcttatacgattagaaggggcctgttctatgtggactttaattcaaagcagaaggagaggaagcctaagtcctctgcgcactactataagcagattattagggagaatggcttctccctcaaagagtctacacccgacgtgcagggccagtttccctgtgatttctcctggggggttaccgagtctgtactcaagcccgaatctgtggcttcctccccccaattctctgacccccatttgtacgtgtggaatgctacagggaatcgacttttgcatagagtggagggcgttagattgaagactagaccagctcagtgcacagattttgtcaacatcaagaaacagctcgagatgctagctcggatgaaggtcactcattaccggtttgcactggattgggcaagtgtgcttcccacaggtaatctctcagctgtgaacaggcaggccttgcgatactacagatgcgtagtgtcagagggtctgaagctcggaattagtgcaatggtgacgctctactatcctacccacgcacacctaggtttgcccgaacccctgctgcacgccgacggctggctgaacccaagcaccgcagaggcctttcaggcgtatgccggtctctgcttccaggagctgggcgatctagtgaagctctggatcaccattaacgaacccaaccgactcagtgacatctataaccgcagcgggaatgacacgtatggagcggcccacaatctcctggtcgcccatgccctcgcttggcggctgtacgatcggcagttcaggccttctcaaaggggtgcggtcagcctgtcattgcacgcggattgggccgagcccgctaacccctacgcagattctcactggcgggccgccgagcggtttctgcagtttgagattgcttggttcgcagaacctttgtttaagaccggtgattatcctgcagctatgcgagagtatattgcttccaagcaccggagggggctgagttcctctgcactgccacggttaacagaagcagaacgccgtttgttaaaaggtaccgtggatttctgcgcgctaaatcattttactacccgttttgtcatgcatgagcaattggcgggatctagatacgacagcgatagggatatccagttcctgcaggacattacgcgactgtctagccccacacggttagcagtgattccctggggtgttcgcaaactcctgagatgggtgagacggaactacggagacatggacatttatataacagcttccgggattgatgaccaggcgttagaggacgaccgtcttcgtaaatattatttgggtaaatatctacaggaggttctgaaggcatatctcattgacaaagtacgcattaaaggatattatgccttcaagttggcggaggaaaaatcaaagcccagatttgggttttttacatctgactttaaagctaaaagctcaattcagttttacaacaaggtaatatcgagccgcgggtttcccttcgagaactcctcttccaggtgttcgcagactcaagaaaacacagaatgtacagtgtgtttgtttcttgttcagaaaaagcccctgatcttcctggggtgttgctttttctctactctagtcctcttactgtccatcgcgatctttcagcgtcagaaacggaggaaattctggaaagcaaagaacctgcagcacattcccctgaagaagggcaagcgcgttgtatca

SEQ ID NO: 250632 - DNA, 3132 bp, synthetic construct
  misc_feature 1..3132: note = Description of Artificial Sequence: Synthetic coding sequence
  source 1..3132: mol_type = other DNA
atgaagcctggatgcgccgccggaagcccgggtaacgaatggattttcttctccaccgacgagattactacccgttaccgcaacacgatgtcgaatggagggctgcagcgctcagtgatcctgagcgcacttattctgctccgcgcggttaccgggttctctggagacggcagggcaatctggtccaagaatccgaacttcactccggtgaacgagtcacagctctttctgtacgatacctttcccaagaatttcttctggggaatcggaaccggagccctccaggtcgaagggtcgtggaagaaagatggcaagggtccgtcaatctgggatcatttcatccatactcacctcaagaacgtctcgtccaccaacggatcgtcggattcgtacattttcctcgaaaaggacctgtcagcactcgacttcatcggagtgtcgttttaccaattctccatttcttggccgcgcctgtttcctgatggaattgtgaccgtcgctaatgcaaaaggactgcaatactactcgactcttcttgacgccctcgtgctcaggaacatcgaacctatcgtcaccctgtaccactgggacctgcctttggccctgcaagaaaagtacggcggatggaagaacgatactatcatcgatatctttaacgactacgcaacttactgcttccaaatgttcggggaccgcgtcaagtactggatcaccatccacaatccgtacctcgtggcctggcacggctacggtaccggaatgcatgcccctggagagaagggaaacctggccgccgtctacactgtaggccataatttgatcaaggcgcatagcaaagtgtggcacaattacaacacccactttcgcccacaccaaaagggctggctgtcaatcacccttggttcccactggatcgagccgaatcgatcggagaacactatggacatctttaagtgccagcagtcaatggtgtcggtgttgggctggttcgctaatccgattcatggagacggtgattacccggagggaatgaggaagaagttgttctccgtgctcccgatcttctcggaggcggagaaacacgagatgcggggaactgcagacttttttgctttctcctttgggccgaacaatttcaagcctctgaatactatggccaagatgggacaaaacgtgtctcttaacctgcgggaagcgctgaattggatcaagctggaatacaacaatccgaggatcctgatagcagaaaatggctggttcaccgattctcgggtgaaaacggaggacactactgctatttacatgatgaagaacttcctgtcccaggtgctgcaggccatccggctggacgagatccgcgtgttcggctacaccgcatggtcgctgctcgatggctttgaatggcaggacgcatacaccatcagacgtggactgttctacgtggactttaactcgaaacagaaggaaagaaaaccgaagagctccgcccactactacaagcagatcatccgggaaaatggattcagtctgaaggaatcaacgccagatgtgcaaggacagtttccgtgtgatttctcgtggggggtgactgaaagcgtgctgaagcccgaatccgtggcgtcctccccccagttttcagacccccatctttacgtttggaacgcaaccggaaatcggttgctgcatcgggtggaaggagtcagactcaagacgaggccggcccagtgtactgatttcgtgaacatcaaaaagcagctcgaaatgcttgcgagaatgaaggtcacccattatcggttcgctctggattgggccagcgtgctgcccaccggaaacctgagcgccgtgaatagacaagcactccggtactaccggtgcgttgtttccgaagggctgaaactgggaattagcgcgatggtgactctctactacccgacgcacgcccacctgggtttgccagaaccactgctccacgcggacgggtggctgaacccatcgaccgcggaagccttccaggcttatgccggattgtgcttccaagaactcggtgacttggtgaagctgtggattactatcaacgagccaaaccgcctgagcgacatctacaaccgctcaggcaacgacacttacggagcggctcataacctgctggtcgcgcacgcgcttgcttggcgcctctacgatagacagttcagaccatcccagcggggagctgtcagcctcagccttcatgcagattgggccgagcctgctaacccctacgccgatagccactggagagcagccgagcgcttcctgcagttcgagatcgcctggtttgcggaaccactgttcaaaactggcgactacccagccgcgatgcgcgaatacatcgcctccaagcaccgacgcgggctgtcatcctcagctctgccgcggctcaccgaggcggaaagacgactcctgaagggaactgtcgacttctgcgcactgaaccacttcactaccagatttgtcatgcacgaacagctggccggttcccggtacgattcggatcgcgacatccagttcctgcaagacatcacccggctcagtagcccgacccgcctggcggtgatcccttggggcgtccggaaactcctgcgctgggtgaggagaaactacggagacatggatatctacataacggcttcaggcatcgacgaccaggccctcgaggacgaccggctgcggaagtattacttgggaaaatatcttcaggaggtgctcaaggcctacctcatcgacaaggtcagaatcaaaggctattatgcctttaaactggccgaagagaagtccaaaccacgctttggattcttcacctcagacttcaaggcgaagtcgtcgattcaattctacaataaggtgatctcaagccgcgggttcccgttcgagaactcgtcctcgcgctgctcccaaacccaagaaaatactgagtgcaccgtctgcctcttccttgtgcagaagaagccattgatcttcctgggttgttgtttcttctcgactctggtgctcctgttgagcatcgcaatcttccaaagacagaagaggcgcaaattctggaaagctaagaacctgcagcatatccctctcaaaaaaggcaagcgggtggtcagc

SEQ ID NO: 250633 - DNA, 3132 bp, synthetic construct
  misc_feature 1..3132: note = Description of Artificial Sequence: Synthetic coding sequence
  source 1..3132: mol_type = other DNA
atgaagcctggttgtgccgccggatcaccaggaaatgagtggatctttttctcaactgatgaaattacgactagatatcgcaacacaatgtcaaacggcggtcttcagagaagcgttatcctcagtgctttgatccttctgcgggccgtcacagggttttcgggagatgggcgggctatctggtccaaaaacccaaattttactccagtgaacgagagccaactgtttttgtatgacacctttccaaagaactttttctggggaattggaactggggccctgcaggtcgaggggagctggaagaaggatgggaaaggaccatctatttgggatcacttcatccacacgcacctaaagaacgtgtccagcactaatggatcgtccgatagctacatattcttggaaaaggacctgagcgccctggactttatcggtgtctcgttttaccagtttagcatcagctggcctcggctctttcctgatggcatcgttacagtggctaatgcaaagggcctgcagtattacagtactttgctggatgcactagtactgagaaacatcgagccaatagttaccctgtatcattgggatctgcccttagctttacaagagaagtatggagggtggaagaatgatactatcattgacatctttaatgattatgccacttattgttttcagatgtttggtgatagagtcaagtattggatcaccatccacaatccatacctagtcgcttggcacggttacggcacagggatgcatgctccaggcgagaaagggaatcttgccgcggtatataccgtagggcataatctgatcaaagcccacagcaaggtgtggcataactacaacacacactttagaccacatcagaaggggtggctcagtatcaccctcggcagtcattggattgaaccgaaccgctccgagaatacaatggatattttcaagtgccagcaatctatggtctccgtgctcggctggttcgccaatcctattcatggggacggcgactaccccgaagggatgcgaaaaaagctgttttccgtgctgccgatcttcagcgaggcagaaaaacacgagatgagaggtacagcggacttcttcgccttctctttcggcccaaacaactttaaacccctgaatactatggccaagatgggacagaatgtctctctgaacctgcgggaagcactgaattggattaaactagagtacaacaacccccggatcctgatcgcggagaatggctggtttaccgattcaagagtgaaaaccgaagacaccacggcgatatacatgatgaaaaattttctgtcacaggtactgcaggccattcggctagatgagattagggtctttggttacaccgcgtggtcgctcctcgacggctttgagtggcaggatgcgtacactatccgaaggggtcttttctatgtggacttcaattctaagcagaaagagaggaagccaaagtcgtccgctcattactataaacagataattagggagaacggattctcactgaaggaaagcacaccggatgtgcaaggccaatttccttgtgatttcagctggggcgttactgaatcagtgcttaagcccgagtcagtggcctcaagtcctcagttttccgaccctcacctctacgtgtggaacgcaaccggcaacaggctactgcacagggttgagggggtgaggttgaagacaaggccagcccagtgcacagatttcgtgaatattaagaaacagttggagatgctggcgcgaatgaaggtgacccactatcgcttcgcccttgattgggcaagcgtgctgcccacaggaaacctcagcgcagtcaatcgccaagcactgcggtattacaggtgcgtggtgtctgaaggcctgaaactgggaatcagcgctatggtgaccttgtactacccaacccacgcacacctgggcttgcccgaacccctcctgcacgctgacggatggctgaatccaagcacggcggaggccttccaagcctacgccgggctgtgtttccaggaactaggcgacctagtgaaactatggatcacgattaatgagcccaaccgacttagcgacatctacaatagatccggcaacgatacctacggagccgctcacaatttgttggttgctcacgctttagcctggcggctgtatgatagacaattccgcccatcacagcgcggagcagtgtcattgagccttcacgcggactgggccgagccggcaaacccttatgcggactctcactggcgcgcagcggaaaggttcctgcagttcgaaatcgcttggtttgcagaaccactgttcaagacaggtgactaccctgctgccatgagagagtatattgcctccaaacacaggcgaggcttatcctctagcgcacttccacggctcacagaggcagagagacggctcttaaaaggaacagtggatttctgcgcgttgaaccactttaccacacgctttgtgatgcacgagcagctggccggatcccgctacgactcagaccgcgacattcagttcctccaggacatcacacggttgtcttcacctacccggctcgcggtaattccatggggggtccggaagcttttacgatgggtccggaggaactatggtgatatggatatctacatcactgcaagtgggatagacgatcaggcccttgaggacgaccgcctgcgcaaatattatctaggaaaatatctgcaggaggttctcaaagcatacctgatcgataaagtgcgtataaaaggttattatgcttttaaactggctgaggagaagagcaagcccagattcggcttttttacaagcgacttcaaggccaaaagctccatccagttttataataaggtgatcagttcacgtgggtttcccttcgagaattcgtcctcaagatgtagtcagactcaagaaaacaccgagtgcaccgtgtgtctctttctggtacagaaaaaaccgctcatcttcttgggctgttgctttttctccacccttgtattgcttctgagcatcgcaattttccagagacagaagagacggaagttctggaaggctaaaaacctgcagcatattccgttgaaaaagggcaaacgagtggtgtct

SEQ ID NO: 250634 - DNA, 3132 bp, synthetic construct
  misc_feature 1..3132: note = Description of Artificial Sequence: Synthetic coding sequence
  source 1..3132: mol_type = other DNA
atgaagccgggatgcgcagctgggagtccggggaacgagtggatcttcttttcgaccgacgaaatcaccactagataccgcaacactatgtcaaatggaggcctgcagagatcggtgatcctgtccgcactcattttgctgagagccgttactggattttcgggcgacggccgcgcaatctggtccaaaaatcccaatttcacgccagtgaacgaatcacaactgttcctgtacgatacctttccaaagaatttcttttggggcatcggtaccggtgctcttcaagtcgagggatcatggaagaaggacggcaaagggccctcgatctgggaccatttcatccacacccacctgaagaacgtctccagcaccaacggaagctcagactcctacatcttcctcgagaaggacctgtcggctctggacttcatcggcgtctccttttaccagttctcaatctcctggccaaggctctttcctgacggaatcgtgaccgtggcgaacgcaaagggattgcagtactactccactctgctggatgcgctcgtgctgcggaatatcgaacctatcgtgactctctaccactgggaccttccactcgctctgcaggagaagtatggcggatggaaaaatgacaccatcattgatatcttcaacgactacgccacttactgcttccaaatgttcggcgatagagtcaagtactggatcaccatccacaatccttacctggtggcctggcatggctatggtactggaatgcacgcacccggggaaaagggcaacctggccgcagtgtacacggtgggacacaatcttatcaaagctcactcgaaagtgtggcataactataacacccatttcagacctcatcagaagggctggttgtcaatcactttgggctcccattggatcgagccgaatcgttcagaaaacactatggacatcttcaagtgccaacaatccatggtgagcgtgcttggatggtttgctaacccgatccacggagacggagattatccagaagggatgagaaaaaagttgttctcagtcctcccaatcttctcggaagcggaaaaacacgaaatgagaggcaccgccgacttcttcgccttcagcttcggacctaataacttcaagccacttaacactatggccaagatgggacagaacgtctccctgaacctgagagaagcattgaactggatcaagctggagtacaacaatccgcgcatcctcatcgccgagaacggatggtttaccgattcccgggtgaaaaccgaggacacgaccgccatctacatgatgaagaacttcctgtcgcaagtgttgcaggcaatccgcctggatgagatccgggtgtttggatacacggcgtggtcactgctggacggtttcgagtggcaggacgcgtacaccattcggcgcggactgttctatgtggacttcaactcgaagcagaaggagcgtaagccgaaatcctcagcccattactacaaacagattatcagagaaaacgggttttcgctcaaggagtccacccccgacgtgcagggccaatttccttgtgatttttcctggggcgtgactgaatccgtgctgaaaccagaatcagtcgccagctcgccacagttctcggatccgcatctgtacgtgtggaacgcaaccgggaaccggttgctccaccgggtggaaggagtgagactgaaaacgcggccggcacagtgcaccgacttcgtgaacattaagaagcagctggagatgcttgcccggatgaaggtgactcattaccgcttcgctctggattgggcatcggtgctgccgactggaaatctctccgccgtgaaccggcaggccctgcgctactaccgctgcgtcgtgagcgaaggactcaagttgggcatctcggcaatggtgacgctctattacccaactcacgcacatctcggcctgccggagccactgctccacgcggacggttggctcaatccttcgactgcggaagccttccaggcatacgccgggctctgcttccaggagttgggtgacctcgtgaagctgtggatcactattaacgaaccaaaccggctgtcggatatctacaatagatcgggaaacgacacttacggagctgcccacaacctgctggtggcccacgctctggcctggcggttgtacgatcgccagttccgaccctcccagagaggtgctgtgtccctttcgttgcacgccgactgggcggaaccggccaacccatacgccgacagccattggcgggccgcggagaggttcctccaatttgagatcgcctggtttgcggaaccactgtttaagactggagattaccctgccgcaatgcgcgaatacattgcctcgaagcatcggcggggactgtcatcgtccgcattgccccggttgactgaagcagaacgcaggctccttaagggaactgtggacttctgcgccctgaaccactttaccacgagattcgtgatgcatgagcagctcgctggatcacgctacgactccgatagagatatccagttcctgcaggatatcactagactctcgtcccctacccggctggcggtgatcccttggggagtccgcaaactgctgaggtgggttcggcggaactacggagacatggatatctacatcactgccagcggaatcgatgaccaggctctcgaagatgaccgcctgagaaagtactacctcggaaagtacctgcaggaagtcctcaaagcctacctgatcgacaaagtgcgtatcaaaggatactatgccttcaagctcgccgaagaaaaatcaaagccccgctttgggtttttcactagcgacttcaaagctaagtcctccattcaattctacaataaggtgatctcatcgaggggattcccgttcgaaaactcctcctcacgctgctcccaaacccaggagaacaccgaatgtacggtctgtctcttccttgtccaaaagaagcctctgatcttcttgggatgctgctttttctcgactctggtgctgctcctgagcatcgcgatcttccagcggcaaaagagacggaagttctggaaagccaagaatctgcagcacattcccttgaaaaagggcaaacgcgtggtgtca

SEQ ID NO: 250635 - DNA, 3132 bp, synthetic construct
  misc_feature 1..3132: note = Description of Artificial Sequence: Synthetic coding sequence
  source 1..3132: mol_type = other DNA
atgaagccagggtgcgccgctggctctccgggaaatgaatggatctttttctccacggacgaaatcaccaccagataccgcaacaccatgtctaatggtgggctgcaacggtcagtaatcctgtccgccctgatactcctcagggcagtgaccggtttctccggagacgggcgggctatctggtccaagaacccgaactttacgcctgtgaatgagagccagcttttcctgtacgatacttttccaaaaaacttcttttggggcattggaaccggagcgctccaggtcgaggggagctggaaaaaggatggaaaaggcccatcgatttgggaccatttcatccatacccatctcaagaatgtttcgagcaccaacggcagctcagactcgtacattttcttggaaaaagacctttccgcactggactttatcggcgtgagcttctaccaatttagcatcagctggccgaggctgttcccggatggcatcgtgaccgtggcaaacgcaaagggactgcaatactatagcactttgctggatgcgctcgtgctgcgcaacattgagccaattgtcactctgtaccattgggacctccccctggcactccaagaaaagtatggaggatggaagaacgacaccatcatagacatcttcaacgattacgccacttactgcttccagatgttcggtgaccgggtgaagtactggattaccatacataatccgtacttggtggcatggcacggatacggcaccgggatgcacgctccgggcgaaaagggaaacctggcggccgtctacactgtcgggcacaatctcatcaaggcacacagcaaggtgtggcacaattacaacacgcacttccggccgcaccaaaagggatggctttcgatcacgttgggatcgcattggatcgagccgaaccggtctgagaacaccatggacatctttaagtgccagcagtcgatggtgtccgtgctgggctggttcgcaaaccctatccacggtgacggagactacccggaggggatgcgcaaaaagctgttttcggtgctgccaattttctcggaagccgaaaaacacgagatgcggggcactgccgatttcttcgccttttcgtttggccctaacaatttcaagcctctcaacactatggcgaagatgggacagaacgtgtcactgaatttgagagaagcgctcaactggatcaaacttgaatacaataacccccgaatcctgatcgcggaaaatggatggttcactgacagcagagtcaagactgaggacaccactgccatctacatgatgaagaatttcctctcgcaggtgctgcaggcaatccgcctcgatgaaatccgggtgttcggctacaccgcctggtccctgctcgatgggttcgaatggcaggacgcctacactatcagacgcggcctcttctacgtggatttcaattccaaacagaaagaacggaaaccgaagtcgagcgcccattactataagcagatcatacgggagaacgggttctccctgaaggagtcgaccccggatgtgcaaggacagttcccctgcgatttctcatggggtgtgaccgagtctgtgcttaaaccggagtcagtcgcatcttccccccaattctcggaccctcacctgtacgtctggaacgcaactgggaatcggctccttcaccgggtcgaaggggtcagactgaaaacgcgacctgcgcaatgtacggacttcgtgaacatcaaaaaacaactcgaaatgctggctcggatgaaagtgacccattaccgcttcgctctcgattgggcgtccgtgctccctacggggaacttgtccgccgtgaacagacaggcattgcgctattacagatgtgtggtcagtgagggtctgaagctgggtatctccgcgatggttaccctctactacccaacgcatgcgcacctgggactccctgagccactcctccatgccgacggatggctcaacccgtccaccgccgaggcttttcaagcgtacgccggtctgtgcttccaggagctcggggatctcgtgaagctgtggatcaccatcaacgaaccgaatcgcctgtcggacatctacaatagatcgggcaatgatacttatggggcggcccacaacctgttggtcgctcacgcccttgcgtggcggctgtatgacaggcagttccgcccgtcccaaagaggagcagtgtccctgtcactgcatgctgattgggccgagccagctaatccgtacgcggatagtcattggcgagcggctgaacggtttctgcagttcgaaatcgcctggttcgccgaaccacttttcaagaccggcgactacccggccgccatgagggagtacatcgcttccaagcaccgcaggggactgtcctcaagcgcactgcctcggctgaccgaagccgagaggcgcctgttgaagggtaccgtggacttttgcgcgctcaaccacttcactaccagatttgtgatgcacgaacagctcgctggctccaggtacgatagcgatagggacatccagttcctccaagacatcacccggctctcgtcgccgacccggctggcagtgattccttggggagttcggaagctgctgcgctgggtccgcagaaattacggagacatggacatctacatcactgcatccggaatcgacgatcaggcgctggaagatgaccgcctgagaaaatactacctgggaaagtacctccaagaagtgctcaaggcgtatttgatagacaaggtgcgcatcaagggatactacgcctttaagctggccgaagaaaagtcgaagcctcgttttggattcttcacttcggacttcaaggccaaatcctcaatccagttctacaacaaggtcatttcctctcgtggattcccgtttgaaaactcgtcctcacgctgcagtcaaacccaggaaaacactgaatgtaccgtttgtctcttcctggtccagaagaaacctctgattttcctcggatgctgcttcttttccactttggtgttgctgctgtcaatcgccatcttccaacgacagaaacggcgcaagttctggaaggcgaagaatctccagcacatcccgctgaaaaagggcaaacgtgtcgtctcc

SEQ ID NO: 250636 - DNA, 1506 bp, synthetic construct
  misc_feature 1..1506: note = Description of Artificial Sequence: Synthetic coding sequence
  source 1..1506: mol_type = other DNA
atgtcatgcccagtgccggcatgctgtgcgcttctgctggttctcggtctttgtagggcaaggccgagaaatgcgcttctcctccttgcagatgatggtggatttgaatccggtgcatacaataactcagccatcgcaacccctcatctggatgcactggcgcgcaggagcctgcttttcagaaacgcctttacgtccgtgtcgtcatgctcccctagccgggcatctctgctcaccggtctgcctcagcatcagaatggtatgtacggactccaccaggacgtgcaccatttcaattcgtttgataaagtgcggtcactgccccttcttctcagccaagcgggggttcgcaccgggattattggcaaaaaacatgttggtcccgagactgtgtacccgttcgactttgcttatactgaagaaaatggatcggtccttcaagtgggacgaaacatcacgcggatcaagctcctggtgagaaagtttctgcaaactcaggacgaccgtccttttttcctgtacgtggcgttccacgatccacaccgatgtggacactcgcaacctcagtacggcaccttttgtgaaaagttcggtaacggagagtcaggcatgggacgcatccccgactggactcctcaagcatacgatccactggacgtgctggtgccttactttgtgccgaacactcctgctgccagagcagatcttgccgcacagtacactactgtgggacggatggatcaaggcgtgggtttggttctccaagaactgagagacgctggggtcctgaacgacactctggtcatcttcaccagcgataacggtataccatttccctcggggcgaactaatttgtactggccaggtacggcagagccacttctggtttcatcacctgaacatcctaagcggtggggtcaagtgtcagaggcctacgtgagccttcttgatttgacgcctactattcttgactggttttccattccttacccttcgtacgcaatctttggatcgaaaaccatacacctcaccggccgcagcttgctcccagcgctggaagcagaacctctgtgggcaaccgtgtttggcagccagtcacaccacgaagtcaccatgtcctacccgatgcgttcggtccaacataggcattttaggcttgtgcataacctgaacttcaagatgccttttcctattgatcaagacttctacgtgtcccctacgttccaggacctcctgaatcggactaccgcggggcagccaaccggatggtacaaggacctgcggcactactattaccgtgctcgctgggagctttacgatcgaagcagagatccgcacgaaacccaaaacctggcaactgatccgcggtttgcccagcttttggagatgctgcgggatcaacttgcaaagtggcaatgggaaacgcatgatccttgggtgtgtgcaccagatggagtgcttgaagagaagctgtcgccccaatgtcaaccactgcataacgaactc

SEQ ID NO: 250637 - DNA, 1506 bp, synthetic construct
  misc_feature 1..1506: note = Description of Artificial Sequence: Synthetic coding sequence
  source 1..1506: mol_type = other DNA
atgtcctgccctgttcccgcgtgttgtgccttgctgctggtcttggggctgtgtcgcgcacgtccgagaaacgccctgctgctcctggccgacgatggtggctttgagtccggtgcatataacaactccgccatcgcgaccccgcacctggatgccctggcgagacgctcgctcctgttcagaaatgcgttcacttcggtaagctcctgctccccttccagagccagcctgctgacaggcttgccccagcaccaaaatggcatgtatggactgcatcaggacgtccatcacttcaactccttcgacaaagtaagatccctacccctcctgctgtcgcaggccggagtccgcaccggtattatcggtaagaagcacgtcggcccagaaacggtttaccccttcgacttcgcctacactgaggagaacggatcggtactgcaggttggaagaaacatcacccgaatcaagttgctggtccgtaagttcctacaaactcaagacgaccgtccctttttcctttacgttgctttccacgatccccaccgctgtggacattctcagccccaatacggtaccttctgcgagaagttcggaaacggcgagagcggcatgggtcgcatccccgattggaccccccaagcctacgatccgctcgacgttctggtcccctacttcgtgcctaacactcccgccgcccgtgccgacctggctgctcagtacaccacagttggtaggatggatcagggcgtcggtttggtcctgcaggagctgagggacgccggtgtgctgaacgataccctcgtcatcttcacctccgataacggcattcctttcccgagtggtcgcaccaacctctattggcccggaaccgccgagccccttctggtgtcgtctcctgagcatcccaagagatggggacaggtgagcgaggcgtacgtatcacttctcgaccttaccccgacgatcctggactggttctccatcccctaccctagctacgccattttcggttctaaaaccatccatttgacaggacgatctcttctccccgctctcgaagctgagccgctctgggccacagtttttgggtcacaatcgcaccacgaggtcaccatgtcctaccctatgcgcagcgttcaacaccgtcacttccgtctggtccataacctcaacttcaaaatgcctttccccattgatcaagatttctacgtttcgccgaccttccaggacctcttgaatcggaccaccgccggccagcctacggggtggtataaggatctgcgccattactactatcgcgcgcgttgggaactctacgaccgttcccgcgacccacacgagactcagaaccttgctacggatccacggttcgctcagctcctagagatgttgcgggatcaattggctaagtggcagtgggagacgcacgacccttgggtgtgcgctcccgatggcgtactcgaggagaagctcagcccccagtgccagcctctgcataacgagctt

SEQ ID NO: 250638 - DNA, 1506 bp, synthetic construct
  misc_feature 1..1506: note = Description of Artificial Sequence: Synthetic coding sequence
  source 1..1506: mol_type = other DNA
atgtcgtgtccagtccctgcctgctgcgcattgttattagtcttgggcctatgccgcgctaggcccagaaatgctctgctcttactcgcagacgatggtggtttcgaatccggggcatataacaacagtgctattgctacgccacatcttgatgcacttgctcggaggtcactgcttttccgaaacgcattcactagtgtttcaagttgttccccctccagggcttcactcttaactgggctgccacaacatcagaacggtatgtacggactgcaccaggatgttcatcatttcaacagttttgataaggtaaggagcttacctcttttgctttcccaagccggagtcaggactggtatcatcggaaagaaacacgttggtccagaaacagtctatccgtttgacttcgcttatacagaggagaatgggagtgtccttcaggttggcaggaatattacaagaatcaagctgcttgttagaaaatttctccaaacacaagacgataggccattcttcctttacgttgcttttcacgatcctcataggtgtgggcattcccagccacagtacggaactttctgtgagaaatttgggaacggagagtcaggtatgggtaggattccagattggactccacaggcctacgatcctttggatgtcctggtcccatatttcgtgcctaacactcccgctgcaagggcagatcttgctgcccagtacaccacggtgggaaggatggatcaaggagttgggctggtgcttcaagaacttagggacgcgggcgtgttgaacgacacattagtgatctttacctcagataacgggatcccattccccagtggacgaactaatctttactggccaggtaccgccgagcccttgttagtttcttcccctgaacatccgaagagatggggacaggtgtccgaagcttatgtctcattacttgatcttactcctaccattcttgattggttctcaatcccttaccctagctacgctatattcgggtctaagaccattcaccttacaggccgatccctgttaccagcacttgaagcagaacccctttgggcgaccgtcttcggatctcaaagccaccatgaggtcactatgagctatccaatgaggtccgtccagcatcgtcatttccgtcttgttcacaacttaaacttcaagatgccatttcccatcgatcaagacttttacgtgtcgccaactttccaggaccttcttaacaggacgactgcaggccagcctaccggctggtacaaggacctcaggcattattattacagagcacgatgggaattgtatgacaggtctagagatcctcatgaaactcaaaaccttgctacagatcctaggtttgcccaactgttggaaatgctccgcgatcagctggcaaaatggcagtgggaaacacacgatccctgggtctgcgctccagatggagtcttggaggaaaagttaagtcctcaatgccagccacttcataacgaactc

SEQ ID NO: 250639 - DNA, 1506 bp, synthetic construct
  misc_feature 1..1506: note = Description of Artificial Sequence: Synthetic coding sequence
  source 1..1506: mol_type = other DNA
atgtcgtgtcccgtcccagcgtgttgtgcgctccttctggtcctgggcctgtgtcgtgcccgcccacgcaacgcgctccttctcctggccgatgatggtggttttgaatcgggtgcgtacaacaactccgcgatcgcaacccctcaccttgatgcacttgcacggagatcgcttcttttcaggaatgcctttaccagcgtctcgtcttgtagcccatcccgtgcaagccttctgacggggcttccccagcaccaaaacgggatgtacgggctccaccaggatgtgcatcactttaactcgttcgataaggtcaggagcctcccgctcctgcttagccaagcaggagtgcgcactgggatcatcggtaagaaacatgtgggccccgaaaccgtctaccctttcgattttgcatacactgaggaaaacggaagcgtcttgcaagtgggtagaaatatcacgagaatcaaacttctggtgcgcaagtttctgcaaacccaggacgaccgtcctttctttctttacgtggcattccatgatcctcataggtgtggacactcacagccccagtacgggactttctgtgaaaagtttggaaacggcgagagcggaatgggacggatcccagattggacccctcaggcatacgatcccctggatgtccttgtgccatactttgtccccaacactccagcggcccgcgccgatttggcagcacaatacacgaccgtgggaagaatggatcaaggtgtggggcttgtgcttcaggagttgcgcgacgctggcgtcctgaatgacactcttgtgatctttacctcggataacggtatcccatttccttccggaagaaccaacctgtactggcctggaaccgcagaacctctgctcgtctcttccccagagcatcctaagagatggggtcaagtgtcggaggcatacgtgtcgttgttggacctgacccctactatattggattggttttccatcccgtacccttcctacgcaattttcggttcaaaaactatccatctgactgggcgttccctgttgcctgcccttgaagcagagccactctgggccactgtgttcggatcacaatcccaccatgaagtgactatgagctacccaatgagatctgtgcaacacaggcattttagactggtccataatctcaactttaagatgccatttccgattgatcaggacttttacgtgtcacctacctttcaagatttgctgaaccgaactactgcaggacaacctaccggatggtataaggatctcagacactactactatcgggcacgatgggaactttatgataggtcgcgggatcctcacgagactcagaatcttgctactgacccacggtttgcacaactccttgaaatgctgcgcgaccagcttgctaagtggcagtgggagacgcacgatccttgggtctgtgcaccagacggtgtgctggaagaaaagctctcccctcagtgccaaccactgcacaacgaactc

SEQ ID NO: 250640 - DNA, 1506 bp, synthetic construct
  misc_feature 1..1506: note = Description of Artificial Sequence: Synthetic coding sequence
  source 1..1506: mol_type = other DNA
atgtcctgtcctgtaccagcctgctgcgccctcctgttggttctggggctttgtagggcccgaccgcggaacgctctcctgctgctggccgacgatggtgggttcgaatcaggagcatacaacaactcggctatcgcgacgcctcacctcgacgcgcttgcgcgcagatcactgcttttccgcaatgccttcacttctgtgagctcatgctccccctcaagggcctcattgctgaccggactccctcagcaccagaatggaatgtacgggctgcaccaggacgtgcatcacttcaactcgtttgacaaagtgagaagcctccctctgcttttgagccaggcaggagtgcggaccggaatcataggaaaaaagcatgtgggaccagagactgtctacccgttcgatttcgcctacactgaggagaatggctcggttcttcaggtcggacggaacatcacccgtatcaagctcctggtgagaaagttcctgcagacccaagacgaccgcccgttttttctgtacgtggcctttcatgacccgcaccgctgcggacactcccagccacagtacggtacgttttgtgaaaagttcggaaacggagaatccgggatggggcggatcccggattggacgcctcaagcctacgacccgctggacgtgcttgtgccgtatttcgtgccaaacaccccagcggcacgcgcggaccttgctgcacagtatactaccgtgggaagaatggatcaaggcgtcggccttgtactgcaggaactccgggacgctggagtcctgaacgatactctggtgatctttacctcggataacggcatccccttcccttccggcaggactaatctgtactggccaggcaccgcagaaccactcctcgtctcatcgccggagcaccctaagcgctgggggcaagtatcagaagcgtacgtctcgctgctggacctcactccgactattttggactggtttagcattccgtatcctagctacgccatcttcgggagcaaaaccattcatctgactggccgctccctgctgccagccctcgaagccgaaccgctgtgggctaccgtgttcggctcgcaatcgcaccacgaggtgactatgtcctacccgatgagaagcgtgcaacaccgacacttccgcctggtccataatctgaacttcaaaatgcctttcccgatcgatcaggacttttacgtctcacctaccttccaagatttgttgaaccggaccactgcgggtcaaccgactggctggtacaaggacctgcggcactactactaccgggcaagatgggaattgtacgaccggtccagagatccgcatgagactcaaaatctggcgaccgatccaaggttcgcacagctgttggagatgcttcgcgatcagctggccaagtggcagtgggaaacccatgatccctgggtgtgcgctccggacggtgtgctggaagaaaagctgtcaccacaatgccagcccctccataatgagctc

SEQ ID NO: 250641 - DNA, 1506 bp, synthetic construct
  misc_feature 1..1506: note = Description of Artificial Sequence: Synthetic coding sequence
  source 1..1506: mol_type = other DNA
atgtcatgccccgtgcctgcctgttgtgccctgctgctggtgcttgggctttgccgcgcaagaccccgaaacgccctccttttgctggccgacgacggcggattcgagtccggcgcctacaataactcagcaatcgccactccacacctggatgcgcttgccaggcggtccctgctgttcaggaatgcctttacctcagtgtcgagctgtagtccatctcgggccagcctactgacaggcctaccccagcaccagaacggaatgtacggtcttcatcaagacgttcatcatttcaactctttcgataaagttcggagcttgcctctcctcctgtcacaggcaggggtcagaactggcatcataggaaagaagcatgtgggccctgagaccgtatacccgttcgactttgcgtacacagaggagaatggtagcgtgctgcaggtcggtaggaacatcacgcggattaaacttctggttagaaagtttttgcagacccaggatgatcggcccttttttctgtatgttgcatttcatgacccgcataggtgtgggcactcacaacctcaatacgggaccttttgtgagaagtttggcaatggcgaatccggcatggggagaattccggattggactcctcaggcttatgacccacttgacgtacttgtgccatatttcgtaccaaatacgccagccgcaagggcggatctcgcggcacaatacactacagtcggcagaatggatcaaggagttggactggtgctgcaggagctgcgcgacgcgggcgtgctgaacgacacgctggtcatttttacatccgacaatggtattcccttcccctctgggagaaccaatctctactggccaggcaccgcagagcccctgcttgtgagctcacctgaacacccaaagagatggggccaggtgagcgaggcatatgtgtctcttctggacctgacccctaccattctggactggttttcaattccttacccatcatatgccatcttcggatccaagacgattcatctcactggccgctcacttctccccgccctggaggctgagcctttgtgggccaccgtcttcggctctcagagtcatcacgaagtcacgatgagttatcctatgaggtctgtccagcacagacacttcagactcgttcacaacttgaatttcaaaatgccttttcccattgatcaggacttctatgtctcacccacctttcaagacctactcaataggaccaccgccgggcagccgaccggatggtataaggatctgagacactactactacagggcacgctgggaattgtacgatagaagccgcgacccacatgagacacaaaatctggcaaccgaccctagatttgcacagcttctggagatgttgcgggatcagctcgctaagtggcaatgggagacacacgatccatgggtctgtgcacccgatggggtgctcgaggaaaaactgtctcctcagtgtcagcccttgcacaatgaactg

SEQ ID NO: 250642 - DNA, 1506 bp, synthetic construct
  misc_feature 1..1506: note = Description of Artificial Sequence: Synthetic coding sequence
  source 1..1506: mol_type = other DNA
atgagctgtcccgtgccagcctgctgcgctctgctcctggtgctcgggctgtgccgcgctaggcccagaaacgccctgttgttactagccgacgacggaggatttgaaagcggggcatataacaactcagcaattgccaccccgcatctggacgccctggcacggaggtcattgttgttcagaaatgcatttacaagcgtcagctcctgctccccgtctcgggcgagtctgctgaccggtctgccacagcaccagaatggcatgtacggtctgcaccaggatgtccatcattttaattcttttgacaaggtgcgcagtctacccctactgctgtctcaggcaggcgtcaggacagggattattggaaagaagcacgtgggtcccgagacagtgtacccctttgacttcgcctacaccgaggagaatggttctgttctgcaagtgggcagaaacattacaagaataaagctcttagtgaggaagttcctacaaacccaggacgacagacccttctttttgtacgtcgcatttcacgacccgcaccgctgcgggcactcccaaccacagtacggcaccttttgcgagaagtttggcaatggagagagtggaatggggcggattccagactggacccctcaggcctatgacccactagacgtgctagtgccctacttcgtccccaatacaccggccgcaagagctgacttggccgcgcaatacaccacagtgggccgaatggatcagggggtgggattagtgttgcaggaactgcgcgatgcaggggtgttaaatgacacccttgtgatctttacttcggacaatgggatacctttcccgagcggacgaacaaacctgtactggcccggaacagccgagcctctgttggtcagctctccagagcaccctaagcgttgggggcaggtgtccgaagcgtacgtctctctgctggacctcacgcccaccattctggactggttctctatcccatatccaagctacgcgatcttcgggagcaaaaccattcacctcactggccgatctttactgccggccctggaggcagaacccctttgggccaccgtcttcggcagccagagccatcacgaggtgactatgtcctaccccatgcggtccgtccaacacagacacttcagactagtccacaatctgaacttcaaaatgccctttcccatcgatcaggacttctacgtgtcccctacatttcaggacctccttaatagaacaactgcggggcagccgactggttggtataaggatcttaggcattactactatcgggcaaggtgggagctgtacgatcgctccagagatccgcacgagacccagaatcttgcaactgatcccagatttgcccaactcctggagatgcttagagaccaactggccaagtggcaatgggagactcatgatccatgggtttgcgctcccgacggggtcttggaagagaagttaagccctcagtgccagccacttcacaatgaactt

SEQ ID NO: 250643 - DNA, 1506 bp, synthetic construct
  misc_feature 1..1506: note = Description of Artificial Sequence: Synthetic coding sequence
  source 1..1506: mol_type = other DNA
atgtcgtgcccagtcccagcatgctgcgcgctgcttctggtgctcgggctctgccgggccaggccaagaaacgcgctcctcctgctggctgacgatgggggattcgagtcaggtgcctacaacaactcagctatcgccaccccgcacctggacgccctggcacggagatcactgctgttccggaacgctttcacctctgtgtcctcgtgctccccatcccgggcatcgctcctcaccggactgccacagcatcaaaacggcatgtacggattgcaccaagacgtgcatcatttcaactcgttcgacaaagtcagatcactccctcttctgctgagccaggctggagtgaggactggaattatcggaaagaagcatgtgggacctgaaacggtgtacccatttgatttcgcctatactgaagaaaatgggtcggtgctgcaggtcggaagaaacattacccgcatcaaactcctggtgcggaagttcctgcagacgcaggacgatagaccgttcttcctgtacgtcgcctttcatgacccgcaccgctgtggacactcacagccccagtacggaaccttctgcgagaaatttggaaacggggagtcaggtatgggcagaatcccggactggaccccgcaggcgtacgacccactggatgtcctggtgccttacttcgtcccgaatacgccggcagctcgcgcggacctggcggcacagtacaccaccgtcggaaggatggatcagggtgtcgggttggtgctccaggagctgagagacgccggagttctgaatgataccctggtgatcttcaccagcgacaacgggatacctttcccttcgggaaggactaatctctactggcctggtacggccgagccgctgctcgtgtcatccccggagcacccgaagcgatggggccaagtgtcagaagcctacgttagcctgctcgatctgactccaacgattctggattggttctccattccttacccgagctacgctatcttcggcagcaaaaccatccatcttacgggtcggagtttgctgccggctcttgaagccgaaccactgtgggccaccgtgttcggatcccaatcgcaccatgaagtgaccatgtcgtacccgatgcggagcgtccagcatcgccacttcagactcgtgcacaatctgaacttcaagatgccgttcccgatcgatcaagacttctatgtgtcacccacttttcaggacctcctgaaccgcactaccgctgggcagccgaccggatggtacaaagatcttcgtcactactactaccgggcgcgttgggagttgtatgaccggtcccgcgatccgcacgaaacccagaacctggccaccgacccccgcttcgcccaattgctggaaatgcttcgggatcagcttgcgaaatggcagtgggagacgcatgacccttgggtgtgcgcgccagacggcgtgctggaggagaagctgtcacctcaatgccagccactccacaatgagctc

SEQ ID NO: 250644 - DNA, 1506 bp, synthetic construct
  misc_feature 1..1506: note = Description of Artificial Sequence: Synthetic coding sequence
  source 1..1506: mol_type = other DNA
atgtcctgtccggttccagcatgttgcgcgcttcttctggtcctgggactctgccgtgctcgcccccgtaacgcgctgcttctgctggcagatgatgggggatttgaaagcggtgcatacaataactcggcgattgcaaccccacatctcgacgcactggcgcggagatcccttctcttccgaaacgcatttacctccgtctccagctgctcccccagcagagcatctctgctgaccggtctgccacagcatcaaaatgggatgtacggtctgcatcaggatgtccaccatttcaactcatttgacaaagtgcgatcgctgcccctcctcctgtcgcaagcaggtgtgcgcactgggatcatcggtaagaaacatgtcgggcctgaaaccgtgtacccttttgattttgcctacacggaagagaacggatctgtccttcaggtgggtcggaacatcactcggatcaagctccttgtccggaaattccttcaaactcaagatgaccggccgttttttctctacgtcgctttccatgaccctcatagatgtggacattcccagccccaatatggaactttttgtgagaagtttggcaacggtgagtcgggtatgggcagaatccctgactggactccacaagcctacgatcctcttgatgtgctggtgccttactttgtgcctaacactcctgccgccagagcagatcttgcagcacaatataccactgtgggcagaatggatcagggagtcggacttgtccttcaagaactcagggatgcaggagtcctgaacgacactctcgtcatctttacctccgataatggaattccttttccatccggaagaaccaatctgtactggcctggcaccgcagagccacttctcgtctcgtcccctgaacatcctaaacggtggggtcaagtgtccgaggcctatgtgagcctgttggacctcactcccaccatattggattggttcagcataccttacccaagctacgcaattttcggtagcaaaaccattcatctgactggaagatccctgctgccggcattggaggctgaacctctgtgggcaaccgtgtttggttcccaaagccaccatgaagttaccatgtcgtacccaatgcggagcgttcaacatagacattttagacttgtgcacaacctgaactttaagatgcctttccctatcgatcaagatttctacgtttcgcctacgtttcaggacctgctgaatcgcaccaccgcaggtcagccaaccgggtggtacaaggatctgcggcattactactaccgtgcgcggtgggaactgtacgaccgatcacgggacccacacgaaacccagaatcttgccaccgatccaagatttgcccaactgcttgaaatgcttcgggatcaacttgcaaagtggcaatgggagactcatgatccttgggtgtgcgcacccgatggcgtgctggaagaaaagttgagccctcaatgtcaacccctgcataatgaactt

SEQ ID NO: 250645 - DNA, 1506 bp, synthetic construct
  misc_feature 1..1506: note = Description of Artificial Sequence: Synthetic coding sequence
  source 1..1506: mol_type = other DNA
atgtcatgtcccgtgcctgcgtgttgtgcgctgctgctggtgctgggactgtgtcgggcacggccaagaaacgcattgctcctgctggccgacgatggaggttttgaaagcggggcatacaacaactcggccatcgcaacccctcatctcgatgcacttgcacggcgatcgctcctctttaggaatgcatttacttcggtgtcgtcctgttcgccaagcagagcatcgttgcttaccggtctgcctcagcaccagaacggtatgtacggtctgcatcaagacgtgcatcatttcaattcatttgacaaagtgcgctcgctgccactcctcttgtcccaggcaggtgtaagaactgggataattggcaagaaacacgtgggtcctgaaactgtgtacccctttgatttcgcttacactgaggagaatggatccgttcttcaggtggggcgcaacattaccagaataaagctcctggttcggaagttcttgcagactcaggatgatcgccccttttttctgtacgtggcctttcatgatccccataggtgtggacattcgcagccccagtacggcaccttttgtgagaagtttggcaatggtgaaagcggtatgggaaggattcctgattggactcctcaggcatacgatcctcttgacgtcctggtgccttactttgtgcctaataccccagcagcgagggccgacctggcagcccaatacaccactgtgggccgaatggatcaaggagtgggtctggtgctgcaggagctgagagacgccggtgtccttaacgataccctcgtgatcttcaccagcgataatggaattccttttccatcgggacgcacgaatttgtactggcctggaaccgcagaaccgctcttggtgtcaagccctgaacatcctaagcgatggggtcaggtgtcggaagcgtacgtttcgctgctcgaccttacgccaacgattcttgattggttcagcatcccttatccttcgtacgcaattttcgggagcaagactatccacctcaccggtcggtccctgctgcccgcgctcgaggcagagcctctgtgggccaccgtgtttggatcccaaagccatcacgaagtgaccatgtcatacccaatgcggtccgtgcagcaccgacattttcgtcttgtccataacctgaactttaagatgccatttccaatcgaccaagatttctacgtgtcacccacttttcaagatcttcttaaccgtactaccgcaggacagcctacgggatggtacaaggatctgcggcactactactaccgcgctcggtgggaactttacgacagatcccgtgacccccatgagactcaaaacctggctaccgatcctcgctttgctcagcttttggaaatgctgcgagatcaactcgcaaagtggcagtgggaaacccacgatccttgggtgtgtgcacccgatggtgtgcttgaggagaaactgtcgccccaatgtcaaccactgcataacgaactt

SEQ ID NO: 250646 - DNA, 1506 bp, synthetic construct
  misc_feature 1..1506: note = Description of Artificial Sequence: Synthetic coding sequence
  source 1..1506: mol_type = other DNA
atgtcttgtccggtgcccgcatgctgtgccttgctgctggtgctcggactgtgtcgagccaggcctcggaatgccctgcttctgctggctgatgatggcgggtttgaatccggagcatataacaattctgccattgcaacgccccatctggacgcccttgcccggcggtcactcctcttccgcaatgcattcactagtgtgagttcttgttcaccttcacgggcaagtctgctgactggactgccccagcaccagaatgggatgtacggtctccatcaggatgtgcatcatttcaattctttcgataaggttcgctctttgccgttgctgctgagccaggctggtgtgcggactgggattataggcaaaaagcacgtgggacctgagacggtgtacccttttgacttcgcctatacagaggaaaatggctccgtcctgcaagtagggaggaacatcacccgaataaagttgttggtgagaaagttcctccagacgcaggatgaccgccccttcttcctgtacgtggcatttcacgacccacacaggtgcgggcatagccagcctcagtatggcaccttttgtgagaaattcggaaatggggagagcggaatgggaaggatccccgactggacacctcaggcttatgacccactggacgtgctcgtgccttacttcgtgcccaacaccccagctgctagagccgatttggcagcccagtacactacagtgggtcgaatggaccagggggtaggcctggttttgcaggagctccgagatgctggggttttgaacgacactctggtgatttttacatctgacaacggtatcccctttcctagcgggcgcactaacctgtattggccaggaaccgcagagcctctgctggtctctagcccagagcaccccaagcggtggggacaggtatccgaggcatacgtttccctgcttgatctgacccccacaatacttgattggtttagtattccctatccctcttatgccatttttggcagtaagacaattcacttgactggaagatccctgctgccagccctggaggccgaaccgctctgggccaccgtcttcggatcccagtctcatcatgaggtcacaatgagctatcctatgcgcagcgtgcaacaccgccacttccgactcgtgcacaacctgaactttaagatgccctttcccatcgatcaggacttctacgtttctccgacttttcaggatttgctcaaccgaactacagctggtcagcctaccggatggtacaaggacctgaggcattattattatcgcgcccgatgggaactgtatgacaggtccagagatccccacgagacccagaatctggccactgacccaagattcgcacagctgcttgaaatgctgagggaccaactggctaagtggcagtgggagactcatgacccgtgggtatgcgcccctgacggagtcctggaggagaaattgagtccgcagtgtcagcctctgcacaacgaactg

SEQ ID NO: 250647 - DNA, 1506 bp, synthetic construct
  misc_feature 1..1506: note = Description of Artificial Sequence: Synthetic coding sequence
  source 1..1506: mol_type = other DNA
atgtcgtgtcccgtgcccgcatgctgcgctctgctgctcgtccttggcctgtgcagagctcggccaagaaatgctctgctgttattggccgacgacgggggatttgaaagtggcgcctacaataatagcgctattgccaccccccatttggacgcgcttgctcgtcggtctctgctgtttcgaaacgcatttacatctgttagcagttgtagccctagccgagcatcactgctgactgggctgccacagcaccagaatggcatgtatgggctacaccaggatgtgcatcatttcaactcatttgataaggtaaggtccctgcctcttctgctttctcaggcgggagtcaggaccggcatcatagggaaaaagcacgtagggccggagacggtgtaccctttcgattttgcctacaccgaggagaatggctcagtgttgcaagtggggaggaacataacccgaataaagcttcttgtcagaaagttcctgcagacccaagacgatcggccatttttcttatatgtggctttccacgacccccatcgatgcgggcacagtcagccacaatatggtacattctgcgaaaaattcggtaatggtgagtctggcatggggagaataccggactggacccctcaggcttacgacccactggacgtcctggtcccttactttgtgccaaacactcctgccgccagggccgacctcgctgctcagtacactaccgtggggcggatggaccaaggggtgggcctggtcctgcaggaactgagagacgcaggagtgctaaatgacacactggtcatcttcacctcggataacggaataccttttccgtccggccggacaaatctctattggcctggaactgcagaacccctcctggtctctagccccgagcaccccaagagatggggtcaggtaagcgaagcatatgtgtctctgctggacctgacacccactatcttagattggtttagtattccttatccctcctacgctattttcgggtctaagaccattcatctcacaggcaggagcttacttccagctctggaagctgagcctctctgggcgaccgtgttcggatcccagtcgcaccatgaagtgacaatgtcataccccatgaggtcagtgcaacaccggcacttccggctggtgcacaatctgaacttcaagatgccctttccaattgatcaggatttttacgtctcgccaacgttccaggacctccttaataggactaccgccggacagcccacaggctggtataaggatctaagacactactattaccgagcccggtgggagctctacgaccgaagccgggatcctcatgaaacgcagaacttggccactgatcctagattcgcccagctgctcgagatgctgagggaccagctggcaaaatggcagtgggagacacacgacccatgggtctgtgctcccgacggggtcttagaggagaagctgtcccctcagtgtcaacccctccacaatgagctt

SEQ ID NO: 250648 - DNA, 1506 bp, synthetic construct
  misc_feature 1..1506: note = Description of Artificial Sequence: Synthetic coding sequence
  source 1..1506: mol_type = other DNA
atgagctgcccggttccagcatgctgcgccctcttgctggtcctgggcctctgccgcgcgcgaccgcgtaacgccctgctgttgctagccgatgacggcggcttcgagagcggcgcatataataattctgctatcgccacacctcatctggatgcactcgcccgccgcagcctgctgtttcgtaatgccttcaccagcgttagcagctgcagccccagcagagcatctctcttgaccggtctgccgcagcatcaaaatggtatgtacggcctccaccaagacgttcaccactttaactccttcgacaaagtgcgttcattgcctctgttgctgtctcaggccggtgttcgcactggtattatcggtaaaaagcatgtcggccctgaaacagtgtatccgttcgactttgcatataccgaagagaatggctccgttttgcaagttggtaggaacatcacccgcatcaagctactggttcgcaaattcctgcagacccaggacgatcgtccttttttcctctacgttgcattccacgacccccatcggtgcggacactcccaaccacaatacggtaccttctgtgagaagttcggtaacggtgagtccggtatgggtcgtatccctgactggaccccgcaggcctacgatcctctggacgtgctcgttccttactttgtgccaaacactcctgccgcacgcgcggacctggctgctcaatataccactgttggcaggatggatcagggtgtgggcctcgtgctgcaggagctccgtgacgcaggtgttctgaacgatactctggtgatcttcactagcgataacggcatacctttcccaagcggacgcaccaatctctactggccaggaacggcggagccactgctggtgagcagccctgaacatccaaaacgctggggacaggtttccgaagcttatgtctctctgctggatctgaccccaactattctcgactggttttctattccgtacccgagctatgccattttcggtagtaaaaccattcatttgaccggcaggagcctgctgcctgcgctggaggcggaaccactgtgggctaccgttttcggaagccagagccatcacgaagttacgatgagctatccgatgcggagcgtgcagcaccgccactttcgcttggtgcacaatctgaatttcaaaatgccatttccgatcgatcaggatttctatgtctcgccgacgtttcaggacctgctgaatcgtacaactgctggacagccgacagggtggtataaagatttgcgacattactactaccgggcacgttgggaactgtacgatcgcagccgggatccgcacgagacccaaaatctggcgaccgatccacggttcgcccagctgctggaaatgctgcgtgaccagctggccaagtggcagtgggagacccacgacccatgggtttgtgccccggatggcgtcctagaagaaaaactatctccccaatgccaaccgctgcacaacgagctt

SEQ ID NO: 250649 - DNA, 1506 bp, synthetic construct
  misc_feature 1..1506: note = Description of Artificial Sequence: Synthetic coding sequence
  source 1..1506: mol_type = other DNA
atgtcatgcccggtgccagcttgctgcgcactgctcttggtgctggggctctgccgcgcccggcctcgcaatgcgctgctgctgcttgctgatgatggaggatttgagtccggcgcctacaacaactcggccatcgcgaccccgcatctggacgctctggcccggagatccttgctgttccgcaatgcgtttacctcagtcagcagctgctctccgtcccgggcatccctgctcactggattgcctcagcatcagaacgggatgtacgggctgcaccaggacgtccaccacttcaattccttcgataaggtccggtcgctgcccttgcttctgtctcaagccggagtgagaacgggaattatcgggaagaagcatgtggggcctgaaaccgtttatccgttcgatttcgcgtacaccgaggagaacggatcggtgctgcaagtgggcaggaacattacgcggatcaagctcttggtccggaaatttctccagacccaggacgatcgccccttcttcctgtacgtggccttccacgacccgcaccgctgcggacatagccagccgcagtacggcaccttttgcgagaagtttgggaacggagaatcaggtatgggaagaattccggattggaccccgcaagcctatgatcctctggacgtgctggttccgtacttcgtcccaaacactccggctgcgcgcgccgacctggctgcccagtacactactgtgggaaggatggatcaaggggtgggcctggtcctgcaagaacttagggacgcgggagtcctgaatgacacgctggtgatcttcacgtccgataacggaatccctttcccctctggtcgcaccaacctctactggcccggaactgcggaacctctgctggtgtcgtcgccagaacatccaaaacgctggggtcaagtcagcgaggcgtacgtgtccctcctcgacctgacccccaccatcctcgactggttctcgattccgtacccgtcgtacgcgatcttcggatccaagactatccatctcactggccgctcgctcctgccggccttggaggcggagccgctgtgggcaactgtgttcggttcgcagtcgcaccacgaggtgacgatgtcctaccctatgcgctcagtgcagcatagacatttccggctggtgcataacctcaacttcaagatgcctttcccgattgatcaggatttctacgtgagcccaactttccaggatctgctgaatcgaaccacggccggccaaccgacgggatggtacaaggatctcagacattactattacagggccagatgggagctgtacgaccgcagccgggacccccacgaaacccaaaatctggctacggacccgcgattcgcgcagctgttggagatgctccgtgaccaactcgccaagtggcagtgggaaactcatgacccgtgggtctgcgctcccgatggtgtgcttgaggaaaagctctcacctcagtgccagccgctccataacgaactg

SEQ ID NO: 250650 - DNA, 1506 bp, synthetic construct
  misc_feature 1..1506: note = Description of Artificial Sequence: Synthetic coding sequence
  source 1..1506: mol_type = other DNA
atgagctgccctgtgccagcttgctgcgcactcctcctggtgctcggactttgccgcgctcgcccgcgcaacgcgctgctgctgctcgcggacgacggagggttcgaaagtggtgcatacaacaattcagcaatcgctaccccacacctggatgcacttgctagacggagcttgctgttccgcaatgcgtttacttcagtgtcgtcctgttccccttcgagagcatcgcttctgaccggactgccgcagcatcaaaatggaatgtacggcctgcatcaggacgttcaccatttcaattccttcgacaaggtcaggtccctgccgctgctgctctcgcaggccggtgtccgaactggaatcatcggaaaaaagcatgtgggacctgaaaccgtctaccccttcgacttcgcatacacggaggaaaatggctcggtcctccaagtcgggcgaaacattacccgcatcaaactgctggttaggaagttcctgcaaactcaagacgaccgcccgttctttctgtacgtggccttccacgatccgcaccggtgtggacattcacagccccaatacggcactttctgcgaaaagtttggaaacggcgagagcggtatgggccggatcccggactggaccccgcaggcttacgacccactcgacgtgctggtcccgtacttcgtgccaaatactccggcggccagagccgaccttgcagcgcaatacacgactgtgggacggatggaccagggggtgggcttggtgctccaagagcttcgcgacgctggtgtgctgaacgacacgctggtgatctttacctcagataacggtatcccgtttccgtccggacgcaccaacctctactggccggggaccgccgaaccgctcctggtgtccagccctgagcaccctaagaggtggggtcaggtgagcgaagcatacgtgtccttgttggacctgaccccaaccatcctggactggtttagcatcccgtacccgtcgtacgccatcttcggctccaagaccatccacctgaccggcagatcgctgctgccagcactggaggctgaaccgctgtgggccactgtgttcggatcccaatcgcaccacgaagtgacgatgtcgtatccgatgcgctcggtgcagcacaggcactttagactcgtgcataacttgaatttcaaaatgcctttccctatcgaccaggatttctacgtgagcccaactttccaagatcttcttaaccggactaccgcaggacagccgaccggctggtacaaggatctgcgccattactactacagagcaaggtgggaactgtatgacaggtcgcgcgatcctcacgaaactcaaaacctcgccaccgatccgagatttgcgcagttgctggaaatgcttagagatcagcttgcgaaatggcagtgggaaacgcatgatccttgggtgtgcgccccggacggggtactggaagagaagctcagcccgcagtgccagcctctgcataatgagctg

SEQ ID NO: 250651 - DNA, 1506 bp, synthetic construct
  misc_feature 1..1506: note = Description of Artificial Sequence: Synthetic coding sequence
  source 1..1506: mol_type = other DNA
atgagttgtcctgtgcctgcatgctgtgccctgttgctggtgctgggcctctgccgtgctaggcctcgcaacgccctcctattgctggctgacgacgggggttttgaatctggggcctataataactctgcaattgccacccctcacctggatgctctggctcgcagatctctgctctttaggaacgcttttaccagtgtgagtagttgctctcccagtagggctagcctgctaactgggctgccacagcaccagaacggcatgtatgggctgcatcaggatgttcatcactttaattcttttgataaggtgaggtccctccctctactactgagtcaagccggggtccggactggcattataggtaaaaagcatgttggccctgagaccgtctatccattcgatttcgcatacaccgaggagaatggttcagtgctgcaagtgggtagaaacatcactaggattaaattactggttcggaagtttttgcagacacaggacgatagacctttcttcctgtatgtggccttccacgatcctcatcggtgtggacatagtcagcctcagtatggtaccttttgcgagaagtttggcaatggcgagagcggcatgggccggatccctgactggacaccacaggcttatgatcctttggacgtgctggtgccttactttgtgccaaataccccagctgccagagccgacctggccgcccagtacacaactgtgggacgcatggaccagggcgtggggctggtcctacaagagctgcgtgatgcaggcgtgctgaacgataccttagtgatctttacatctgataacggaataccattcccatccggaaggacaaatctgtattggccaggaacagccgaacccctgctggtcagttccccagaacatcccaaacggtggggacaggtcagtgaggcatacgtgtccctgctggatttaacacccactatattggattggttctccatcccttacccatcatatgctatatttggcagtaagacaatccacctgactggacgttctttactgccagctttagaggcagaaccattatgggctaccgtgttcggatcccagtctcatcacgaagtcacaatgtcctacccaatgcgtagtgttcagcaccgccatttccgactcgtgcataacctaaacttcaagatgcccttccccattgaccaggatttctatgttagtcctacatttcaggatctcctaaacaggaccaccgcaggccagcccaccggctggtataaggacttgcggcattattattatcgggcacgctgggaactgtacgatcgttccagggacccacatgaaacacagaatcttgctaccgatccaaggtttgctcagctcctggagatgctgagggaccagctggctaaatggcagtgggaaacccacgatccctgggtgtgcgcccctgacggcgttctggaggagaagctaagcccacagtgtcagcctctacataatgaactg

SEQ ID NO: 250652 - DNA, 1506 bp, synthetic construct
  misc_feature 1..1506: note = Description of Artificial Sequence: Synthetic coding sequence
  source 1..1506: mol_type = other DNA
atgtcgtgcccggtcccagcttgctgtgccctgttgctcgtgctgggcctgtgtagagcccgtccgagaaacgctctcctgttgctggctgacgacggcggcttcgaaagcggagcatacaacaattccgcgatcgcaaccccgcacctggacgccctcgctcgcaggtccctgctgttccgaaatgcattcacctccgtcagttcctgctcgccttcacgcgctagccttctcacgggactgccgcagcaccagaacgggatgtacgggctccaccaggacgtccaccatttcaactcctttgacaaggtgagatcactgcctctgctgctctcgcaggcaggagtgagaacggggatcatcggaaaaaagcatgtgggaccagaaaccgtgtacccgttcgacttcgcatataccgaagagaatggctcagtgttgcaggtcggcagaaatatcactaggattaagctcctggtccgcaagttcctgcaaactcaggacgaccggccgttcttcctgtacgtggctttccacgatccgcaccggtgtggtcattcccagcctcagtacggcactttctgcgaaaagttcggaaatggggagtcagggatgggacggatccctgactggactccgcaggcttacgacccgctcgatgtgcttgtgccatacttcgtgcccaacacccctgccgcccgcgccgatctggcggcgcaatacactaccgtgggccgcatggatcaaggggtcggactggttctgcaggaattgcgcgatgctggagtgctgaacgataccttggtgatcttcacttccgacaatggaattccgtttccatccggacgcaccaacctgtactggccgggaaccgctgaaccgctgctggtgagcagccctgaacaccctaaacgctggggtcaagtgtccgaggcgtacgtttccctcctggacctcaccccgactatcctggattggttctccatcccatatccttcgtacgctatctttggatcgaaaaccatccatctgactggccggtccctgctcccagcgctggaggctgaacctctgtgggctaccgttttcggctcccagtcccaccacgaagtgactatgtcgtacccaatgaggagcgtccagcaccgccattttcggttggtgcacaatcttaactttaagatgccgttccccatcgaccaggacttctatgtgtcccccactttccaggaccttctcaatcggaccactgcaggacagccgactggatggtacaaggacctgagacattactactaccgggctagatgggaactctacgatcgaagcagggatccgcacgagactcaaaacctggcaactgacccgcgctttgcgcagctgctcgaaatgctgcgcgatcagttggcaaaatggcaatgggagactcacgacccgtgggtgtgcgccccggacggcgtgctcgaggaaaagctgtcacctcagtgccagccactgcacaatgagctc

SEQ ID NO: 250653 - DNA, 1506 bp, synthetic construct
  misc_feature 1..1506: note = Description of Artificial Sequence: Synthetic coding sequence
  source 1..1506: mol_type = other DNA
atgtcctgtcccgtgccggcatgctgtgcgctcctccttgtccttggattgtgtagggcaaggcctaggaacgccctcctgctgcttgcagatgatggcgggttcgaaagcggggcatacaataacagcgcaattgcgactcctcatctggacgccttggcgaggcgctctcttcttttccgtaacgcatttacctcggtgagctcttgcagcccctccagagcctcgcttctcaccggacttccgcaacatcaaaacggaatgtacggacttcatcaagacgtccaccacttcaactcgtttgacaaggtgagaagcctgccgctcctcctttcccaggcaggcgtgcggaccggaatcattggtaaaaagcatgtgggccctgagactgtctacccattcgattttgcatacaccgaggagaacggttcggtgctgcaagttggtaggaacattactaggatcaagttgctggtgcgcaagtttcttcaaacccaggatgatagacctttctttctttacgtggccttccatgacccacaccgctgtggacactcccaaccacaatatggaaccttttgtgaaaagttcggaaatggagagtcaggtatgggtaggatccccgactggaccccccaggcgtacgatcctctggatgtgctggtgccttacttcgtccccaataccccggcagcacgagcagacctggcagcccagtacactaccgttgggaggatggatcaaggagtgggacttgtgctgcaagaactgagagacgctggcgtgctgaatgacactcttgtgatcttcacgagcgataacggaattcctttcccttcgggtcgcactaacctttactggcctgggaccgcagaacctcttctcgtctcgtccccagagcacccgaagagatgggggcaggtttcagaggcctacgtgagcctccttgatctgactcccactatccttgactggttttcgatcccttacccatcctacgcaatctttggttcaaaaacgatacacctcaccggcagatcactgcttcctgcgctggaagctgaaccgctttgggctaccgtgtttggctcacaatcgcaccatgaagtcactatgtcataccctatgagatccgtccagcacagacattttcgtctggtccataatcttaactttaagatgccatttccaattgatcaagacttttacgtttcccctacctttcaagatctcctcaacagaaccactgcgggtcagcccacgggttggtataaggaccttcggcactactactacagagcaagatgggaactgtacgatcggtcaagggatccccacgagactcaaaatctcgcaaccgaccctagatttgcacaactgcttgaaatgctcagggaccaactcgcgaagtggcagtgggagacgcatgacccatgggtgtgtgcccctgatggtgtgctggaagagaaactgtcgcctcaatgtcaacctcttcacaatgagctt

SEQ ID NO: 250654 - DNA, 1506 bp, synthetic construct
  misc_feature 1..1506: note = Description of Artificial Sequence: Synthetic coding sequence
  source 1..1506: mol_type = other DNA
atgagctgccctgtgcctgcttgttgtgcacttctcctggtgcttggcctttgtcgtgcgcgccccaggaatgccctgctgctcctggctgatgacggcgggtttgaatcgggagcatacaacaattcagcgatagctactccgcaccttgacgctctcgcccggaggagtctgctgttcaggaatgcatttacgtcggtgagctcgtgttcgccatcgagggcttcactgcttaccggtttgccacaacaccagaacggtatgtacggccttcaccaggacgtgcatcatttcaactcctttgataaggtgagatcattgcctttgctgctcagccaagcaggtgtccgcacgggtattatcgggaagaaacacgtgggtccggaaactgtgtatccttttgatttcgcttacaccgaagagaacggttcggtgcttcaggtcggacgcaacattacccggatcaagctgcttgtgcgtaaattcctgcaaacccaagatgaccgtcctttctttttgtacgtcgcatttcacgatccgcaccgctgcgggcacagccagccccagtacggaaccttttgtgagaaatttggtaatggggaatcaggaatgggcaggatccccgattggaccccccaggcctacgatcccctcgacgtgctcgtgccatactttgtcccaaacaccccagcagcaagagcagatttggcagcacaatacaccactgtgggacgcatggatcaaggtgtgggacttgtgctccaagaactccgcgacgctggggtgctgaacgacactcttgttatcttcacctccgataatggaatcccatttccatccggacgtacgaacctgtactggcctggtactgcagagccgctgttggtttccagccctgaacatccaaagcggtggggtcaagtctcagaagcgtacgtttcgctgttggatctcacgcctactattcttgattggttttctatcccctacccttcttacgcaattttcggatctaagactattcatctgaccgggcggtccctgctgcctgcacttgaagccgagcctctttgggcaactgtctttggatcgcaaagccatcatgaggttactatgtcgtacccgatgagatccgtgcaacaccgtcattttcgccttgtccataaccttaactttaagatgcccttcccaattgaccaagacttctacgtgagccctacttttcaagatctgttgaatcgcaccactgcaggacagccgacgggatggtataaagatcttaggcattactactaccgggcgaggtgggagctgtacgatcgatcgagggacccacatgaaacccagaacttggcaactgacccccggtttgcacagctgctggaaatgcttcgcgatcaactggcaaagtggcagtgggagactcatgatccatgggtatgcgcccctgacggcgtgcttgaagaaaagttgagcccccaatgccaaccactccataatgagctt

SEQ ID NO: 250655 - DNA, 1506 bp, synthetic construct
  misc_feature 1..1506: note = Description of Artificial Sequence: Synthetic coding sequence
  source 1..1506: mol_type = other DNA
atgtcgtgtcctgtgcccgcttgttgcgccctgttacttgtgctggggctgtgcagggcccggccccgcaatgccctgcttctgttggctgatgatggaggatttgaaagtggagcctataacaactccgctatagcaacaccccatttagacgcattggcccggcgctctctgctgttcaggaatgcgtttacaagtgtctcctcttgcagcccatcaagagcttcactgctgactgggctgcctcagcaccaaaacgggatgtacgggttacaccaagacgtgcatcactttaattcatttgacaaggtgagaagcctccccctactgctcagccaggcaggagttcgtactgggattatcggcaagaaacatgttgggcccgagactgtgtacccctttgacttcgcgtacacagaagagaatggctccgtgctgcaggtgggtaggaacattactaggattaagctgctcgttaggaagtttttgcaaacacaggatgaccggcccttcttcctctacgttgcgtttcacgatcctcatagatgtggccatagtcagccccagtacgggaccttttgtgaaaaatttgggaacggagagtctggaatgggccggatccctgattggactccacaagcttatgaccctctggatgttttggttccatactttgtgccaaacacccctgcagcaagggccgacctagcggcgcagtacacaactgtcggccgaatggatcaaggtgttgggctggttctgcaagagctgcgtgacgctggagtgctgaatgatacactcgtgatcttcacatctgataatggcatcccattcccctccgggcggaccaatctgtactggccaggtaccgcagagccactgctggtcagctcgcccgagcatccgaagcggtggggacaagtatccgaggcctatgtgtccctgctggacctgacacccacgatattagattggttctcgattccctatccctcctatgctatcttcggatctaagacgatccacctgactggacgttccctgttacccgccctggaagccgagcctctgtgggcgacggtcttcgggagtcagagccaccacgaagttaccatgtcttatcctatgcgatccgtgcagcatcggcactttaggctcgtgcacaacctgaattttaaaatgccttttcccatcgatcaggatttctacgtgtccccgacatttcaggatttactgaataggactactgccggacaacccacaggatggtataaggacttgcgccactactattatagagcccgctgggagctgtacgacaggtcccgggatccacacgagacgcaaaatctggcgacagatcctaggtttgcccagctgcttgagatgctgcgggaccagttggccaagtggcaatgggaaacccatgatccttgggtgtgcgcccctgacggtgtgctagaggaaaagctgtccccccagtgtcaacccctgcataacgagtta

SEQ ID NO: 250656 - DNA, 1506 bp, synthetic construct
  misc_feature 1..1506: note = Description of Artificial Sequence: Synthetic coding sequence
  source 1..1506: mol_type = other DNA
atgtcgtgccccgttccagcatgctgcgccctgttgctggtcctgggactgtgtcgcgcgcggccccgcaatgcgttgcttctgctggcagacgatggaggcttcgagtccggggcctacaataattcggccattgctacgccccacctggatgctctagcgcgcagatccttgctgtttagaaacgcattcacttccgtgagttcgtgcagcccctcgagagccagcctactgacgggcctgccccagcatcagaacggcatgtacggcctgcaccaggatgtccatcatttcaactccttcgacaaagtcagaagcctgccgctgctcctatcgcaggctggcgtgcgcacgggaatcattggaaaaaagcacgtgggtccggagacagtgtatccattcgattttgcctatacagaggagaatggaagcgtcttgcaggttggccgcaatatcacacgtatcaaattgttggtccgtaagtttctacagacccaggatgaccgtccattctttctgtacgtggccttccatgatccgcatcgatgcggacatagtcaaccccagtacggtacattttgtgaaaagtttggcaatggagagtcgggtatgggccgaatacccgactggaccccccaagcctacgatccactggacgtcctcgtcccgtacttcgtcccgaacacccctgccgcccgcgctgacttggctgcccaatacaccacggtgggtagaatggaccagggcgtgggcttggtcttgcaggagctccgagatgcaggcgtgctgaacgatacactggttatattcacgagtgacaatggaattccgttcccgagcggacgcaccaatctctattggcctggaactgccgagcctttactggtctcctctccagaacacccaaagcgttggggccaggtgtcggaggcatacgtgtcccttctggacttgacgcccacgatactggactggttttccatcccctacccgtcctacgcaatattcggctccaagacgatacacctgacgggccggagtttgctacccgcgctggaggccgagccgttgtgggcgaccgtctttgggagtcagtcgcatcatgaggtgaccatgtcatacccgatgaggtctgtgcagcaccggcactttcggctagtgcataatctgaatttcaaaatgcccttccccatcgaccaggatttctatgtgagcccgacctttcaggatctgttgaaccgtacaactgccggccagcccacaggatggtataaggacttgcgtcattattattacagagcccgctgggagttgtacgaccgctcccgtgatccgcatgagactcagaacctggccaccgatccccgattcgcccagctcttggagatgctgcgtgatcagctggcgaagtggcagtgggagacccacgatccctgggtttgcgcccccgatggagttctggaggagaaactgagcccccagtgccagccactgcacaatgaatta

SEQ ID NO: 250657 - DNA, 1506 bp, synthetic construct
  misc_feature 1..1506: note = Description of Artificial Sequence: Synthetic coding sequence
  source 1..1506: mol_type = other DNA
atgagttgccctgtcccagcttgttgcgccttattgcttgtcttgggactgtgtagagctcggccgaggaatgcactgttactcctggccgatgacggtggctttgagtccggcgcctacaataattctgcaattgcaacccctcatctggacgcccttgctaggaggtcactcctgtttcggaatgctttcacaagcgtgtcctcctgctctccatccagggccagcctgctcacgggcttgccacagcaccaaaacggtatgtatggacttcatcaggacgttcaccactttaatagcttcgacaaagtgaggtcattaccactgctcctttcccaggctggagtgcggacaggtatcattggaaagaagcatgtgggcccagagaccgtataccccttcgatttcgcctacacggaggagaacggtagtgtgctacaggtggggcgtaatatcacaaggattaaactcctggtcagaaagtttctgcaaacgcaggacgaccggccttttttcttatatgtagcatttcacgacccacaccgttgcggtcactctcagccccagtacggcactttctgcgaaaagtttgggaatggagaatctgggatgggtaggattcctgactggactccacaggcatatgaccctctggacgtgctcgttccttactttgttccgaacacccctgccgcacgtgccgacctcgcagcgcagtatactacagtgggacgcatggaccagggagtgggcctggttctccaggagctgcgcgacgctggggtcctcaatgatacccttgttatatttacttcagataacggcatccccttcccatctggacgcactaatctgtactggcctgggacagctgagcctctgctagtgtcctccccggagcacccgaagcgctgggggcaggtttccgaggcgtacgtgtctttgttagacctaactcctacgatccttgattggtttagcataccgtacccttcttacgccattttcgggagcaaaaccatccatcttacaggaaggagcctactgccagcgctggaggctgaaccactttgggccactgtgttcgggagtcagtcgcaccacgaagttaccatgagctatcccatgcgcagtgtgcaacatagacactttcgcctggttcataaccttaactttaagatgccgtttcctattgaccaggatttctacgtaagcccaacgttccaagacctactaaatcgcaccaccgcagggcagcccactgggtggtacaaggacttacgacattactattacagggcccggtgggaactgtatgataggtcaagggatccacatgagacccagaatctggccaccgacccaaggttcgcccagctgctcgagatgttgcgggatcaattggcgaaatggcagtgggaaactcacgatccctgggtctgtgcccccgacggcgtccttgaagaaaaattatcccctcaatgccagccccttcacaacgagcta

SEQ ID NO: 250658 - DNA, 1506 bp, synthetic construct
  misc_feature 1..1506: note = Description of Artificial Sequence: Synthetic coding sequence
  source 1..1506: mol_type = other DNA
atgtcctgtcccgtgccagcttgttgcgccctcctgctggttctcgggctctgtagggctcgccccaggaacgcgctactgcttctagccgacgacggcggctttgagtcaggcgcttacaataacagcgccattgctaccccacatctggacgcactcgccaggcgttccttgctgttccgcaacgcattcaccagcgtcagcagttgcagccccagccgggcttcattgctgaccgggctacctcagcaccagaatggtatgtatggtctccatcaggatgtgcaccatttcaattcctttgacaaagtcaggtccctacccctccttctatctcaagccggagtaaggacaggaataattggaaagaagcacgtgggtccagagactgtgtacccatttgacttcgcttataccgaagagaatggctctgtactccaggtcggccggaatataacacgtatcaagttgctcgtgaggaagtttcttcagactcaggatgaccgacctttcttcctgtacgtggcctttcacgatccacaccgctgcgggcatagccagccccaatatggcacattttgtgaaaaattcggcaatggcgagtccggaatgggaagaatccccgattggaccccacaggcctacgatcccctggacgtactggtgccctattttgtgcctaatacacctgccgcacgagcggatctcgcagctcaatacaccactgtgggccgaatggatcaaggcgtggggctagtgttacaagaacttcgggatgcaggagtgctcaacgatactctcgtgatttttacgagtgataatggaatcccctttcccagcgggagaactaatctgtattggcccgggaccgcagaaccccttcttgtttcatctcctgaacacccgaaaaggtgggggcaggtgtcggaggcatatgtgtcccttctcgacctaaccccaacaatccttgattggttttccatcccctaccctagctatgccatctttggaagcaagaccatccatctaaccggacgatccttgctgcccgccctggaagcagagccgctctgggccactgtctttggttctcagagccaccatgaagtgactatgagctaccccatgcgatctgtccaacataggcatttccgcctggtgcacaatcttaatttcaagatgccctttcccatcgaccaggacttctacgtgtctcctacatttcaggacctgctgaacaggacaactgctgggcagccaactggttggtacaaggatctgcgccattactactatcgggcccgttgggagctatatgacagaagtcgggacccacatgagacacagaacctggctaccgaccctcggtttgcgcagctgttagaaatgttgcgcgaccagctggcaaagtggcagtgggaaacccacgacccttgggtgtgcgcaccagatggcgtcctggaggagaaactgtccccacagtgccagcctctacataatgagctc

SEQ ID NO: 250659 - DNA, 1506 bp, synthetic construct
  misc_feature 1..1506: note = Description of Artificial Sequence: Synthetic coding sequence
  source 1..1506: mol_type = other DNA
atgagctgtcctgtgccggcctgttgtgcacttcttcttgtgctgggactctgccgcgcccgaccacggaacgcacttctgctgcttgcggatgatggtggttttgaatcgggtgcatacaataactccgcaattgcgaccccccatcttgatgcactcgcccgtcggtcgctgctcttccgaaatgcctttacctcggtgtcatcgtgtagcccctctcgggcatcgctcctcaccggactgcctcaacaccaaaacggtatgtatgggctccatcaagatgtgcaccatttcaacagctttgacaaggtgcgatcactcccacttttgctctcacaggccggagtcaggactggaatcataggaaagaagcacgtgggacccgagactgtctacccttttgattttgcatacactgaggagaatggatcagttctccaggtcggacggaacattacccgcattaaacttcttgttcgtaaattcctccaaacccaggatgataggccttttttcctttacgtggcctttcatgacccccaccgttgcggtcactcgcaaccacaatacggcactttctgtgagaaatttggtaatggcgaatcgggtatggggagaatcccagactggactcctcaagcctacgatcccctcgatgtcctggtgccatactttgtgcctaacacccctgctgcaagagccgatcttgctgcccagtacactactgtgggtcggatggatcagggcgtgggactggtcttgcaggagcttagagacgcaggggtcctgaatgacaccctggtgattttcactagcgacaacggtatcccttttccaagcggccgcactaatctttactggcccggtaccgcagaacctttgcttgtcagctcccctgaacatccaaagcgttggggtcaagtgagcgaagcatacgtgagccttctggatctgacccctaccattctcgattggtttagcatcccctatccaagttacgcaatctttggatcaaagactattcatttgaccggcagatcactgctgccagcactggaagcggagccactttgggctaccgtctttggaagccagtcccaccatgaagtgactatgtcttaccctatgagatcggtgcaacatcgacattttaggctggtccataatctcaactttaagatgccttttccaattgaccaagatttctacgtgtcacctactttccaagatctcttgaacaggactacggctgggcaacctactggttggtacaaggatttgcggcattactattacagagcgcgctgggagctctatgatagatcgagagatccacatgaaacccaaaatcttgcaactgatcctagatttgcccaacttcttgaaatgctgagagatcaacttgcgaagtggcagtgggaaacccacgacccttgggtgtgtgcacctgacggagtgttggaggaaaaacttagcccgcagtgtcaacctcttcataacgaactt

SEQ ID NO: 250660 - DNA, 1506 bp, synthetic construct
  misc_feature 1..1506: note = Description of Artificial Sequence: Synthetic coding sequence
  source 1..1506: mol_type = other DNA
atgtcttgccctgtgcccgcatgttgtgcccttctccttgtgttgggtctgtgccgtgcgagaccgagaaacgcacttctgcttctggcagacgatggaggcttcgaatcaggggcatacaataattctgcaattgcaactccgcacctcgacgccctggcccgccgaagcctgttgtttcggaatgcatttacttcagttagctcctgtagtccctccagagcttcattgctgacaggcttgccgcagcaccagaatggcatgtatggcctgcaccaggacgtgcaccacttcaactcttttgataaagtgaggtccctgccactcctgctgtcccaagctggggtccgcaccggcatcattggcaagaagcacgtgggtcccgagaccgtctatcctttcgattttgcctataccgaggagaatggctctgtattacaggtgggcagaaatataaccaggattaagctgttagttcgaaaattcctccagacacaggatgacaggccattcttcctctatgtcgcatttcacgacccacaccgatgtggccactctcagcctcaatacggaactttctgcgagaaatttggtaatggagagtccggcatgggccggattcctgattggaccccccaggcgtacgatcctctggacgtcctggtgccatacttcgttccaaacaccccagccgcacgagccgacctggccgcgcaatacaccaccgtcggacgcatggatcagggggttggactggttctgcaggaactgcgagacgccggagtcctgaatgatactctggtgatatttacttccgacaacggaataccatttccatcgggccggacgaacttgtattggcccggcacagctgagcccctgctggtcagctcgcccgaacacccgaagaggtggggtcaggtaagcgaggcatacgtgtcactgttggacctaacacccacgattttagactggttctcaatcccatatccctcttatgctatctttggctctaagacaattcatctcacgggccggagcctgctgccagccctggaagctgagcccctgtgggccaccgtgtttggttcccagagtcatcacgaggtgaccatgtcctacccgatgcggtctgtgcagcatcgccattttcggcttgttcataatctgaacttcaaaatgccatttccaatcgatcaggatttctacgttagtcctaccttccaggatttactcaataggacaactgccgggcaaccaacaggctggtataaggatctgcgacattactattaccgagcccgttgggaactgtatgaccggtcaagagaccctcacgagacccagaacctggctacagatcctcgctttgcacagttgctagaaatgctgcgggatcagctggccaaatggcaatgggaaacacatgacccctgggtttgtgcccccgacggggttctagaagaaaaactgtcaccccagtgtcagccacttcacaacgagctc

SEQ ID NO: 250661 - DNA, 1506 bp, synthetic construct
  misc_feature 1..1506: note = Description of Artificial Sequence: Synthetic coding sequence
  source 1..1506: mol_type = other DNA
atgtcatgtccggtcccggcctgctgcgcccttctgctcgtcctggggttgtgtcgcgctcggccgcgcaatgccctgctgctcctcgcggacgatggcggattcgagtcgggcgcctacaacaacagcgccatcgcgactccacacctggacgctctcgccagacgttctctgttgttccggaatgcgtttacttccgtgtcctcctgctccccgtcaagggccagcctgctcactggcctcccgcaacaccagaacggaatgtacggactgcatcaggatgtgcatcatttcaacagcttcgacaaagtgaggtcgcttccgctgctgttgtcacaagcaggagtcagaacgggcatcatcggaaagaagcatgtgggacccgaaactgtctacccgttcgatttcgcctacaccgaagaaaatggctcggtgctgcaggtgggacgcaacatcacccggatcaaactgctcgtgcgcaaattcctgcaaacgcaagacgataggcctttcttcctgtacgtggccttccatgacccgcatagatgcggacactcccagccccaatacggaactttttgcgagaagtttggtaatggcgaatctgggatggggcgaatcccagactggactccacaggcgtacgatccactggacgtccttgtgccttattttgtgccaaacacgccggccgctcgggcggacctggccgctcagtacaccaccgtcggacgcatggaccagggagtgggtctggtgcttcaggaattgcgcgacgcaggggtgcttaacgataccctcgtgatcttcacctccgacaatggtatccctttcccgtcaggtagaactaacctctactggcctggaaccgccgagccgctgctcgtgagttcgccggagcacccaaagcgatggggccaagtctccgaggcatacgtctcactcctggacctgacccccactattttggactggttctcgattccgtaccccagctatgctatcttcggatcaaagaccatccacctgactggccggagcttgctgcctgcgctggaggcagagcctctgtgggcgaccgtgtttgggtcgcagtcgcaccacgaagttactatgtcgtacccgatgcgcagcgtgcaacaccggcacttcaggctggttcataacctgaattttaagatgccattcccgattgaccaggatttttacgtctccccaactttccaggacctgctcaatagaaccaccgcgggacagcccactggatggtacaaagacctccggcactactactaccgcgcccgctgggaactgtacgatagatcccgggacccacacgagacgcagaacctggcaaccgatccacggttcgctcagctcctcgagatgcttcgcgatcagctggcaaagtggcagtgggaaacccatgatccttgggtatgcgcacctgatggagtgctcgaagaaaagttgagcccgcaatgtcaaccgctccacaacgaactg

SEQ ID NO: 250662 - DNA, 1506 bp, synthetic construct
  misc_feature 1..1506: note = Description of Artificial Sequence: Synthetic coding sequence
  source 1..1506: mol_type = other DNA
atgtcatgccccgtccccgcctgttgcgcgctattgttagtgctgggtttgtgcagagcccggcctcgaaacgccctgttactgctggccgacgacggtggctttgagtccggggcttataataacagtgctatagcaacaccacacctggacgcccttgcccggcggtctctactgttccgcaacgcatttacttcagtctctagttgtagccccagccgggcctctttgttgacgggactgccacagcaccagaacggtatgtacggcttacatcaggatgtccatcattttaatagcttcgacaaggtccggtctctgcccctgcttttgtctcaggccggagtgcgtaccgggatcatcgggaagaagcacgtcggacccgaaacagtgtatcccttcgacttcgcatacaccgaggaaaatggatccgtgctccaggttgggcgaaacattacaaggataaagttgctcgtgcgcaaatttctccaaactcaggatgatagaccattttttttatatgtggctttccatgatccacatcggtgcgggcacagccagccacagtacggcaccttttgcgaaaagttcggcaatggagagtctggcatgggccgcattcccgactggacaccacaggcgtacgaccctctggatgttctggtgccctactttgtcccaaatacccctgccgcccgtgccgacctggcagcacagtataccaccgtgggaaggatggatcagggcgtcggtctggtcctccaggaactacgggacgcaggggtgctgaatgataccctggtgatcttcacctctgataatgggatcccctttccaagtggaagaacaaatttgtattggcctgggaccgcggaaccattgctcgtctccagtccagaacacccaaagaggtgggggcaggtgagtgaggcctatgtctctttattggatctgacacctacaatcctggactggttcagtatcccctacccctcgtacgcgatttttggctcgaagaccattcacttgactgggcggtctctcctgccagcactcgaggccgaaccgctgtgggctacagtgttcggctcacagagccaccacgaggtgacaatgtcatatcccatgaggagcgtgcagcaccgacattttcggttagtgcacaatcttaacttcaagatgccttttccgattgaccaggacttttatgtgagtcctaccttccaggatctcttaaacaggactacagccggtcagcctacgggatggtataaggacctaagacactactactacagagcgcggtgggagctttacgaccgatcacgggacccacacgagacccaaaacctggccaccgatcctcgctttgcccagttacttgaaatgctgcgggaccagcttgcgaagtggcagtgggaaactcatgatccatgggtttgtgcccctgatggggttctggaagagaaactgagccctcagtgtcagcctctccataatgagtta

SEQ ID NO: 250663 - DNA, 1506 bp, synthetic construct
  misc_feature 1..1506: note = Description of Artificial Sequence: Synthetic coding sequence
  source 1..1506: mol_type = other DNA
atgagttgccctgtaccagcatgttgcgctctcctgctggtgctaggtctctgtcgtgccaggccccggaatgccctactgctgcttgccgacgacgggggcttcgagtctggagcttacaacaactccgccattgcaacaccccatttggatgcactggctaggaggtcactcctctttcgtaatgcgttcacgagtgtctcctcctgttcaccgagtagggcaagcctcttgactggcctgccccaacatcagaacggcatgtatggcctgcatcaggacgtgcaccacttcaattcttttgataaggttcgaagcctgccactgttgctcagtcaggctggcgtcagaaccgggataatcgggaagaagcacgtgggcccagagactgtgtatccattcgattttgcctatactgaggagaacggaagtgtgttgcaggtcggcagaaacatcaccaggataaagctgctggtcagaaaatttttgcagacccaggacgacaggccgtttttcttgtatgtagcattccacgacccccaccggtgtggacattctcagccacagtacggaaccttttgcgagaaattcggaaatggcgagtctgggatggggagaatacccgactggactcctcaagcctatgaccctctggatgttctggtcccatacttcgtccctaacactcccgcagcaagagcagacctcgccgcacagtacacgacagtgggacgaatggaccagggggttggactggttctccaagagctgcgggatgcgggtgtgctaaacgataccctagttatcttcacgtctgataacggtatcccttttccgtccggacggaccaatctgtattggcccgggaccgcagaaccactgctagtgtcctctcctgaacacccaaagaggtggggccaggtgtccgaggcatatgtgagcctgttggaccttactccaaccattctggactggttcagcatcccctaccctagctacgcaatttttgggagtaaaaccatccacctgacaggtaggtcattgttgccagcgctagaggctgagcctttatgggcgacggtgtttgggtcccagagccaccacgaggtgaccatgtcctatccaatgcggtccgtgcagcacaggcacttcaggctcgtgcataacctgaacttcaaaatgccattcccgatcgaccaggatttctacgtgagccccacattccaggatttactcaaccgcactaccgctggacagccaacaggatggtacaaagacctgagacactactattatcgtgctcgctgggagttgtatgatcggtcaagagatccacacgagactcagaacctcgcgacagatcctcgcttcgcccagctgttggaaatgctgagggatcagctggcaaaatggcagtgggaaacccatgacccgtgggtgtgtgcacccgatggggttttggaggaaaagttgagccctcagtgtcaacccctgcacaatgagttg

SEQ ID NO: 250664 - DNA, 1506 bp, synthetic construct
  misc_feature 1..1506: note = Description of Artificial Sequence: Synthetic coding sequence
  source 1..1506: mol_type = other DNA
atgagctgccctgtgcctgcctgctgcgccctgctgctcgtgctcggactgtgtcgcgcccgcccgcgcaacgcccttttgctgctggccgacgacggagggttcgagagcggcgcatacaacaatagcgccatcgccaccccccatctggatgctctcgcccgccgctcgctccttttccggaacgcgttcacttcggtaagcagctgttcgccttcgcgggcaagcctcctgactgggctgccccagcaccagaacggcatgtacggactccaccaggacgtgcaccatttcaattccttcgataaggtgagatcgcttcccctgctcctgtcccaagcgggggtcaggactggaatcatcggtaagaaacacgtcggaccggaaacggtgtacccattcgacttcgcctacaccgaggaaaacggctccgtgctgcaagtcggtcgcaatatcacgcgcatcaagctcctcgtccggaaatttctgcagacccaagacgaccgcccttttttcctgtacgttgcattccacgacccccataggtgcggccattcgcaaccacaatacggcacgttctgcgagaaattcggtaatggagagtcaggtatggggagaatcccggactggactccacaggcatacgacccactcgatgtgctcgtgccgtacttcgtcccaaatacccctgccgctcgcgcggacctggccgcgcagtacactactgtgggacgcatggaccagggcgtcggactggtcctgcaagaactccgcgacgcaggagtgcttaacgatacccttgtgatcttcactagcgacaatggcattccatttccctcgggacgcaccaacttgtattggccgggcactgccgaaccgctcctggtgtcatcaccggaacatccgaagcggtggggacaagtctctgaagcctatgtcagcctcctggaccttactcccactattctggactggttttcaattccataccccagttacgcgatcttcgggtccaagactatacatctgactggtcggagcctgctgcctgctctggaggccgaaccgttgtgggcgactgtctttggatcccagtcacaccacgaagtcactatgtcatacccaatgaggtcggtccaacacaggcacttccgccttgtccacaaccttaactttaagatgccgttcccgatcgatcaggacttttacgtgtcccctaccttccaagacctgcttaacagaaccactgccggccagcctaccggctggtacaaggatctgagacattactactatagagcccgctgggaactgtacgatagatctcgcgatccgcatgagactcagaacctcgccacggatccacgctttgcacaactgcttgaaatgctgcgcgaccagctcgcgaagtggcaatgggagactcatgatccctgggtgtgtgccccggacggggtgctcgaggagaaactgtcgcctcaatgccagccactgcataacgaactg

SEQ ID NO: 250665 - DNA, 1506 bp, synthetic construct
  misc_feature 1..1506: note = Description of Artificial Sequence: Synthetic coding sequence
  source 1..1506: mol_type = other DNA
atgtcttgccctgtgcctgcctgctgtgccttgcttctggtgcttgggctgtgtagagcacggccacgcaacgcgcttttgctccttgctgatgacggcggtttcgagtcaggagcgtacaacaattcagcaatcgcaactccccatctggacgcactggcacgccggtcccttctttttcgcaacgcatttacttccgtgtctagctgttccccatcgagagccagcctgctgactggtctgcctcagcaccagaacggaatgtacggactgcaccaagatgttcatcacttcaattcgtttgataaagtccgatctcttcccctgctgctttcacaggcaggagtgcggaccggaatcattggaaagaagcacgtgggtccagaaaccgtctacccattcgacttcgcctacaccgaagagaatggatcagtcctccaggtcggacgaaacattaccaggattaagctcttggtacgcaagtttctgcagacccaggacgataggcctttctttctttatgtcgcttttcatgatcctcaccgctgcgggcattcgcaacctcaatacggaacgttctgcgagaaatttggcaatggagaaagcgggatgggtaggattcctgattggaccccacaagcatacgaccctcttgatgtccttgtgccgtactttgtccctaataccccggcagcgcgcgcagacctggcagcgcagtataccactgtcggcaggatggaccaaggtgtgggtctggtgcttcaggaactcagggatgccggtgtgcttaatgacactcttgtgattttcacctcggataacgggattccttttccatcgggaaggacgaacctgtactggccaggcaccgctgaacccctccttgtgtccagcccagaacaccccaaacgatggggacaagtcagcgaggcatacgtcagcctcctggatctgactcctactatcctggattggttcagcattccctacccttcgtatgctatctttggctccaaaactattcaccttactggtcgctccctgcttccggcgttggaagccgagcctctgtgggcaaccgtgttcggttcccagagccatcatgaagtcaccatgtcgtacccgatgcggtctgtccagcacagacacttccgtttggtgcataacctgaacttcaaaatgcctttcccaattgatcaagatttctacgtgtcccccacgtttcaggatcttctgaatagaactacggcaggtcaacccacgggctggtacaaggatctgcgtcattactactaccgggccaggtgggaactttacgatcgttccagggacccacatgaaactcaaaacctcgcaaccgacccacgctttgcccaactgcttgagatgcttagagatcaactggcaaaatggcagtgggaaactcatgacccttgggtgtgtgcaccggatggagtactggaagaaaagctctcacctcagtgtcaacctcttcataacgagctg

SEQ ID NO: 250666 - DNA, 1506 bp, synthetic construct
  misc_feature 1..1506: note = Description of Artificial Sequence: Synthetic coding sequence
  source 1..1506: mol_type = other DNA
atgtcttgccctgtgcccgcatgttgtgcgttgctactggttttgggcctgtgtagggcacgaccgcggaacgcgctacttctgttggccgacgatggaggctttgaaagtggtgcctataataattcggccatcgccacccctcacctagacgcactggcccggagatcattgctctttcgaaacgcatttacaagcgtgagctcctgctcccccagccgagccagtctcctcaccggattaccccagcatcaaaacggtatgtatggactgcaccaggacgtccaccattttaactctttcgacaaagtgcgatctctgcctttgttactgtcgcaggcaggcgtgagaacagggatcattggcaagaagcacgtgggcccagaaaccgtgtaccctttcgacttcgcctatacagaggagaatgggagcgtgttgcaagtgggccggaatatcacccgaatcaagctgctggtacgaaaatttctccagacacaggacgatcgacctttttttttgtacgtggcttttcacgatccccatagatgcggtcactcccagccccaatatggaacgttttgtgagaagtttggcaatggcgaatcaggaatgggcagaattcccgattggactccccaagcatatgatccgctggacgtgcttgtcccatactttgtcccaaatactccggcagctcgagccgatctggctgcacagtacaccaccgtcgggagaatggaccagggcgtaggcctggtcctgcaagaattgagggatgctggcgtgctcaatgacacattagtcatctttacttcagacaacggcataccattcccatccggtcgtaccaatctatattggcccggcactgcggagcccctgctggtgtcctcccccgagcaccccaaaaggtggggacaggtatccgaggcctatgtctctttgttagacctcacacctaccatcctggactggtttagcatcccctatccatcatacgctatcttcggtagtaagacgattcacctgaccggtagatcactcctccctgccctggaggcggagccactgtgggcaactgtcttcggcagccaaagtcaccatgaggtcacaatgtcttatcccatgagaagtgtgcagcaccgacacttcaggttagtgcacaatctgaatttcaagatgcccttcccaattgaccaggatttctatgtatctcccacatttcaggaccttttaaatagaaccacggctgggcaaccaacaggctggtataaagacctgcgacattactactatcgagcccgctgggagctgtatgatcgaagtcgagacccccatgagacgcagaatctcgccaccgaccccagattcgctcagctcctcgagatgttacgtgaccaattagcaaaatggcaatgggagacccacgatccttgggtatgtgcccctgatggggtgttggaggagaagcttagtccccagtgccagcctcttcacaacgaactg

SEQ ID NO: 250667 - DNA, 1506 bp, synthetic construct
  misc_feature 1..1506: note = Description of Artificial Sequence: Synthetic coding sequence
  source 1..1506: mol_type = other DNA
atgtcatgtccagtgccagcttgctgcgctcttcttctagtgttaggtctgtgtcgggctagaccccgcaacgccctgctgttactcgccgacgacggcggcttcgaatctggtgcgtataataacagcgcaatcgctacacctcatttggacgctttagccagacgcagtctgcttttccggaatgctttcacttcagtgtcctcatgtagtccgtcccgagcatccctgctaacgggtctccctcagcatcagaacggaatgtacggcctccaccaggatgtgcaccactttaatagctttgataaggtaaggtccctgccgttactcttgtctcaagccggggtccgcacagggatcattgggaaaaagcacgtaggcccagaaaccgtctaccccttcgatttcgcctatacagaggaaaacggcagtgtactccaggtgggcaggaacatcacccgcattaaactgctggtgagaaagttcctacagactcaggacgaccgacccttctttctatacgtggcattccatgatccacacaggtgtggtcattctcagccacagtatggaacgttctgtgagaagtttggaaacggagagtccggcatgggacggatccctgattggaccccgcaggcgtacgatcctctcgacgtgttagtgccctacttcgttccgaacacacccgccgccagggcggatctagccgcccaatacaccacggtgggacgtatggaccagggtgtgggtcttgtgctgcaggagctgagagacgccggggtgctcaacgacactctcgtgatatttacctctgacaacggaatccccttcccatcaggaagaacgaatctgtactggccaggaaccgccgaaccactgctggtgagctctcccgagcatcccaagcgttggggccaggtgagcgaagcttatgtcagtcttctcgatctcacccccactatcctagattggttttcgattccctacccctcctatgccatctttggctccaaaacaattcatctcactgggagatcccttctgccagctctggaagccgagcctctctgggccacggtttttggaagtcaatcccaccatgaggtaacaatgagctaccctatgaggagtgtgcagcaccggcactttcgtttggttcacaacctgaatttcaagatgcccttcccaattgaccaagacttctatgtatcgcctaccttccaagacctgctgaaccggaccacggccggacagccaactgggtggtacaaggatttgcgccattactactatcgcgcccgctgggagttgtacgatcgaagccgagaccctcatgagacgcaaaatctggctaccgatccccgatttgcacaactgctcgagatgctcagagatcagttggccaaatggcagtgggagacacatgatccctgggtgtgcgcgcccgatggagttctcgaggagaagctgtcaccacagtgtcagcctctgcacaatgagctt

SEQ ID NO: 250668 - DNA, 1506 bp, synthetic construct
  misc_feature 1..1506: note = Description of Artificial Sequence: Synthetic coding sequence
  source 1..1506: mol_type = other DNA
atgagttgtcctgtacccgcctgctgcgccctcttactcgtgttggggctgtgtagagccagaccaaggaatgccctgctgcttctcgccgacgacggaggtttcgagtcaggtgcctataacaactctgctattgcaaccccccatctcgatgccctcgcccgtcgctcattactctttcgaaatgccttcacctcagtaagctcctgctctccaagtagggcctcactgcttacaggattgccacaacatcagaatggcatgtacggacttcatcaggatgtgcatcacttcaactcgttcgacaaggtgagatctcttcccttgttgctctctcaggccggagtgcgcacagggattatcggcaagaaacacgtgggtccagaaacggtttacccctttgatttcgcctataccgaggaaaatgggagcgtgttgcaggtggggaggaatatcacaagaatcaagctgttagtccgcaaattcctgcagacccaagacgatcggcctttctttttgtacgtggcgtttcacgacccgcaccgatgcggacactctcagcctcagtatgggaccttctgcgagaagtttgggaacggggagtctgggatgggcaggattccagactggactccgcaagcttacgatcccttagatgttctagtaccatattttgtgccaaacacacctgctgccagggcggacttggcagcacaatatactacggtaggtcgcatggaccagggtgttggactagttttgcaagaactgagagatgccggcgtcctgaacgacacactggtgatattcacctcagataacggaattccattcccatcaggccgaaccaatctgtactggcctgggactgccgagccacttctggtgagcagtcctgagcacccaaaaagatggggacaggtgtctgaggcctacgtttctctgctggatctgacgcccaccatcctggactggttttctataccctacccttcttacgctatctttggatccaagacaatccacctcaccgggcgcagcctgctgcccgctcttgaggcagagccactctgggctaccgttttcggcagccagtcccaccatgaggttaccatgagttatcccatgcgctcggttcaacaccgccattttcgcctggtacacaatctgaattttaaaatgccttttccaattgaccaggatttctacgtttcccccacatttcaagaccttctgaaccggacgacagcaggacagccaacagggtggtataaggacctgagacattactactatagggccaggtgggaattgtatgacaggagccgggatccccatgagacacagaatttggctaccgatccacgctttgcccagctgctagagatgctgagggatcaactcgccaagtggcaatgggagactcatgatccctgggtatgtgcacctgatggtgtcctggaagaaaagttaagtccgcagtgccagccgctccataatgagctg

SEQ ID NO: 250669 - DNA, 1506 bp, synthetic construct
  misc_feature 1..1506: note = Description of Artificial Sequence: Synthetic coding sequence
  source 1..1506: mol_type = other DNA
atgagctgcccggtgcccgcatgttgtgcgttgctactcgtccttgggctgtgtagggcaaggccccgaaatgccctgctgctgctagcagacgatggcggcttcgagtcaggcgcctataacaatagcgcgatagcgactcctcatttagatgctctggctaggcgcagtttgctgtttcggaatgcttttacgagcgtgagcagttgcagtccaagcagggcttctcttctaaccggcctgccacaacaccagaacggtatgtatgggttgcatcaggatgtgcatcattttaatagctttgataaagtgagaagcctgccccttctgctgtcacaagctggagtgcgtaccggcatcatcggcaagaagcacgtgggccctgaaacagtttatccatttgatttcgcctatacagaagaaaatggttccgtgctgcaggttggccgaaacataaccagaatcaagctgttggtaaggaagttcttacagactcaggacgaccgaccatttttcttgtacgtagcttttcatgacccccaccggtgtgggcactctcaaccccagtacggaactttctgtgaaaaatttggcaacggtgaatctggtatgggtaggattccggattggacgccccaggcatatgacccactggacgtgctggtgccctattttgtgcccaacacccctgccgcacgggctgacctggctgcccagtataccaccgtgggcagaatggaccagggagtagggttggtgttgcaggaattacgtgacgccggggtgctaaatgatacccttgtgattttcaccagtgacaatggaatccccttccccagcgggcggacgaacctatattggcctggcacagctgagcccctgcttgtgtccagcccggagcacccaaaaaggtggggtcaggtcagcgaggcatatgtgagcctgcttgatcttacccctaccatactggactggttctccattccgtaccctagctacgccatcttcgggagtaaaaccattcacttgacaggtaggagccttctccctgcccttgaagcagagcctttgtgggcgactgtttttgggagtcagtcacaccatgaagttactatgtcttatcccatgcgctctgttcagcataggcacttccgtctcgtgcataatttgaactttaaaatgcccttcccaatagaccaagacttttacgtgagcccgacatttcaagacctgcttaatcgaacaaccgcgggtcagccaacaggttggtataaagatcttagacactactattaccgagctagatgggaactctatgacaggtcgcgtgatcctcatgagacacaaaatctcgctaccgacccacgatttgctcagcttttggaaatgctccgggatcagttagcaaagtggcagtgggaaacacacgacccttgggtctgtgcgccagacggagtgttggaagaaaagctgtccccccagtgccagcctctgcataacgagctg

SEQ ID NO: 250670 - DNA, 1506 bp, synthetic construct
  misc_feature 1..1506: note = Description of Artificial Sequence: Synthetic coding sequence
  source 1..1506: mol_type = other DNA
atgtcttgccccgtgcctgcctgttgcgcacttctgctggttctcggactgtgtagggcccggcctagaaacgcacttctgctcttggcggatgacggcggcttcgaatctggggcttataacaattcagccatcgcgactccacacttggatgccctcgctaggcgcagtcttctgttcagaaatgccttcacctctgtctccagttgttcaccgagcagagctagcctgctgaccggcttgccccagcaccaaaatggcatgtacggccttcaccaagatgtgcaccattttaattccttcgacaaggtgaggtcccttcccctgctgttgtctcaagcgggggttcgaacagggatcatcgggaagaagcacgttggcccagaaacggtgtatcccttcgattttgcttacactgaggagaacggctctgtcttgcaagtggggagaaacatcactaggatcaagttgcttgttcgcaaattcttgcaaacccaggatgacagacctttttttctgtacgtggcgtttcacgaccctcatcgctgtggccactcacagcctcagtacggaactttttgcgagaaatttggtaatggggagagtggcatggggcggattcccgattggacaccccaagcctatgacccactcgatgtgctcgttccttactttgtgcctaacacaccggcagctagagccgacctcgccgcacagtatactacagtcggcagaatggaccaaggagttgggctggttctgcaggagctgcgggacgcaggagtactcaatgatacactcgtgatcttcacgtccgataacgggatcccgtttcccagcgggcgaacaaacttgtattggcctggtacggctgagcctctgctggtgtctagtcccgaacaccccaagcgatggggccaggtctcagaagcatatgtgagcctgctggacctgaccccaaccatcctcgactggtttagtatcccatacccgtcatacgcgattttcgggtccaagaccatccatctgaccggcagatccctgcttcccgcactggaggccgaaccactgtgggccacggtattcggaagccagagccatcatgaggtgactatgtcttacccgatgaggtcagtacagcaccggcacttccggctcgtgcacaacctgaatttcaagatgccattccccatcgatcaggatttctatgtttcacctacatttcaagatctgctgaaccgcaccactgcaggccaacccactggatggtataaggacctgaggcactactattaccgagcccgctgggaactctatgacaggagccgagatccccacgaaacccagaacctggcgactgatccaagattcgcccaactgctggaaatgcttagggatcaactggcaaagtggcagtgggagacacatgacccttgggtttgcgcacccgacggggtacttgaggagaagctctctccccagtgccaacccttgcacaacgaactt

SEQ ID NO: 250671 - DNA, 1506 bp, synthetic construct
  misc_feature 1..1506: note = Description of Artificial Sequence: Synthetic coding sequence
  source 1..1506: mol_type = other DNA
atgtcatgtcctgttcctgcatgttgtgcattattattagttcttggactttgtagagcaagacctaggaatgcattattacttttagctgatgatggaggatttgaatctggagcatataacaatagtgcaatcgctactccacatttagatgcattagctagacgatctttactttttcgtaatgctttcacatcagtatcttcatgttctccatcaagagcatcattgttgactggattgcctcaacatcaaaatggtatgtatggacttcatcaagatgtacatcatttcaattcatttgataaagtaagaagtcttcctcttttattaagtcaagcaggagttcgaacaggaatcattggaaaaaaacatgttggtcctgaaactgtttatccattcgattttgcatatactgaagaaaatggatctgtattacaagttggtagaaacatcactcgtataaaacttttagtcagaaaatttcttcaaacacaagatgatagaccattttttctttatgtagcatttcatgatccacatagatgtggtcactcacaaccacaatatggaacattttgtgaaaaatttggaaatggagaatctgggatgggaagaatccctgattggactccacaagcatatgatccattagatgtattagttccatattttgttcctaatactccagccgcaagagctgatcttgcagctcaatatacaactgtaggtagaatggatcaaggagtgggtctagttttgcaagagcttagagatgctggagtattaaatgatactcttgttattttcacatcagataatggaattccatttccatctggacgtacaaatttatattggccaggaactgctgaacctttacttgtttcatcaccagaacatccaaagcgatggggacaagtaagtgaagcatatgtttctttattggatttaactcctactattttagattggttttctattccatatccaagttatgcaatatttggaagtaagactattcaccttactggaagatctttgttacctgctttagaggcagaaccattatgggctactgtttttggatctcaaagtcatcatgaagtgactatgtcatatcctatgagaagtgttcaacatagacattttagacttgtacataatttaaattttaagatgcctttcccaattgatcaagatttttatgtatcacctacttttcaagatcttttaaacagaacaactgctggacaaccaactggatggtataaagatttaaggcattattattatagagcaagatgggaattatacgatagatcacgtgatccacatgaaacacaaaatttagctacagacccaagatttgcacaattattagaaatgcttagagatcaacttgcaaaatggcaatgggaaacacatgatccatgggtttgtgctccagatggagtattagaagagaaattatctccacaatgtcaaccattacataatgaacta

SEQ ID NO: 250672 - DNA, 1506 bp, synthetic construct
  misc_feature 1..1506: note = Description of Artificial Sequence: Synthetic coding sequence
  source 1..1506: mol_type = other DNA
atgtcttgtcccgtacccgcctgctgtgccttgctcctcgtactgggcctgtgccgggcacggcctaggaacgccctgctgctgcttgctgatgatggcggcttcgaatcaggagcttataataactcagctatagctaccccacaccttgatgcgctcgcacgcagaagccttttgttcaggaacgcctttacaagcgtatcgtcatgcagccctagcagggcttcattgctgaccggcctgccacagcaccagaatgggatgtatggtcttcaccaggatgtacatcattttaattcgtttgacaaagtgaggagtttgccattgctgctcagccaggccggcgtgagaacgggaatcatcgggaagaagcatgttggccctgagaccgtttaccctttcgactttgcatacaccgaggaaaatggctccgtgcttcaggttggaaggaatattactagaatcaagctgctggtgagaaaattcttgcagactcaggatgataggcctttcttcctctacgtggctttccatgatccccacagatgtggccactcgcaaccacagtacggcacattctgtgaaaagttcgggaacggcgagtcaggcatgggtagaattcccgactggacaccacaagcctacgatcccttggacgtgctggtgccctattttgtgcccaatactcctgccgcacgcgccgacttggctgctcagtacaccaccgtgggccggatggaccaaggcgtcgggctggtcctgcaggagctgcgggacgccggggtcctaaacgacaccctggtgatatttacaagcgataacgggattcctttcccttccggacgtactaacttgtattggcctggaactgccgaacccttgctcgtcagttcgcctgagcacccgaagaggtggggccaagttagtgaggcctatgtctccctgttggatctgaccccaaccattctcgactggttttccattccctaccccagctatgccatcttcggaagtaaaaccattcatttgacaggccggtcgctgttacccgccctggaagccgaacctctgtgggctacagtgtttggatctcagtcacaccatgaagtcacaatgtcatacccaatgcggagtgtacagcatcggcatttcagattagttcacaacctcaacttcaagatgcctttccccatcgaccaggacttctacgtaagcccaacgtttcaggacttgttgaatcgcaccacggcgggtcaacctactggatggtacaaggatctcagacactactattatagagcccggtgggagctgtacgaccgctcacgggatccccatgagacccagaatcttgcgacggatccacgatttgcgcagctcctggagatgctccgggatcaactggccaagtggcagtgggagacacacgacccctgggtgtgtgctccggacggcgtccttgaagaaaaactcagccctcagtgtcagcccctgcacaacgaactt

SEQ ID NO: 250673 - DNA, 1506 bp, synthetic construct
  misc_feature 1..1506: note = Description of Artificial Sequence: Synthetic coding sequence
  source 1..1506: mol_type = other DNA
atgagttgccctgtgccagcctgttgtgcgctgttgttggttctcgggctgtgcagagcgcggccccgaaacgccctgctactcctggccgacgacggcggctttgagtccggcgcctataacaactctgcaatcgctacgccccacctggacgccctggcgcgccggagcttgctctttcgtaatgcattcacgtccgtgagttcttgtagcccaagccgagcatccctgctcacggggctaccacagcatcagaacggtatgtacgggctgcaccaggacgtccaccatttcaactctttcgacaaggtgcggtctctgcccctgctcttatcacaggcaggggtgcgaactggcataattgggaagaagcacgtgggcccagaaaccgtgtaccccttcgattttgcctataccgaagagaatggctccgtgctgcaggtgggaaggaacatcacaaggatcaaacttctggtgagaaagttcttacagactcaggacgacagaccgttttttctctacgtggcctttcacgatccacaccgttgcggccattctcagccccagtacgggacattttgcgaaaaatttgggaacggcgagtccggaatgggtagaattcctgattggacaccgcaggcgtatgatcctctggatgtactcgtgccgtattttgtcccaaacacgccggccgctagagcagacctggcagcccaatataccactgtgggccgcatggaccagggcgtcggcctcgtccttcaggaactccgcgacgccggagtcctcaacgacacacttgtgatcttcacttccgacaacggaattccgttccccagcggtcgcaccaatttgtactggcccgggaccgccgagccactcctggtgagcagcccagaacaccctaagcggtggggacaagtgagtgaagcctacgtctcactgcttgatctgacccctacaattctagactggttctcaatcccctacccttcttatgcgatctttggcagtaaaacgattcacttaacagggcggagtctgttgcctgcacttgaggctgaacccttatgggccacggtattcgggtcacaaagccaccacgaagttacaatgtcgtatcctatgagatcagtccaacatagacacttccgactcgtgcataatctgaatttcaaaatgccctttcccatagatcaggatttttacgtcagccctacttttcaggacctgctaaacagaacgactgcaggccagcccactgggtggtacaaggacctgcgtcactactactatagggcccgctgggagctttacgacagatcaagggatcctcatgagacccaaaatttagctacagatcctcgatttgcgcagctgcttgagatgttgcgcgatcagcttgcaaaatggcagtgggaaactcatgacccatgggtgtgcgcacccgacggggttcttgaagagaagctgagcccccagtgccagcctctccataacgagctc

SEQ ID NO: 250674 - DNA, 1506 bp, synthetic construct
  misc_feature 1..1506: note = Description of Artificial Sequence: Synthetic coding sequence
  source 1..1506: mol_type = other DNA
atgtcttgtcccgtgccagcctgttgtgcactgctgctagtgttgggcttatgtagagctaggccacgcaatgctcttctgctgctagccgatgacggtgggtttgagagtggggcttataataattccgcaattgcgacaccacatctggacgcccttgcgcgcagaagcctgctgtttcgcaacgcttttacgagcgtatcgtcctgcagccccagccgcgcatctctgctcacaggactcccccagcaccagaatggcatgtatggcctgcaccaggacgttcaccacttcaactccttcgacaaggtccgcagcttgccacttttgctgagccaggccggagtgcgcactggtattattgggaaaaaacatgtcggcccggagacagtgtaccctttcgattttgcatacaccgaggagaatggatccgttctgcaggtgggcaggaatattactcgcattaagctgttggtccgcaaattcctccagacccaggatgaccggccattttttctgtacgtggcattccacgaccctcatcggtgtggacactcccaaccccaatacggaaccttctgtgaaaaatttggcaacggtgagtcaggaatgggccgcattccagattggacaccacaggcctatgacccacttgacgtgctcgtcccttattttgtgcccaatacccccgcagcgagggccgacctggctgcacagtataccaccgtgggccgaatggatcagggagttggtttggtgttgcaggagctgagagacgcgggggttctaaatgacacactcgtgatattcacctcagataatggaatacccttcccgtctggaaggaccaatctctactggccgggtaccgcagagcctttacttgtgtcaagtcccgaacaccccaagcgttggggccaggtgagcgaagcctacgtgtccttgctcgaccttaccccgaccattcttgattggttctccatcccttacccgtcctacgctatctttggctcaaagacgatccatcttaccggtagaagtttgcttccagcattagaggcagaacccttatgggccaccgtgttcgggtctcagtcccaccacgaggtgacgatgagttacccgatgagaagcgtgcagcaccgccatttcagattggtacataacctaaactttaaaatgccttttcctatcgaccaagacttctacgtgtcgcccaccttccaagatctgcttaatcgcacaactgccggccagcccaccggctggtataaggatctgaggcattattattatcgcgctcgctgggagttgtatgatagatccagggatccccatgagacccagaatctggccactgatccccgcttcgcgcagctattggagatgttgcgcgatcaacttgcaaaatggcagtgggagacgcacgacccatgggtgtgcgctcctgacggggtgttggaagagaagttgtcccctcagtgccagcccctccacaacgagctt

SEQ ID NO: 250675 - DNA, 1506 bp, synthetic construct
  misc_feature 1..1506: note = Description of Artificial Sequence: Synthetic coding sequence
  source 1..1506: mol_type = other DNA
atgtcttgcccggtgcccgcttgctgcgccctgcttctggtcctgggtctctgtcgcgcccgcccacgcaacgcactcctgttgctcgcggatgacggcggattcgagagcggtgcatacaacaatagcgcaatcgctacccctcacctggacgccctcgctcgaaggtccctgctcttccgcaacgccttcacttcagtcagttcctgtagcccgagccgcgccagcctgttgaccggtttgcctcagcaccagaacgggatgtatggactgcaccaggacgtccatcactttaactcctttgataaggtgaggtccctccccctgctgttgtctcaggctggcgtcagaactggtatcatcggaaagaaacacgtcgggccagaaaccgtctacccgttcgacttcgcctacaccgaggagaacgggtcagtgttgcaggtgggccgcaacataacgcggataaagctgcttgtccggaaattcctccagacccaggacgacaggccatttttcctctatgttgcgttccatgatccacataggtgcgggcattcacagccgcagtatggcacattctgcgagaagtttggcaatggcgagagcggcatgggtcggataccagattggactccacaggcttacgatccgctggatgttctggtgccttacttcgtccccaataccccggctgcccgcgcagatctggccgctcagtatacgaccgtgggcaggatggaccagggagtgggattggtgcttcaggaactcagagacgcaggcgtactgaacgatactctcgtaatattcacaagcgacaacgggatcccattccctagtgggcgcaccaacctctactggcccgggacggcagaacccctcctcgtaagctctccagaacatcctaagaggtgggggcaggtgtctgaggcctacgtttccctgctcgacctgaccccaacaattctggattggttttccatcccatatccttcctatgccatatttggtagcaagactattcacctgacagggcggagcctgctcccggctctggaagcagaaccgttgtgggctacagtgttcggcagtcagagccaccacgaggtgacaatgtcttatccaatgaggagcgttcagcatcgacattttcggcttgtccataatctcaatttcaagatgccgtttcctatcgatcaggatttttacgtttccccaacatttcaggatctgctgaacagaaccaccgccggtcagcccacgggctggtacaaagatctgaggcattattattaccgagctcgatgggagctgtacgataggtcaagagatccccatgagactcaaaacctggctacagatccacggtttgcacagctgctggaaatgcttagagaccagcttgctaaatggcagtgggagacccacgacccatgggtgtgtgccccagacggggtgctggaggagaaattgtcacctcagtgccaacctctgcacaatgagctc

SEQ ID NO: 250676 - DNA, 1506 bp, synthetic construct
  misc_feature 1..1506: note = Description of Artificial Sequence: Synthetic coding sequence
  source 1..1506: mol_type = other DNA
atgtcatgccccgtgcccgcatgctgtgcgctcctgctggtcttgggactttgcagggcgcgtccgcggaacgctctgctgttgctcgccgatgatggtggctttgagtcgggggcatacaacaactccgcgattgctactccacatctcgatgctctggccaggagaagccttctgttcaggaatgcatttacctccgtctcgtcctgtagcccttcccgcgcaagcctgttgaccggactcccacagcatcaaaacggaatgtacgggctgcaccaagacgtccaccacttcaactcatttgacaaagtgcgatcgctgccgctcttgctgtcacaagcgggtgtgcgcaccggaatcatcggcaaaaagcacgtgggtccagaaaccgtttacccatttgatttcgcatacaccgaggaaaacgggtcggtgcttcaagtgggaaggaacattacccgaattaagctgctggtgcggaagtttttgcagacgcaagacgatcggccgttttttctttacgtggcctttcatgacccccatagatgtgggcattctcaaccacagtatggcacgttctgtgagaaattcgggaacggagaatccggaatggggcggatacctgactggactccgcaagcgtacgatccattggatgtgctggtcccatactttgtccctaacaccccagcagccagagcagacctggcggcccaatacactactgttggaagaatggatcagggagtgggactcgtgctgcaggaactgcgggacgcaggggtccttaatgacacgctcgtcatattcacctcagataatggcattccttttcccagcggacgcaccaacctttattggcctgggactgcagagccgctcctcgtttcgagtccagaacatcctaagcgatggggtcaagtctccgaagcatacgtgagcctcctcgatcttacccccactattcttgattggttctcgatcccttacccgtcctacgcaattttcggctccaagacgatacacctcacgggtcgcagtctccttcctgccctggaagcagaaccgttgtgggcaaccgtgtttggtagccaatcccatcacgaagtgactatgtcgtaccctatgcgatcagtgcagcatcgtcactttagacttgtgcataatctcaactttaagatgccttttccaattgaccaggacttttacgtaagtccaactttccaagatctgctcaatcggaccaccgcaggtcagccaactggctggtacaaggacctccgacattactactatcgcgccaggtgggagctgtacgatcggtcgcgtgatccccatgaaactcaaaaccttgcaacggatcctcgatttgcccagctgttggaaatgctgagagatcagttggcaaagtggcagtgggaaactcatgacccgtgggtctgtgcccctgatggtgtgctggaagagaaactgagcccacaatgtcagccgcttcataatgagctg

SEQ ID NO: 250677 - DNA, 1506 bp, synthetic construct
  misc_feature 1..1506: note = Description of Artificial Sequence: Synthetic coding sequence
  source 1..1506: mol_type = other DNA
atgtcctgtccggtgccggcttgttgcgccctcctgctggtgctggggttgtgccgggcccgccctcgcaatgcgctgctcctccttgctgacgatggaggatttgagtcaggagcatacaacaacagcgcaatagccaccccgcacctggacgccttggcacggaggtcactgctttttagaaacgcattcacttcagtgtcgtcctgctctccgagccgcgcgtcgctcctgaccggactgccacagcatcaaaacggcatgtatggtttgcatcaagatgtccatcacttcaactcattcgataaagtgagatcgctccccctgctcctgagccaggcgggagtcaggaccgggatcatcggtaagaagcacgtgggaccggagactgtctacccgtttgatttcgcctacaccgaggagaatgggagcgttcttcaggttgggagaaacattactcgcatcaaattgctggtccggaagttcttgcaaactcaggatgatcgcccgttcttcctttacgtagcctttcatgacccgcatcggtgcggccactcgcagcctcaatatggaactttctgcgagaagttcgggaacggagaatccggaatgggtcggatcccggactggacccctcaggcctacgaccccttggacgtgctggtgccctacttcgtcccgaatactcccgccgcaagagcggacctcgccgcacagtataccaccgtcggcaggatggaccagggagtgggactggtgcttcaagagctcagagacgcaggagtgcttaacgatacgctggtgattttcacgtccgataatggcatcccgttcccgtccggacgtactaacctgtactggccagggaccgcggaacctctgctcgtgtcctcacctgagcacccgaaaagatggggacaggtgtccgaagcatacgtgagcttgctggacttgaccccaacgatcctggattggttcagcatcccctacccgtcgtacgcaatcttcggaagcaagaccatccacctcactggtcgctcgctgctgcctgccctcgaagcagaacctctgtgggctaccgtattcggcagccaatcccaccacgaggtgaccatgtcataccctatgagaagtgtacaacacagacattttcgcctggtgcacaatctgaatttcaagatgccatttcctatcgatcaagacttctacgttagcccaaccttccaagacctgctgaaccggactactgctggacaaccaactggctggtacaaggacctgcggcactactactaccgggctcggtgggaactttacgaccgctccagagatccacatgaaacccaaaacctcgctacggacccacgttttgcgcagttgctggaaatgctcagggaccagctggcgaagtggcagtgggaaacgcatgacccgtgggtgtgcgcgccagatggcgtgttggaagaaaagctgtccccccagtgtcagccacttcacaatgaactg

SEQ ID NO: 250678 - DNA, 1506 bp, synthetic construct
  misc_feature 1..1506: note = Description of Artificial Sequence: Synthetic coding sequence
  source 1..1506: mol_type = other DNA
atgtcttgccctgtcccagcctgttgcgcgctgcttttggtgctcggtctctgtcgagctagacccaggaatgccctactgctgctggctgatgacgggggattcgaatcgggcgcatataataatagtgctattgctactccccacttggatgcattggccagaaggagcctcctgttcaggaatgcatttacatccgtcagctcttgctcaccttctcgcgcctccttactcaccggcctgccgcaacatcagaatgggatgtacggcttgcaccaggatgtgcatcactttaatagcttcgacaaagtgaggtctctgcctctgctcttatcgcaggccggcgttagaactggcatcatagggaagaaacacgttggcccagagacagtgtaccctttcgattttgcctacacggaggagaatgggtcagtgttacaggtagggcggaacattacacgtatcaagctgcttgtcagaaaattcctgcagacacaagacgatcggcctttttttctatatgttgcattccacgacccacatcggtgcggccactcccagccgcagtacggtaccttctgcgaaaagttcggtaacggcgaatctggcatgggcagaatccctgactggacacctcaagcctacgaccccctggatgtcctggtgccctattttgtgccgaataccccagccgctcgggctgacctcgcagctcagtacacaacggtgggccgaatggaccagggggttggcctcgttctgcaggagctgagagatgccggggtgctgaacgacaccttggtgatcttcacatccgataacggcattcccttcccttcaggcagaactaatttatattggcccggtactgcggaacctctgctggtgagttcccccgagcacccgaaaagatggggacaggtgtctgaagcatacgtttctctcctggacctgacgccgaccattcttgactggttctcaatcccctacccgtcttatgctatctttgggtccaaaaccattcacctaaccggacgatcactgctgccagctctagaggctgagcccctgtgggcgaccgtctttggatctcagagtcaccatgaggttactatgagctaccctatgcgatctgtacaacatagacacttcaggctggtccataatttaaactttaaaatgccatttccaattgatcaggacttctatgtgtcgccaacctttcaggacctgctcaatcgcacaacagctgggcagcctaccggctggtataaggacctcaggcattactattaccgagctagatgggaactgtacgatagaagtagagaccctcatgagactcagaacctagcgaccgacccgagattcgcccagctcttagagatgctcagagaccaactggctaagtggcagtgggagactcatgacccatgggtatgcgctccggacggagtcttggaagagaaactctcccctcagtgccagcctctccacaacgagcta

SEQ ID NO: 250679 - DNA, 1506 bp, synthetic construct
  misc_feature 1..1506: note = Description of Artificial Sequence: Synthetic coding sequence
  source 1..1506: mol_type = other DNA
atgagctgcccggtgccagcctgttgcgctttgctgcttgtgctcggattgtgcagagcacgccctagaaacgccctgcttctcctggcagatgatggaggctttgagtcaggggcgtacaacaacagcgcgatcgccaccccgcacctcgacgctctggccaggcggtccctgctgtttcggaatgcgtttaccagcgtcagcagctgctccccatcccgggcttcgctcctcaccgggcttccgcagcaccagaacgggatgtacgggctgcatcaggacgtgcatcactttaacagctttgataaggtgcgtagcctgcccctgctcttgtcccaggcgggggttcgcaccggcatcatcggcaagaagcacgtgggcccggagacggtgtaccctttcgacttcgcgtacaccgaggaaaacggctccgtgctgcaggttggaagaaacataacccggattaagctgctggtccggaagttcctccagacccaagatgaccggccgtttttcctctacgtggcattccatgacccacaccgctgcgggcacagtcaaccccagtacgggactttttgcgagaagttcgggaatggagagtcgggtatggggcgaattcccgactggacgccgcaggcctacgatccgctcgacgtgcttgttccctacttcgtccccaacactccggcggcccgcgccgatttggcagcccagtacacgaccgtgggtcgcatggaccaaggagtgggactggttctgcaagaactgcgggacgcgggagtgctgaatgacaccctggtgatcttcacgtccgataacggcatcccttttccaagcggacgcaccaacctgtactggcctggtaccgcagaaccgctgttggtgtcaagccctgagcacccgaaacggtggggacaggtgagcgaagcgtacgtgtcgcttctcgacttgacccctactatcctggattggtttagcatcccatacccgtcgtatgctatcttcgggtcgaaaaccatccatttgacgggcaggtcgctgttgcctgctctcgaagcggagcccctttgggccactgtgttcggatcccagtcccatcatgaagtgactatgtcttacccgatgcggtcggtccaacaccggcacttccggctggtacacaacctcaatttcaagatgccctttccaatcgatcaggatttctacgtgtctccgaccttccaggatctgctgaataggactactgccggacaacctactgggtggtacaaggaccttcggcactactactacagagcacggtgggaactgtacgatcgatcgagggacccgcacgagactcaaaatctggctaccgacccgcggttcgcgcaactgcttgaaatgctgcgcgaccaactcgcaaagtggcagtgggaaacccatgacccttgggtctgtgcccccgacggagtgctggaagaaaaactgtcgccgcagtgccagccactccacaacgagctt

SEQ ID NO: 250680 - DNA, 1506 bp, synthetic construct
  misc_feature 1..1506: note = Description of Artificial Sequence: Synthetic coding sequence
  source 1..1506: mol_type = other DNA
atgtcatgcccagtccctgcgtgctgcgccctgcttttggtgcttgggctctgtcgtgctagaccccggaacgccctgctgcttctggcagatgatggcgggtttgaaagtggcgcctacaataattctgctatcgcaaccccgcacctcgatgctctagctaggaggtcactgcttttccggaacgcatttacaagcgttagctcttgctccccttcacgcgcctccctgttgactggccttcctcaacatcaaaacggaatgtatgggttgcaccaggacgtgcaccatttcaattcgtttgataaagtccggagtctgcctctgttgttgtctcaggctggcgtgagaacaggcataataggaaagaagcatgtcggtcccgagaccgtgtacccttttgactttgcttatacagaggagaacggaagcgtgctccaggtgggtagaaacatcacaaggatcaagttgctcgtgcgaaagtttctgcagacacaggacgaccggcctttcttcttgtatgtcgctttccacgatccacatcggtgtggtcattctcaacctcagtatggaacgttctgcgagaagttcggaaacggagaatccggcatgggaagaatccctgactggacaccccaagcttatgaccccctagatgtccttgtgccatactttgttccaaatacacccgccgctagggccgacttagccgcccagtacaccacggtgggaaggatggatcagggagtgggattggtcttgcaagagttgagggacgcaggcgtgcttaacgatactctggttatttttaccagcgacaacgggattcctttcccatcgggcagaacaaacctctattggcctggtaccgcagagcctctgcttgtgagctccccagaacaccctaagaggtggggccaggtgtctgaagcttacgtaagtctgcttgacctgacgcctactatcttggattggttctcaatcccttaccccagctacgcaatcttcggatccaaaactattcatctgaccggaagatcgttgctccccgccctggaagcggagcctctttgggccaccgtttttggatctcagagccatcacgaagtcaccatgagctatcctatgaggtctgtgcagcacaggcacttccgactagtgcacaatttgaacttcaaaatgcccttcccgatcgatcaggatttctacgtctcaccgacttttcaggatctcctcaatcggactactgccgggcagcctacgggctggtacaaagacttacggcactattactatcgggctaggtgggagctgtatgaccgcagtagggatccgcatgaaacacagaacctggccacagatccacggttcgctcagcttctggagatgcttcgagaccagttggcgaaatggcagtgggaaacccatgatccgtgggtctgtgcccccgatggggtcttggaagaaaagcttagcccgcagtgccagcccctgcataacgagctt

SEQ ID NO: 250681 - DNA, 1506 bp, synthetic construct
  misc_feature 1..1506: note = Description of Artificial Sequence: Synthetic coding sequence
  source 1..1506: mol_type = other DNA
atgagttgtcccgtcccagcttgttgtgccctcctcctcgtgttaggactatgcagagcgcgccctcggaacgccctattacttctggcagatgacggggggttcgaatcaggagcatacaacaactccgctatcgccactccccatctcgatgctctggcccgccgatcactactattccgcaatgcattcacatccgttagttcctgttccccttctagggcatcccttctgactgggctcccacagcaccagaatggaatgtatgggctgcaccaggatgtccaccactttaactcctttgataaagtgaggtctctgcctctacttctcagtcaggctggagttcgcactggaataatcggaaaaaaacatgttggacctgaaactgtttatccctttgattttgcctatacagaggaaaatggatccgtccttcaggtgggacggaatatcactcggatcaaactcctagttagaaaattcctacagacacaggacgataggccattctttctatatgtcgcttttcacgacccacaccggtgtggacattcccagcctcaatacgggactttttgtgaaaaatttgggaatggagaatctggaatggggcggatccctgattggactccacaggcctatgatcccctagatgttctagtcccatatttcgtccccaacactcctgcggccagggcagatctggcagctcagtatactacggtagggaggatggaccagggagtcgggcttgtgttacaagaactccgggatgccggagtcctgaacgatactttggtcatatttacttcagataacgggatacctttcccctcgggacgtacaaatctttactggcccggaacagcagaacctctcctcgttagttcccccgaacaccccaagcggtgggggcaggtttccgaagcttatgtgtccctactggatttaactccaacaatacttgactggttctcaatcccctacccctcctacgcaatctttggatctaaaacaatacatctgacagggcggtctctactcccagccctcgaggcagagccactgtgggctacggtattcggatcgcaatctcaccatgaagtgactatgtcttatccaatgaggtcagtacagcacaggcatttccggcttgtgcataacttgaatttcaaaatgccctttccaatagatcaggacttttatgtctcccctactttccaagatctccttaatcgcactactgctgggcagcctacagggtggtataaagaccttcggcattattattatagagccagatgggaactgtatgaccgcagtagggacccccatgaaactcagaacctcgctactgatcccagatttgcccagcttttagaaatgctgcgagaccagttggcaaaatggcagtgggagactcacgatccttgggtatgtgcccctgatggagtgttggaagagaaactgtctcctcagtgtcagccattgcataatgaactc

SEQ ID NO: 250682 - DNA, 1506 bp, synthetic construct
  misc_feature 1..1506: note = Description of Artificial Sequence: Synthetic coding sequence
  source 1..1506: mol_type = other DNA
atgtcctgtccggtgcctgcctgttgtgcactgttgttggttcttggcctctgccgggctagaccgcgcaatgcacttctgctgttggccgatgacggaggatttgaatccggcgcctataacaattcagccatcgccactccccatcttgatgcgctggcccggcgctccctcctgtttaggaacgctttcacctcagtgtcttcatgctcaccttctcgtgccagtctgctgacaggactaccacagcaccaaaacggcatgtatggcctgcatcaggacgtccatcactttaactcttttgacaaagtgaggagtcttccactgctgctgagtcaggcaggcgtaaggactggcatcataggaaagaaacacgtggggccggagaccgtatatccctttgactttgcctatacagaggagaacgggagcgtccttcaggtcggacggaacataactcgcattaagctgctggtcaggaagttcttacagacacaggatgataggccctttttcctctacgtggcttttcacgaccctcatagatgcggacatagccagccgcaatacggcacgttttgcgaaaagttcgggaatggagagagtggtatgggtcggattccggactggactccccaggcgtatgaccccctggatgtccttgtcccttacttcgtgcccaatacgccagctgcaagagcggacttggccgctcaatatactacagttggccgcatggaccagggtgtgggccttgtgctccaggagctgcgcgatgcaggcgtgcttaacgacacactcgtcatcttcacgtccgataatggcattccgttcccatctggtagaacgaatctatactggcccggaacagccgagcccttgcttgtcagcagccccgaacaccctaaacgctgggggcaggtgagcgaggcctatgtttctctgttagatttgacgcctaccattctggattggttctccataccctatccatcttatgctattttcgggtcaaaaactatccatctgaccggcaggtctctgctgcctgcgctggaagcagagcccctctgggccactgtgttcggcagccagtcacatcatgaggtgacaatgagttatcccatgcggagcgttcaacaccgccatttcaggcttgtgcataacctgaactttaaaatgcctttccctatcgatcaagatttttacgtatctccgacattccaagatctactgaacagaacaacagcagggcagcccaccgggtggtacaaagatctgcggcactattattatagggctaggtgggagctctacgacagatcacgcgatcctcacgagacccagaatctcgctacggatcctcgctttgcccaattactggagatgctgcgcgatcaactggccaagtggcagtgggagacgcatgatccctgggtgtgtgcgcccgatggcgttttggaagagaagctttcaccgcagtgccagccactgcacaacgagctg

SEQ ID NO: 250683 - DNA, 1506 bp, synthetic construct
  misc_feature 1..1506: note = Description of Artificial Sequence: Synthetic coding sequence
  source 1..1506: mol_type = other DNA
atgtcgtgtcccgtccccgcatgttgcgcactgctcctcgtgcttggcctgtgtcgtgctagaccccgaaatgcattgctgctgcttgcggatgatggtggattcgagtccggagcctacaataactcggcgatcgcgactccacaccttgatgcattggctagaagaagcctgctcttccgaaacgcctttacttctgtgagcagctgttccccctcaagagcatcgcttctcactggacttcctcaacatcaaaacggtatgtacggcctgcatcaagacgtgcatcactttaactcatttgataaggtcaggtcactgcctctgctgctttcccaggccggcgtgcggactggtattatcggcaagaagcacgtgggccccgaaaccgtgtacccttttgacttcgcctacactgaagaaaacggttcggtcctgcaagtgggaaggaacatcaccagaatcaagctgcttgtgcggaagttccttcaaactcaagacgatagaccctttttcctctacgtggcctttcatgaccctcacagatgtggacactcgcaaccacagtacggaactttttgcgaaaagttcggtaatggggaaagcggaatgggacgtataccagattggacgcctcaagcctacgaccctctggatgttcttgtcccatacttcgtgcctaatactccagccgccagagcagatctcgcagcccagtacactactgtcggtcgaatggaccaaggtgtgggactggtcctccaggagttgcgggatgcgggggtgcttaatgatactctggtaatctttacctcagataacggaataccattcccgtcaggaagaactaatctttactggcctggcaccgccgaacccttgctggttagctccccagagcaccctaaacggtgggggcaagtgagcgaagcatacgtgtccctgcttgatctgacccctaccattcttgactggtttagcattccatacccgtcgtacgcaattttcggatcgaaaactattcatcttaccggtcgatcactgctccctgcacttgaagcagaaccgctgtgggcaactgtgtttggttcgcagtcacaccacgaggtcactatgagctacccaatgcgttccgttcaacatagacattttcgactggtgcataacctgaacttcaagatgccctttcctatcgatcaggacttttacgtgtcccctacctttcaagatctcctgaatagaactaccgcagggcaaccgactggatggtataaggatctcagacattactactacagagctaggtgggaactttacgatcggtcccgtgatccacatgaaactcagaacctcgcaaccgatccccggtttgcacaactgctggaaatgctgagggatcaattggcaaagtggcaatgggagactcatgatccatgggtttgtgcccctgacggcgtgctggaggaaaagctgtcacctcaatgccaaccattgcataacgagctg

SEQ ID NO: 250684 - DNA, 1506 bp, synthetic construct
  misc_feature 1..1506: note = Description of Artificial Sequence: Synthetic coding sequence
  source 1..1506: mol_type = other DNA
atgtcgtgccccgtgcctgcctgttgtgcacttctgctggtgctcggcctctgtcgtgcacggcccaggaacgcactcctccttcttgcagacgatggcgggtttgaatccggcgcctacaacaactcggctatagcaacgccccatctggacgctctggcacgcagatccctgctttttcgtaatgcgtttacctctgtgtcgtcatgttcaccttctcgagcctctctccttactggacttcctcaacaccagaacgggatgtacggacttcatcaggacgtccatcacttcaattcctttgataaggtgcggtccctcccacttctgcttagtcaggcgggagtccgtaccggcatcattggaaaaaagcacgtcggacccgaaaccgtctacccctttgattttgcctacaccgaagagaacggatcggtgctccaagtgggccgtaacattaccaggattaagctcctggttagaaagttccttcagactcaagatgaccgccccttctttctctacgtggccttccatgacccgcatcgttgtggtcattcgcaacctcaatacggaacgttttgcgagaaatttggaaatggcgaatccggtatggggagaattccggattggaccccacaggcttacgatccattggatgtgctggtcccttactttgtgccaaatacccctgcagcccgcgcagacctggcagcgcagtacacgactgtgggtcgaatggatcaaggggtgggtcttgtgcttcaagaacttagggacgcaggagtcctcaatgataccttggtgatattcacttccgataatgggattcctttcccatctggtcgcactaacctgtactggcctggtaccgcagaaccgttgctggtgtcgtccccggaacatccaaagaggtgggggcaggtgtcggaagcatacgtgtcgctgctcgatctcaccccaacgatccttgactggttcagtataccttacccttcgtatgctatctttggtagcaagactattcaccttaccggcagatcccttcttcccgcacttgaagcagaacctctgtgggcaactgtgttcggttcacaatcgcaccatgaagttactatgtcctatcctatgagatccgttcagcataggcacttccgtctggtccacaacctgaacttcaaaatgccctttcccatcgatcaagacttttacgttagcccgacttttcaagacttgctcaataggaccacggcgggtcagccaactggttggtacaaagatctgcgccactactactaccgagccagatgggaattgtacgatcggtcccgagatccacatgagactcagaacctcgcgactgatccccgatttgcgcaacttctcgagatgctcagggatcagctggccaagtggcaatgggagactcatgatccatgggtctgcgcacctgacggagtcctcgaggagaagctgtcgcctcagtgtcaaccattgcataacgaactt

SEQ ID NO: 250685 - DNA, 1506 bp, synthetic construct
  misc_feature 1..1506: note = Description of Artificial Sequence: Synthetic coding sequence
  source 1..1506: mol_type = other DNA
atgtcttgcccggtgccagcgtgttgtgctttgctgttagtgctggggctttgtcgtgcaagaccacgaaacgcactattgctgttggcggacgacggtgggttcgaatcgggagcgtacaacaactcagccatagccacaccacacttagacgctctggctcgacggtccctcttgttcaggaatgcctttacgagcgtgtcatcgtgttcaccatcgcgtgcctcacttcttacaggactgccgcaacatcaaaatggtatgtacggacttcaccaggatgtgcatcatttcaattcttttgataaggtccgctcacttccgttgttgctttctcaggccggagtaagaactggaattatcggaaagaaacatgtgggacctgaaacggtgtatccgtttgatttcgcctataccgaagaaaacggctctgtgctccaggtgggaagaaatatcactagaatcaagctccttgtccgtaagttccttcagacacaagatgatcggccttttttcctgtatgtagcttttcatgacccacatcgttgtggccactcacaaccgcagtatggaactttttgtgaaaagttcggaaacggagagagtggcatgggacgaattccagactggacaccacaggcttatgatccactggacgtgctagtgccatactttgtgccgaatacgccagcagctcgagctgaccttgccgctcaatacaccactgttggtaggatggaccaaggagtaggccttgttctacaagagttaagggatgcgggggttcttaatgatacattggtgatattcacatctgacaatggaattccattcccttcgggacgtacgaatctgtattggccggggaccgccgaaccgctattagtttcgtctccagagcatccaaagcgttggggtcaagtatctgaagcctacgtctcattacttgatctgacgccgacaatcttggactggttttctattccatacccaagttatgcaatatttggttccaagactattcatctaacgggccgatcgctactgccagcattggaagcagaaccgctctgggctactgtattcggttcacaatcacatcacgaggttacaatgagttaccctatgcgatcagtgcaacaccgtcatttccgacttgtccataatttaaattttaaaatgccgttccccattgatcaagatttctatgtttcacctaccttccaagatctcctaaacagaactacagctggacaacccactggttggtataaagacttgaggcactattactatagagctagatgggaactctatgatcgatctcgagatccacatgaaacacaaaatttggctaccgatccgcgtttcgctcaactgcttgagatgctccgggatcagcttgccaaatggcaatgggaaacacatgatccatgggtttgtgcgccagatggagtgttggaggaaaagctgtcaccgcaatgccaaccactgcataatgaactt

SEQ ID NO: 250686 - DNA, 1506 bp, synthetic construct
  misc_feature 1..1506: note = Description of Artificial Sequence: Synthetic coding sequence
  source 1..1506: mol_type = other DNA
atgtcctgtcctgtaccagcctgctgcgccctgcttctcgtcctgggactgtgtagagcccgtccgaggaacgcactcttgctccttgccgacgatggaggatttgagtcaggggcctacaataatagcgcgatcgccactcctcacctcgacgcattggctcgcagaagcctgctttttcgaaatgccttcacctctgtctctagctgctcaccaagtcgagcctctctgctgacagggctgccacagcaccagaatggcatgtacggcctacatcaggacgtacatcatttcaactcgttcgacaaagtaaggagtcttccactgctgttgagccaggccggggtgcgcactggaatcatcggcaaaaagcatgtcggacctgaaacagtctatccttttgattttgcctacacagaagagaatggcagcgtcctccaggttggcaggaatattaccagaataaaactcctcgtgagaaagttcctgcagactcaagacgacaggccgttttttctatatgtggctttccatgatccacatcgctgcgggcatagtcagccccagtatgggaccttctgcgaaaagtttggcaatggggagagtggcatgggcagaatcccggattggacgccccaggcatatgaccccctcgatgtgctcgttccatatttcgtccctaacacccctgccgcacgtgccgatcttgccgcccagtacaccactgtcggtaggatggaccagggtgtgggccttgttctgcaggagctgagagatgctggcgtgctcaatgatacgctcgtgatatttactagtgacaacgggatacccttcccctccgggcgcaccaacctctattggcccggtactgccgaaccactgttggtgtccagcccggagcatcccaaacggtgggggcaggtttccgaagcctatgtgtccctccttgatctaacccctaccatactggattggttttccattccctatccatcttacgctatctttggatcaaagaccatccacttaacagggcgctctctgctccccgcattagaggctgagccactgtgggctacagtgttcggttctcagtcccaccacgaggtcacgatgagttaccccatgcggagcgtccagcaccgccactttcgccttgttcataacttaaacttcaaaatgcctttcccgatcgatcaggacttttatgtgtccccaacgttccaggacctgttgaatagaactaccgcagggcagccaactgggtggtataaagatctgcggcattattattaccgggcaaggtgggagttgtacgatcggtcacgtgatccacatgaaacccaaaatctagcaaccgatccacgcttcgctcagctcctggagatgctgagagaccagttggcaaaatggcagtgggaaacccatgacccctgggtatgtgcccccgacggggtgctggaggagaaattgagcccacagtgccagccacttcataatgaactg

SEQ ID NO: 250687 - DNA, 1506 bp, synthetic construct
  misc_feature 1..1506: note = Description of Artificial Sequence: Synthetic coding sequence
  source 1..1506: mol_type = other DNA
atgtcatgcccagtgcctgcctgttgcgcactgctgctggtgctgggactctgccgcgcccggccacgcaacgctctgctgctgctggcggacgacggcgggttcgaatcaggagcgtacaacaactctgcgatcgcaaccccgcatcttgatgccctggccagacgctccttgctgttccgcaacgccttcacttcggtgtcgtcttgcagcccgtcccgggcatccttgctgactggactgcctcagcaccaaaatgggatgtacggtctgcaccaggacgtgcatcactttaactcgttcgacaaagttagaagccttccactgctcctttcacaggcgggtgtgcggactggaatcatcggcaagaaacacgtgggcccggaaaccgtgtacccgttcgatttcgcctataccgaggagaatggatcagtgttgcaggttggtcggaacattactcggattaagctgttggtgcgcaagttcctccagacgcaagacgaccgccctttctttttgtacgtcgcatttcacgacccgcaccgctgcggacatagccagccgcaatacggaaccttctgcgagaaattcggaaacggagagtcgggaatgggaagaatcccggattggactcctcaggcttacgatcctcttgatgtcctggtgccgtactttgtgcctaatactccggccgcaagagctgacctggctgcgcagtacaccaccgtgggccgcatggatcagggggtgggactggtgttgcaggagcttcgcgacgccggtgtcctgaatgatactctcgtcatcttcacctcagacaacggaatcccttttccatcgggtaggactaatctgtactggccgggcactgccgaaccgttgttggtgagcagcccggaacacccaaagcgttggggccaagtgtccgaggcatacgtgtccctcctggatctgacgcctaccatcctcgactggttttcgatcccgtacccgtcatacgccatcttcggatcaaagactatccaccttaccggacggagcctcctcccagccttggaagcggaaccgctgtgggcgaccgtgttcggaagccagtcgcaccacgaggtgacgatgtcctaccccatgcggtcggtgcaacaccggcacttccgcctggtccacaatctgaacttcaagatgcctttcccgatagaccaggacttttatgtgagcccgacctttcaagatctgctgaaccggaccaccgcagggcagcccaccggctggtacaaggacctgcggcactattactaccgcgcaaggtgggaactgtacgatcggtcgagagatcctcatgaaacccagaacttggccaccgatccgcggtttgctcaactcttggaaatgctccgggaccaactggccaagtggcaatgggagactcatgacccttgggtgtgcgccccggatggtgtcctcgaagaaaagctgagcccacagtgtcagcctctgcataacgaactg

SEQ ID NO: 250688 - DNA, 1506 bp, synthetic construct
  misc_feature 1..1506: note = Description of Artificial Sequence: Synthetic coding sequence
  source 1..1506: mol_type = other DNA
atgtcatgcccggtccccgcctgctgcgcgctgctcctcgtgctggggctgtgtagggccaggccgagaaacgccctgctgctgttggcagacgatggaggatttgaatccggagcctacaataacagcgcaatcgcaacccctcaccttgacgcgctcgctagacgcagcctgctgtttagaaacgcatttacctccgtttcctcctgcagcccctcgagggcttccctgcttaccggtttgccgcagcaccagaacggaatgtacggtctgcaccaggacgtccaccatttcaacagcttcgacaaagtgcggtccctgccactcctgctcagccaggccggagtgagaaccggcatcatcggaaagaaacacgtggggccggaaactgtgtacccattcgatttcgcctacaccgaggaaaacggatcggtgcttcaagtgggtcggaatatcacccggatcaagttgcttgtgcggaagtttctgcaaactcaagatgataggccgttcttcctgtacgttgcctttcacgatccgcaccgctgcggacactcccagccgcaatacggaactttctgcgaaaagttcggaaacggagagtcggggatgggacggatccctgactggacgcctcaggcctatgatcctctcgatgtgttggtgccgtactttgtgccgaacactccagcggctcgcgcagatctggcggctcaatacactactgtcggcagaatggaccaaggagtcggactggtgttgcaggaactgcgggacgcgggagtcctcaatgatacgctcgtcattttcaccagcgataatgggatcccgttcccatcgggacgaaccaacctttactggcctggcactgcagagccgctcctcgtgagctcgccagagcatccgaagcggtggggtcaggtgagcgaggcttacgtgtccctgctggatctcactccaaccatcctggactggttcagcatcccgtacccgtcatacgccatctttggctccaagactatccaccttaccggcaggtccctgctgcccgcgcttgaagccgagccactctgggctactgtgttcgggtcccaaagccaccacgaagtcaccatgagctatccaatgagatctgtgcagcaccgccacttcagactggtccacaatctcaacttcaagatgcctttcccgattgatcaggatttctacgtgtcgccgacgttccaagacttgctgaacaggactaccgcggggcagccgaccggatggtacaaggacctcaggcactactactacagggcacggtgggagctgtacgatcggtcgcgggacccccatgaaacccagaatttggccaccgacccccgcttcgcgcaacttctcgagatgttgcgcgaccagctggcaaagtggcagtgggaaacccatgacccgtgggtgtgcgcccctgatggagtccttgaagagaaactttcgccgcagtgccagcccttgcataacgaactg

SEQ ID NO: 250689 - DNA, 1506 bp, synthetic construct
  misc_feature 1..1506: note = Description of Artificial Sequence: Synthetic coding sequence
  source 1..1506: mol_type = other DNA
atgtcctgtcccgtcccagcctgctgcgctcttctcctcgtcttgggcctttgtagggctcgccccagaaacgccctgctcctgctggctgatgatggtggctttgagtccggcgcttataacaattctgccatcgctacccctcatttggatgctcttgctcgtcgtagcctgctctttaggaatgctttcaccagcgtgtcttcctgttcaccttctagagccagcctgctgaccggccttccccagcaccaaaatggcatgtatggcctgcaccaagatgtccatcactttaactccttcgataaagtgaggagtctgcctctgctgctgtcccaggccggagtcaggacaggtatcatcggtaagaagcacgtcggtcccgagaccgtgtatcccttcgacttcgcctacaccgaagaaaatggaagcgtactccaggtgggccgtaatatcaccaggattaagcttttggtcaggaagtttcttcagacacaggatgatcgcccttttttcctctatgtggcctttcatgatccccaccgttgtggccactcacagccccagtatggaaccttctgcgagaaattcggcaatggcgaatccggtatgggccgcatccccgattggaccccccaggcctacgatccattggatgttctggtaccatacttcgtgcctaacacacctgctgccagggctgacctggccgctcagtatactaccgtaggtagaatggaccagggcgtgggactggttctccaggagctgagagacgctggcgtgttgaatgacactctggtgattttcactagcgataacggcatccccttcccttccggcaggacaaacctgtattggcccggtactgccgagcctctcctggtgagctcacctgagcatcctaagcgctggggccaggtaagcgaggcttatgtgtctctgctggatctgacaccaaccatcttggactggttctccatcccttaccctagctatgcaatcttcggatccaaaaccatccaccttacaggacgctccctccttcccgcattggaggctgagccactctgggctaccgtgtttggtagccagagtcaccacgaggtgaccatgtcttatccaatgagatctgttcaacatcgccacttccgcttggttcataacctcaacttcaagatgccattccctatcgatcaggatttctacgtaagccctaccttccaggatctccttaacaggactacagctggtcagcctacaggttggtacaaggatctgcgccactactactacagggcaaggtgggaactgtatgataggagccgcgatccacacgagacccagaacttggctaccgatccaagattcgcacagcttctcgaaatgctgcgcgaccaactcgcaaagtggcagtgggaaactcacgacccctgggtgtgtgcaccagatggagtgttggaggaaaagctgagcccccaatgtcagcccttgcacaacgagttg

SEQ ID NO: 250690 - DNA, 1506 bp, synthetic construct
  misc_feature 1..1506: note = Description of Artificial Sequence: Synthetic coding sequence
  source 1..1506: mol_type = other DNA
atgtcctgtccggtgcccgcttgctgtgctttgctccttgttctcgggctctgccgtgccaggcctcgcaacgcgctcttgttactggcggatgacggcggtttcgaaagcggcgcctacaataattcagccatcgccacccctcacctggacgctttggcccggagaagtctgcttttccggaacgcattcacatctgtttctagctgctctccctccagggcctcgctcctgaccggactgccccagcatcagaatggcatgtatggcttgcaccaggacgtgcaccactttaactctttcgacaaagtcaggagcctccccttactcctttctcaggccggagttaggaccgggattatcggaaagaaacatgtagggccggagacagtgtacccctttgatttcgcatacactgaggaaaacggcagcgttctccaggtgggaagaaacataactaggatcaagttactggtgcgcaagttccttcagacacaggatgaccggccgttcttcctttatgtggccttccacgacccccaccggtgtgggcactctcagccccaatacgggactttctgcgagaagttcgggaacggtgagagtggaatggggcgaattcccgattggacacctcaggcatatgatcctcttgatgtgttggtaccttacttcgtgcccaatacacctgcagccagggctgacctggcagcacaatatactactgttggacgaatggaccagggggtagggctcgtcttacaggagctgcgggacgccggggtgctgaacgacaccttggtcattttcaccagcgacaatgggatcccatttccctctggccgtaccaatttgtattggccaggtaccgctgagcctttactggtgtcttctccagaacatcccaaacgatggggccaggtgagcgaagcctacgtgagtctcttagacctcacccccaccatcctggattggttcagtatcccttatccaagctacgcaatcttcggctcaaagacaatacatctcactggacggtctttactgcccgctctggaggcagaaccgctgtgggccaccgtctttggttcgcaatcccaccacgaagtcaccatgagctacccaatgagaagtgtgcagcaccggcatttccgactggtgcataacctgaatttcaaaatgcccttccccattgatcaggatttttacgtttcgcctactttccaagatctcctaaaccggaccacggctggccagcctacaggctggtacaaagacctgcggcactactactaccgcgcaaggtgggagttatacgaccgatcgcgcgatccccacgagactcagaacctggctactgatccgcggttcgcgcagcttttggagatgcttagggatcagttggccaagtggcagtgggaaacccacgacccatgggtctgcgccccggacggcgtgttggaggagaagttgagtcctcagtgccagccccttcataacgagctc

SEQ ID NO: 250691 - DNA, 1506 bp, synthetic construct
  misc_feature 1..1506: note = Description of Artificial Sequence: Synthetic coding sequence
  source 1..1506: mol_type = other DNA
atgtcctgtccagtccccgcctgctgtgccttactattagtgctgggcctatgtcgcgctcgcccaagaaacgcactgctcctcctagctgacgatggaggtttcgagagcggggcctataataatagcgctatagctactcctcacctggacgctctcgccaggcgttctttactctttagaaacgcctttaccagcgtgagctcatgctctcccagtagagcaagcttgctaaccgggcttccgcaacaccaaaatggaatgtacggcctgcatcaagacgttcatcactttaattctttcgataaggtccgcagtctccctttgctgttatcccaggccggtgtgcgaacagggatcataggtaagaaacatgttggcccagagacagtttaccccttcgacttcgcctatactgaagagaacggcagcgttctccaagtgggacgcaatatcaccaggattaagctgttagtccgaaaatttttacagacgcaggatgacaggcctttctttctctatgttgccttccatgatccacacaggtgcggtcatagccagcctcagtacggaaccttttgcgagaaattcggaaacggagagagcgggatgggcagaatccccgactggacacctcaagcgtacgaccccctcgacgtgctcgtcccatatttcgtcccaaatactcctgcagcccgagcagacctggcggctcagtacaccacagtcggcaggatggaccaaggcgtaggactggttctgcaggagctaagggacgctggggtgctgaacgacaccctagttatttttacaagtgataatggtatccccttcccttctgggcgcaccaatctttactggcccgggacagcagagcctctattggtgtcgagtccagagcaccctaaaaggtggggtcaggtctcagaggcctatgtgagcctgctggacctaacaccgaccatcctggattggttttcgattccgtatccctcatacgctatctttggaagtaagaccatccatctgaccggtagatcactgcttccagccttggaggcagagccactttgggcaacagtatttggatcacagtcccatcacgaagtcaccatgagctaccctatgcgcagtgtgcagcaccggcattttagactcgtgcataacctgaacttcaagatgcccttcccaatcgaccaggacttttacgtaagcccaacttttcaggacctcctgaacagaactacagccgggcaaccgacagggtggtacaaggacttacgacactattactacagggctcgatgggaactgtatgataggtcacgcgatccgcatgaaacccagaacttagctaccgatccgcgctttgcccagttgctcgaaatgctcagggatcaactcgcaaaatggcagtgggagacccatgacccatgggtgtgcgcccctgacggcgtgttagaggagaaactgtcaccccagtgccagcctctccacaatgaattg

SEQ ID NO: 250692 - DNA, 1506 bp, synthetic construct
  misc_feature 1..1506: note = Description of Artificial Sequence: Synthetic coding sequence
  source 1..1506: mol_type = other DNA
atgtcctgtcccgtgcctgcatgctgcgccctgctgctcgtgctgggactctgccgggcgagaccaagaaacgctctcttactattagccgacgatggggggttcgagtccggagcatataacaattctgcaattgccaccccacatctggatgccctcgcccggcggagtctgctgttcagaaatgcttttacttctgtgtcgagctgtagcccatccagggcaagtcttctgactggattgcctcagcaccaaaacgggatgtacggcttgcaccaggacgtgcaccattttaattcttttgataaggtgagaagtctgccccttctgctatcgcaggctggagtccgtaccggcattattgggaagaaacatgtggggcctgagaccgtctatccttttgatttcgcctatactgaagagaacggatccgttttgcaagtcggtagaaatataacccggattaaactgctcgtgcgtaaattcctgcagactcaggatgatagacccttcttcctgtacgtggcttttcacgatccacatcgctgtggccactcacagccgcagtacggtaccttttgtgaaaagttcggaaatggggagtccggcatgggacggatccctgactggaccccccaggcttatgatcctttggacgttttggtgccttacttcgtaccaaatacacctgcagcgagagccgaccttgccgctcagtacacgacagtagggaggatggatcagggggtgggattggtcctgcaggaactgcgggatgcgggcgttctgaacgatactctggttatttttacgagtgataatggcataccgtttccctcgggccgaaccaatctgtattggcccggtacggctgagccactcctggtctcttctcctgaacacccaaaacgatggggacaggtcagcgaagcctacgtttccctgctggacctcaccccaaccattctggattggttctccattccatacccaagctatgcgatctttggctctaagacaatacacttaactggaagatctcttttgcctgccttggaggcggaacccctttgggccactgtgtttggttctcagagccaccatgaggtgacaatgtcctaccctatgcggagtgtacagcatcgtcacttcaggttggttcacaatcttaactttaagatgcccttcccaatagaccaggatttctatgtgtcaccaacattccaggacctgctaaatcgtactactgccggacaacctacaggatggtataaggacctgcgacactactattaccgtgcccggtgggaactgtatgaccgaagtcgtgacccacacgaaacgcagaatctcgcaacagacccacggttcgctcagctgctcgaaatgctgcgagatcagctcgccaagtggcagtgggaaacacatgatccctgggtttgcgctcctgatggggtcctggaagaaaagctgtcaccccagtgccagccgctccacaatgagctg

SEQ ID NO: 250693 - DNA, 1506 bp, synthetic construct
  misc_feature 1..1506: note = Description of Artificial Sequence: Synthetic coding sequence
  source 1..1506: mol_type = other DNA
atgtcttgcccggtccctgcctgttgtgccctgctgttggtgcttggcctatgcagggcccgcccaagaaatgcgctactgttactggctgatgatgggggcttcgaatctggcgcttataacaacagtgcaatcgcgaccccacatctcgacgctctggcacgtagaagcttactgtttcgcaacgccttcacatctgtgtcatcttgcagcccaagccgggctagtcttctgaccgggctgccccagcaccagaacggaatgtacggattgcaccaggatgtgcatcatttcaattccttcgacaaagtgaggagcctgccactcctgttgagccaggccggagtgcgcaccgggattattggcaagaagcacgttggcccagagaccgtttacccgttcgattttgcttataccgaagaaaatggcagcgtgctgcaggtcgggagaaatatcacccgaatcaagctgctggttaggaaattccttcagacgcaagatgatagaccctttttcctgtatgtagccttccacgacccacatcggtgcggccattctcagcctcaatacggcactttctgtgaaaagttcggaaatggtgagtcaggaatggggcgcatccctgactggacaccgcaggcttatgaccccttggacgtgttggtgccatatttcgtgcccaacacacccgccgcacgggcagacttggctgcacagtatactacagtgggccggatggaccagggcgtgggactagtgctgcaggaacttagggacgcaggcgtactgaatgatactctagtgatttttacctctgacaacggcattccttttccttcgggacggacaaacctctattggcccggaaccgccgagccactcctggtaagctcccccgaacaccctaagaggtggggccaggtcagcgaggcctatgtgagcctgctagacctgacacctaccatacttgactggttctccatcccttacccctcttacgctattttcggatcaaagacaatccacctcactggtcgcagtcttcttcccgcgctggaggccgaacctctgtgggccactgtgttcggaagccagagtcatcacgaggtgacgatgagctaccccatgcgcagtgtgcagcataggcactttcgtctagtccataatctgaattttaagatgccctttccaatagaccaggacttctatgtgtcacctactttccaggatctcctcaatagaacgacagcagggcagccaaccgggtggtataaagacttgcgccattactactacagagcgcggtgggaactgtacgacagaagtcgagacccccatgagactcagaacctcgccacggatcctcgattcgcacagctgcttgaaatgctacgcgaccaactggcgaaatggcagtgggaaactcatgacccttgggtgtgtgccccagatggcgtgctcgaggaaaagctgtccccacaatgtcagcccctgcataacgagtta

SEQ ID NO: 250694 - DNA, 1506 bp, synthetic construct
  misc_feature 1..1506: note = Description of Artificial Sequence: Synthetic coding sequence
  source 1..1506: mol_type = other DNA
atgtcgtgtccggtaccggcgtgttgtgcgttattactagttctaggtctatgtcgagcgcgtccgcgtaatgcgctattattattagcggatgatggtggttttgaatcgggtgcgtataataattcggcgatagcgacgccgcatttagatgcgctagcgcgacgttcgctattatttcgtaatgcgtttacgtcggtatcgtcgtgttcgccgtcgcgagcgtcgctactaacgggtttaccgcaacatcaaaatggtatgtatggtttacatcaagatgttcatcattttaattcgtttgataaagttcgatcgttaccgctattactatcgcaagcgggtgttcgtacgggtataataggtaaaaaacatgtaggtccggaaacggtatatccgtttgattttgcgtatacggaagaaaatggttcggttctacaagtaggtcgaaatataacgcgaataaaattactagttcgtaaatttttacaaacgcaagatgatcgaccgttttttttatatgtagcgtttcatgatccgcatcgatgtggtcattcgcaaccgcaatatggtacgttttgtgaaaaatttggtaatggtgaatcgggtatgggtcgaataccggattggacgccgcaagcgtatgatccgttagatgttctagttccgtattttgtaccgaatacgccggcggcgcgtgcggatttagcggcgcaatatacgacggttggtcgtatggatcaaggtgtaggtctagttctacaagaactacgagatgcgggtgtactaaatgatacgctagtaatatttacgtcggataatggtataccgtttccgtcgggtcgtacgaatttatattggccgggtacggcggaaccgttactagtatcgtcgccggaacatccgaaacgttggggtcaagtttcggaagcgtatgtatcgctactagatctaacgccgacgatactagattggttttcgataccgtatccgtcgtatgcgatatttggttcgaaaacgatacatttaacgggtcgttcgttactaccggcgctagaagcggaaccgttatgggcgacggtatttggttcgcaatcgcatcatgaagtaacgatgtcgtatccgatgcgatcggtacaacatcgtcattttcgtctagtacataatttaaattttaaaatgccgtttccgatagatcaagatttttatgtttcgccgacgtttcaagatttactaaatcgtacgacggcgggtcaaccgacgggttggtataaagatttacgtcattattattatcgtgcgcgatgggaactatatgatcgatcgcgtgatccgcatgaaacgcaaaatttagcgacggatccgcgttttgcgcaactactagaaatgctacgtgatcaactagcgaaatggcaatgggaaacgcatgatccgtgggtttgtgcgccggatggtgtactagaagaaaaattatcgccgcaatgtcaaccgttacataatgaacta

SEQ ID NO: 250695 - DNA, 1506 bp, synthetic construct
  misc_feature 1..1506: note = Description of Artificial Sequence: Synthetic coding sequence
  source 1..1506: mol_type = other DNA
atgtcatgcccggtgccagcttgctgcgcattgttgctcgtgttgggactttgccgggccaggcctcgcaacgccctccttcttttggccgacgacggtggtttcgagagcggagcgtacaacaacagcgccatcgcaaccccacatttggacgcgctggctcgccgttccctgctgttccgcaatgctttcacttcagtctcatcttgttcaccgtcgcgggcatcactcctcaccggcctcccacagcatcagaacggcatgtacggtttgcatcaggatgtccatcatttcaactctttcgataaggtgcgctcgctgccacttctgctcagccaggctggcgtcagaactggcatcatcggcaagaaacacgtgggaccagagactgtctaccctttcgatttcgcctatactgaagagaatggatccgtgttgcaggtgggcagaaacatcacccggattaaacttctggtcagaaagttcctccaaacgcaagacgacagaccgttcttcttgtacgtggcgtttcacgatccgcaccggtgtgggcactcccagccacagtacggcactttttgcgaaaagttcggcaatggagagtctggaatgggaaggattcctgactggaccccacaggcatacgatccactggatgtgctggtgccatacttcgttccaaacactccggccgctcgggccgaccttgcggcgcagtacactaccgtgggccgcatggatcaaggggtgggactggtgttgcaagagctgagagacgccggtgtactgaatgacacgcttgtcatcttcacttcggataacggaatcccgttcccctccggccggaccaatctgtactggccaggaaccgcggaaccgctccttgtgagctccccggaacaccccaagaggtggggacaggtttcggaggcttatgtgagcctgctggatcttactccgactattctcgactggttttcgatcccgtacccgtcctacgcgattttcgggtcaaaaactattcacttgaccgggcgctccctcctgccggccttggaagccgaacctctgtgggcaacggtgttcggatcgcaaagccatcatgaagtcacgatgtcctaccccatgcgcagcgtgcagcacagacacttccgcctggtgcacaatctgaacttcaagatgccgtttccgattgaccaagatttctatgtgtcgccaacttttcaggacctgctgaaccgcactactgcaggacagcccacgggatggtacaaggacttgcgccactactactacagggcccggtgggaactgtacgaccgctccagggatccgcatgaaactcagaatctggccacggacccgcggtttgcacagcttctggagatgcttcgggaccaactggccaaatggcaatgggagactcacgacccctgggtctgcgcgccggacggtgtgctggaagaaaagctgagcccccagtgccagcctctccacaatgagttg

SEQ ID NO: 250696 - DNA, 1506 bp, synthetic construct
  misc_feature 1..1506: note = Description of Artificial Sequence: Synthetic coding sequence
  source 1..1506: mol_type = other DNA
atgtcttgtccagtccccgcctgttgtgccctgctattagtgctgggattatgtcgcgccagaccccgaaatgctctactgctcttggctgatgatggaggcttcgagtcaggagcgtacaataactccgctatcgccactccacacctggacgcacttgctaggagatccctcctctttcgcaacgcattcacgtcggtgagttcatgtagcccctctcgcgccagtttgctcacagggctgccccagcatcagaatggaatgtacggactgcatcaggatgttcatcactttaattctttcgacaaggtgcgttccctgccacttctactttcccaggctggggtgaggacgggcatcattggtaaaaagcacgtgggccctgaaactgtgtatccgttcgatttcgcatacaccgaggagaatggttcagtgttgcaagtgggtcgaaatattaccagaattaagttgctagtacgcaaattcttgcagacacaggatgatcgccccttttttctatatgtcgcctttcacgatccacatagatgcggacacagccagccacagtacggcacgttttgtgagaaattcggcaacggcgaatcgggtatggggcgcatccctgattggaccccccaagcatacgaccccctggacgtactggttccctacttcgtccctaatactcctgcagccagagcggatctagctgctcaatacactacggttggaaggatggatcagggggtaggcctggtgctccaggagctgcgcgatgccggcgttctcaatgacacgctggtgattttcacttccgacaatggaatcccttttccttcaggccgcacgaatctgtactggcctggcacagcagagccactgttggtgtcttcccctgaacacccaaagaggtggggacaggtgagcgaggcttatgtctcattgctggacctgactcctactatacttgactggttctccatcccctacccaagttacgcgatattcggctccaaaactattcacctgacgggccgcagcctgctgcccgcactcgaggcagaacccctgtgggccacggtgtttggctcccaatcccaccatgaggttaccatgtcttaccccatgcgctcggtgcagcacagacattttcggctggtgcataatcttaacttcaagatgcctttccccatcgaccaagacttctatgtgtcccctacgttccaggacctgctcaatcgcacaactgcggggcagcccaccgggtggtataaagatctcagacactactactatagagctaggtgggaactttacgacagaagcagagacccccacgaaacgcagaatctcgccacagatcctagatttgcgcagctcctcgagatgctgcgggatcaattggccaagtggcagtgggagacgcacgatccttgggtctgcgccccggacggggtgctggaggaaaaactttctcctcagtgtcagcctctgcataatgaactg

SEQ ID NO: 250697 - DNA, 1506 bp, synthetic construct
  misc_feature 1..1506: note = Description of Artificial Sequence: Synthetic coding sequence
  source 1..1506: mol_type = other DNA
atgtcctgccctgtgccagcttgttgcgctctgctgctcgttcttggactctgcagggctcgcccaagaaacgccctcctccttctggctgatgacggaggcttcgaatccggagcatataataattccgccatcgctacaccgcaccttgacgcgctggctcgcagaagtctcctctttcggaatgcgtttacttctgtatcttcttgtagccccagcagggcctcactcctgacaggactgcctcaacaccagaatggcatgtacgggctgcatcaggacgtgcaccacttcaactcgttcgataaagtcagaagtttgcctctcctacttagccaggctggagttaggactggcattatcggcaaaaaacatgttggaccagaaacggtctatccatttgatttcgcttacaccgaagagaacgggtccgttcttcaggtgggtcgcaacattaccaggatcaagctgttagtccgtaaatttcttcaaacgcaagacgataggccattctttttgtacgtagcttttcacgatccgcaccgctgtgggcacagtcaaccacaatacggtactttttgtgaaaagtttggaaatggtgaatctgggatgggcagaatcccagactggaccccccaagcatacgaccccttagacgttctggtcccctactttgttcctaatactccagccgctcgcgctgacctagccgctcaatataccaccgttggacggatggaccaaggggttggcttggtattgcaggaactgagagatgccggcgtacttaacgatactctggtcatcttcacctctgacaatggcatccctttccctagtggaaggacgaatctctattggcctggcaccgctgagccacttctggtgtcttctcctgagcaccccaagcggtggggacaagtgtcagaggcttacgtcagcctcttggatcttaccccaactatcctggactggttcagcattccatacccaagttacgctatcttcggttctaagacaatccatctgaccggcaggagcttgcttcccgctctcgaggcagaacctctatgggcaacagtgtttgggagccaatctcatcacgaagtgactatgagctacccaatgaggagtgtccagcacagacattttcgccttgtccacaacctaaacttcaagatgccatttcccattgaccaagacttctatgtgagccccacgtttcaggatctgctgaacagaactactgccggtcaacctaccgggtggtacaaagaccttcgccattactattaccgagctagatgggagctgtatgaccgaagcagggacccacacgagacacagaacctggcgaccgatcccagattcgctcagcttctcgaaatgcttagagatcagctggcaaaatggcagtgggagacacatgatccttgggtctgtgcccctgacggcgtgcttgaggaaaagctctcaccccaatgccagccacttcacaatgaactg

SEQ ID NO: 250698 - DNA, 1506 bp, synthetic construct
  misc_feature 1..1506: note = Description of Artificial Sequence: Synthetic coding sequence
  source 1..1506: mol_type = other DNA
atgagctgcccggtcccagcgtgctgcgcgctcctgctggtgctcggactttgtcgggccagaccaaggaacgccctcttgctgctcgcagacgacggcggattcgaatcgggtgcttacaacaactcggccatcgccacgccgcacctggacgcccttgcgagacggtcactgctctttagaaacgcgttcactagcgtgtcctcgtgttcgcctagccgcgcttcgctgctgaccggactgccgcagcatcagaacggcatgtacgggctgcaccaggacgtgcaccatttcaactcctttgacaaggtgcgctcgctcccgctgctgctcagccaagcaggagtgcggactggaattatcggaaaaaagcacgtgggccctgagacggtgtaccctttcgacttcgcgtacaccgaagagaatgggagcgtgctccaggtgggtcggaacatcacccgcatcaagttgctcgtgcgcaagttcctccaaactcaggatgatcggccgttcttcctgtacgtcgcgttccacgacccgcatcgctgcggccactcacaaccacagtacggaactttttgcgaaaagtttggtaacggcgagagcggcatgggacgcatcccggattggaccccccaggcctacgatccccttgatgtactggtgccctacttcgtccctaacaccccagccgctcgggctgacctggccgcgcaatacaccactgtgggccgcatggatcaaggggtgggactcgtcctgcaagagctcagggacgccggtgtgttgaacgacactctggtcatctttaccagcgataacggaattccctttccttcgggtcgcacgaatctgtattggcccggaactgccgagcctctgctggtgtcaagccccgaacacccgaagaggtggggtcaggtatcagaggcttatgtttcactgctcgatctgacccctactatcttggactggttcagcatcccatacccgagctacgcgatcttcggttcaaagaccatccacctcaccggaagatcccttctgcctgcgttggaagccgaacccctctgggcaactgtctttggatcccaaagccatcacgaagtcaccatgtcatatccgatgcgatcggtgcaacacagacacttccgcctcgtgcataacctcaatttcaagatgccgttcccaatcgatcaggacttttacgtctcgccgaccttccaggatcttctgaacaggaccaccgcaggacagccgacggggtggtacaaggacttgcggcattactactacagagcccgctgggagctctacgatcgctcccgcgacccgcatgagactcaaaatctcgctaccgacccacggttcgcccagctcctggagatgctccgcgatcagctggcgaagtggcaatgggaaacccacgacccgtgggtgtgtgccccagacggcgtcctcgaggaaaagctgtcgccgcaatgtcaaccactgcataacgaactg

SEQ ID NO: 250699 - DNA, 1506 bp, synthetic construct
  misc_feature 1..1506: note = Description of Artificial Sequence: Synthetic coding sequence
  source 1..1506: mol_type = other DNA
atgagctgcccagtccccgcatgctgtgcccttcttctggttctcggattgtgccgtgcccgacctcgcaacgcattactactcctcgctgatgatggggggtttgaatcgggagcctataacaactccgctattgccaccccgcacctggatgcccttgcccggcgtagcctactgttccgcaacgcctttacatcagtgtcatcctgtagtccgagccgcgcctctcttcttaccggtctcccgcagcatcagaatggaatgtatggtctccatcaggacgtccatcacttcaattcatttgacaaagtgagatctctcccactactgttgtctcaagccggggtgagaacgggtatcatcggcaaaaaacacgttggaccggaaacggtttatccattcgattttgcttatacggaggaaaacggatctgttttgcaagtaggaaggaacatcacgcgcatcaaattattagtccgaaaatttcttcaaacacaggatgaccggcctttttttctgtatgtcgcgttccatgacccccaccgttgtggtcattcacaaccgcaatacggaacgttctgcgagaaattcgggaacggtgaaagcggtatggggcggattccggactggaccccccaagcatatgatccactcgatgttcttgtcccgtatttcgttccgaacacaccagcggcacgcgccgacttagccgcacagtacacgacagtgggtagaatggatcaaggagtcggactggtgctgcaggaacttagagatgctggagttcttaatgataccctggtcatctttacatccgataatggaattccgttcccttcaggacgcacgaatctttattggccgggaacagcagaaccccttctggtctcaagcccggaacacccgaaacgatggggacaggtatctgaagcctacgtatctctccttgacttgacaccgacaatcttagactggttctctattccatacccgtcgtatgcgatttttgggtctaagacaattcatctgacaggacggtcccttttgcccgcactcgaggcagagcctttgtgggcgacagttttcgggtcgcagtcacaccatgaggtaacaatgtcttacccgatgcggtcagtacaacatcgtcatttccgtttggtgcacaatttaaattttaaaatgcctttcccaattgaccaagatttttacgtttcgcctacgttccaagaccttctgaatagaacaacggcaggccagcctacagggtggtacaaggatctgaggcattattattatcgagctcggtgggaattgtatgatcgttctcgcgatcctcatgagacacagaatttggctactgacccgcgatttgctcagcttctggaaatgttacgcgaccagcttgctaagtggcaatgggaaacacacgatccttgggtgtgtgccccggatggtgtattagaagaaaaattatctccgcagtgtcagccgctgcataacgaactt

SEQ ID NO: 250700 - DNA, 1506 bp, synthetic construct
  misc_feature 1..1506: note = Description of Artificial Sequence: Synthetic coding sequence
  source 1..1506: mol_type = other DNA
atgtcatgcccggtccctgcctgctgcgcgctgcttttggttttgggactgtgcagagcccgcccgagaaatgctctgctcctgctcgctgacgacggaggatttgaaagcggcgcttacaataattctgcaattgctacgcctcacctggatgcactcgcaagaagaagcctgttgtttaggaacgcttttactagtgtgtcctcctgctcaccttctagagcctctttgttgacaggtctgccccagcaccaaaatggcatgtatggactccaccaggatgtccaccactttaactcctttgacaaggtcaggtcacttccgctgctgttgtctcaggctggagtgaggactggtatcattggcaagaaacacgttggtccagagactgtctatcccttcgattttgcttatactgaggaaaacggtagtgttttgcaggtgggcaggaacattactcgcatcaagctgctggtacgcaagtttctgcaaacccaagacgaccgcccattcttcctgtacgtagcattccacgacccacataggtgtggccactctcaacctcaatacggtaccttctgtgagaagttcggcaatggtgagtcaggtatgggacgcatacccgactggactccccaggcttacgatcccctggatgtgcttgtaccttatttcgtgccaaacacacccgctgcaagggctgacctggccgctcagtacactactgtcggcaggatggatcaaggcgtcggacttgtgctccaagaattgcgcgacgcaggtgttttgaatgacacacttgttatctttaccagtgacaacggtatccccttcccaagcggtagaacaaatctctactggccaggtacggctgagcctctgctggtctctagccccgaacaccctaaaagatggggacaggtatctgaggcgtatgtctccctgctcgatctgacacccacaatcttggactggttttcaattccctacccgtcctacgctatatttggctccaagaccattcacctgacgggtaggagtctccttcccgccctcgaagccgagccactctgggccaccgtcttcggctcccagtcccatcatgaggtcacaatgtcttatcctatgcgctctgtgcagcacaggcattttcgcctggtccacaacctcaatttcaagatgccgttccccatagaccaagacttctacgtatctccaaccttccaggacctgctgaatagaacaaccgccggtcaacccacaggctggtacaaggatttgcgccattattactaccgcgctcgctgggagctttacgataggagccgcgacccccacgaaacccagaacctggctaccgatccccgcttcgcccagctgctggagatgcttcgcgatcaacttgcgaagtggcaatgggaaacacacgacccttgggtatgcgcaccggatggagtgctggaggagaaactctcaccacagtgtcaaccacttcacaacgagttg

SEQ ID NO: 250701 - DNA, 1506 bp, synthetic construct
  misc_feature 1..1506: note = Description of Artificial Sequence: Synthetic coding sequence
  source 1..1506: mol_type = other DNA
atgtcatgtcccgtgccagcgtgctgcgccctgctgctggtgcttggattgtgcagagctcgcccgcggaatgccctgttgctgctggccgatgacggaggattcgaatcgggcgcctacaacaattccgcgatcgcgacccctcacctcgatgctctggcacgccggagcttgctcttcaggaacgcatttacctcagtgtcaagttgcagccctagcagagcctccctgctcaccggactcccacagcatcaaaacggcatgtacggacttcaccaagacgtgcaccatttcaactcgtttgacaaggtgcgctccctcccgctgcttctgagccaggccggagtgcgaactggcatcatcggcaagaagcacgtcggaccggaaactgtgtaccccttcgatttcgcatacactgaagaaaacggttcagtgctgcaagtcggacgtaacatcacgcgtatcaaacttctcgttcgcaagttcctgcagactcaggacgatcgacctttcttcctgtacgtggccttccacgacccgcacaggtgcgggcatagtcaaccgcagtacggaaccttctgtgaaaagttcggaaacggggaatcgggaatgggtagaatcccggattggacgcctcaggcttacgacccactggatgtgcttgttccatactttgtcccaaatactccagcggcgagagcagatcttgctgcccagtacaccaccgtggggagaatggaccagggtgtgggcctcgtccttcaagaactgagggacgctggcgtcttgaatgataccttggtgatcttcactagcgacaacgggattcccttccccagcggaagaactaatctgtactggccgggaactgcagaaccgctcctcgttagcagcccagagcacccgaaacggtggggtcaggtgtccgaggcttatgtatccctcctcgatttgacccccaccatcctggactggttttccatcccgtacccatcttacgccattttcggttccaagactatccatttgaccggacggtcactgctcccggccctcgaagcggagcccctgtgggctaccgtgttcggaagtcagtcccaccacgaggtgaccatgtcatatcctatgagatctgtgcagcatcgacattttagactggtccacaacctgaactttaagatgccgttcccaattgatcaggacttttacgtgtcacctaccttccaggaccttttgaacagaactactgccggccagccgacgggttggtacaaagacctccgccactactactaccgcgctcgctgggagctgtacgacaggtcccgcgatcctcatgagacgcagaatctggccaccgacccacgcttcgcccaactccttgagatgctgcgggaccaacttgcgaaatggcagtgggagactcatgacccctgggtgtgcgcaccggacggcgtcctcgaagaaaagctgagcccacaatgccaaccgctccacaacgagctg

SEQ ID NO: 250702 - DNA, 1506 bp, synthetic construct
  misc_feature 1..1506: note = Description of Artificial Sequence: Synthetic coding sequence
  source 1..1506: mol_type = other DNA
atgtcgtgcccggtgccagcatgctgtgcgcttctgctcgtgctgggactctgccgggcccgcccgcgaaatgcactgctgctgctcgctgacgatggggggtttgaatccggggcatacaacaacagcgccatcgctactccgcatttggacgccctcgcgcggagaagcctcctctttagaaacgcgttcacctcagtctccagctgttcgccgagcagggcgtctctgctgactggactgccgcagcaccagaatggaatgtacggtctgcaccaggacgtgcaccacttcaattcgtttgacaaggttcggtcgctgccgctccttctctcacaagcgggtgttcgcactggaattatcggtaagaagcacgtgggacctgaaactgtgtaccctttcgacttcgcttacactgaggaaaatggatccgtgctgcaggtgggtcgcaatatcacccggatcaaacttctcgtgagaaagttcctgcagacgcaagacgataggccgttctttctgtacgtggccttccacgacccgcatcgctgcggtcattcccagccccagtacggaaccttctgcgaaaagttcggaaacggcgaatcaggcatgggtcggatccctgattggactcctcaagcatacgatcccctggacgtgctggtgccttacttcgtccctaatactccggccgcacgcgcggatcttgcagcacagtacactactgtcgggcgcatggatcagggcgtgggcttggtcctccaagagctgcgagatgccggcgttcttaacgacactctggtgatcttcacctcagacaacggaatcccgttcccttccggaagaacgaacctttactggccgggcaccgccgaacctctgctcgtgagctcccctgagcaccctaaacggtggggacaagttagtgaagcgtacgtctcgctgctcgacctgacgcctaccattctggactggttctccattccctacccgtcttacgcaatcttcggctcaaagactatccatctgactggccgcagccttctccctgctctggaggcagaacctctgtgggccaccgtgtttggcagccagtcccatcacgaagtgaccatgtcgtacccaatgaggtccgtgcagcaccgccatttccggctggtgcataacttgaactttaagatgcctttcccaatcgatcaagacttctacgtgagcccgactttccaagatctgctgaaccggactactgccggccagccgactgggtggtacaaagacctgagacattactactacagggcacggtgggaactctacgatagatcccgcgatccgcacgaaacgcagaacttggcgaccgatccgagattcgcgcagctgctcgagatgctccgcgaccaactcgctaagtggcagtgggaaacccatgatccgtgggtgtgcgcgcctgacggagtgctcgaggaaaagttgtccccgcaatgccagccactccataacgagctg

SEQ ID NO: 250703 - DNA, 1506 bp, synthetic construct
  misc_feature 1..1506: note = Description of Artificial Sequence: Synthetic coding sequence
  source 1..1506: mol_type = other DNA
atgtcgtgccccgtgccagcgtgctgcgcactgcttctggtactgggcctttgtcgagcacgaccccggaacgccctgctgctgctggctgatgacgggggctttgaaagcggcgcttataacaattccgccatagccaccccccatctggacgcactggctcgcagatcacttcttttcagaaacgcatttacatccgtttcgagctgttcgccatcaagggcctcacttttaaccggtttgccccaacatcaaaacggaatgtacggcctgcatcaagacgtgcaccacttcaactctttcgataaggtgaggagcctgccgctgctcctgtcccaagcgggtgttaggacaggcattatcggaaagaagcacgtaggccctgaaacagtttatccatttgacttcgcctacaccgaagagaacggatctgtactccaggtgggtcgcaacatcacccgtataaaattactcgtgcggaagttcctccaaacccaggacgaccggccgttttttctgtacgtggcatttcatgatccacatcgctgcggccatagccagccacagtatggcacgttttgtgagaagttcggtaacggggagagcggcatgggccgcatccccgattggacacctcaggcgtacgatccgctagatgtcttagttccatacttcgtgcccaacacgcccgccgctagagccgacctcgctgctcagtatacaaccgtggggcggatggaccagggtgttggcctggtgctccaagaactcagggacgcaggcgtgctgaatgatacacttgtgattttcaccagtgacaacggcattccttttccatccggcagaaccaacctgtactggcctggcacagctgagccactgctcgtgtctagcccagagcaccctaagcgttggggtcaggtcagcgaagcttatgtgagcctgctggatctgacccctactatcctagattggttctccatcccataccctagctatgcaatcttcggatcaaagactatccatctcacaggaaggagcctgcttcccgctctcgaagccgaaccactgtgggccaccgtattcgggagccagagtcaccacgaagtgactatgtcataccccatgaggtccgtgcaacacagacatttccgtttggttcacaaccttaactttaagatgcccttcccaatcgatcaggacttttacgtgtctcctacatttcaggatctcctgaacagaacaactgcaggacagccaaccggatggtacaaggatcttcgccactactactaccgggctagatgggagctgtatgatcgtagccgagatccacatgaaacccagaaccttgcgaccgatcctaggtttgctcagctcctggagatgctcagagaccaactggccaaatggcaatgggagacccacgatccatgggtctgtgcaccggatggggtgttggaagagaagttgagtccacaatgtcaacctctgcacaacgagctg

SEQ ID NO: 250704 - DNA, 1506 bp, synthetic construct
  misc_feature 1..1506: note = Description of Artificial Sequence: Synthetic coding sequence
  source 1..1506: mol_type = other DNA
atgtcttgccccgtacccgcatgctgcgcactgctgttggtgctcggattatgtcgggccaggccaaggaatgcccttttactactggccgatgacggagggtttgaaagtggggcgtataataactcagccatagccacgccacatttggatgctttggccagacggtctctcctgttcaggaatgcttttacatctgtaagttcatgctctccttctagggctagtcttttgacagggttacctcaacatcagaacggaatgtatgggctgcatcaggacgtacaccacttcaattcatttgataaagttcgctccctacctctgctgctgagtcaggccggggtgcggacagggataatagggaaaaaacacgtcggacctgaaacagtatatccttttgattttgcctatacagaggaaaacggatctgtgctccaggtgggacgcaatataacaagaatcaaactgctggtcaggaaattcttacagacacaggatgatcggcctttctttctttatgtcgctttccatgatccacatagatgtgggcactcacagccccagtatgggacattctgtgaaaaatttgggaatggggaatccggaatggggcgaattccagattggactccacaggcctatgatcctcttgatgttctggttccttatttcgtgcctaacacacccgcagcacgagccgatttggcagcccagtatactactgtggggagaatggatcagggagtagggttagtgcttcaggagctcagagacgctggagtgctcaacgatactctcgtaatctttacatccgataacgggattcccttccccagtggacggacaaatctgtactggcctgggacagctgaacctttgttagtgtctagtcctgagcaccctaaaaggtgggggcaggtttcagaggcctatgtttccctcctagatctgactcctacaatcctagattggttttctataccctacccctcatatgctattttcggatctaaaacaatacacttaacaggacggagtctattacccgcactggaagctgaaccactgtgggctacagtcttcgggtcacagtcccaccacgaagtgacaatgtcctatcccatgagaagtgtacagcaccgccatttcagactagtgcacaatcttaattttaaaatgccattcccaatcgatcaggatttctatgtgtctcccacattccaggatctgctgaatagaacaactgccggacagcccacagggtggtacaaagatctccgccactattattatcgtgcccgctgggaactctacgatcgctctagagatcctcatgaaacacagaacttagctactgatcccagattcgctcagttacttgaaatgctccgggaccagctcgcgaagtggcagtgggaaactcatgatccctgggtctgtgcaccagatggggtattagaagaaaaattgtcacctcagtgtcagccccttcataatgaactg

SEQ ID NO: 250705 - DNA, 1506 bp, synthetic construct
  misc_feature 1..1506: note = Description of Artificial Sequence: Synthetic coding sequence
  source 1..1506: mol_type = other DNA
atgtcatgcccggtcccagcatgctgtgcgctgctcttggtgctgggattgtgcagagcccgcccgcggaacgctctgctgttgctggcggacgacggaggattcgaaagcggcgcgtacaacaactcggccatcgctactcctcatctcgacgcactggcccgtagatccctgctgttccgcaatgccttcacttcggtgtcctcctgctcgccgtcccgggcgtcgttgctgaccgggctgccgcagcatcagaatggcatgtacgggttgcaccaggacgtccatcactttaactcgtttgataaggtcagatcactcccgctcctgctgtcccaggcaggtgtgaggaccggcatcattggaaagaaacacgtgggaccggaaaccgtctacccgttcgacttcgcctacacggaagagaacggatcggtgctccaagtgggcaggaacatcaccagaattaagttgctcgtccgcaagtttctgcaaactcaagacgacagacctttcttcctgtacgtggcgttccacgatccccaccggtgtgggcattcccagccgcagtacggaactttctgcgagaaatttggaaacggggaatcgggcatgggcagaatcccggactggaccccccaagcctacgacccgctcgatgtgctcgtgccgtacttcgtgccgaatactcccgcggcacgcgcggacctggccgcccagtacactaccgtgggtagaatggaccagggtgtgggactggttctgcaggaactgcgcgacgccggtgtactgaacgataccctggtcatattcacgtccgacaacggcatcccgttcccttccggacgcaccaacctgtactggccaggaaccgccgaaccactcctggtgtcatcaccggaacatccaaagcgctgggggcaggtgtcagaggcgtacgtgtcactgctggacctcactccgaccatccttgattggtttagcattccatacccgagctacgccattttcggatcaaaaactatccaccttaccggtcgttcactcctcccggcgctcgaggcggagccactgtgggccaccgtgttcgggagccagtcccaccacgaggtcacgatgtcgtacccgatgcggtcagtgcagcatcgccactttagactcgtgcataacctgaacttcaagatgccgttcccgattgatcaagacttctatgtgtcaccgaccttccaggacctgctgaaccgcaccaccgcgggacagccgactggatggtataaagacctgcgccattactactacagagcccggtgggaactttacgatcggtcgcgggacccacatgagactcagaatcttgctaccgatccccgcttcgcccagctcctggagatgcttagggaccagcttgcaaagtggcagtgggaaacgcacgatccatgggtgtgtgccccggacggcgtcctggaagagaagttgtccccgcagtgccagcccctgcacaatgaactg

SEQ ID NO: 250706 - DNA, 1506 bp, synthetic construct
  misc_feature 1..1506: note = Description of Artificial Sequence: Synthetic coding sequence
  source 1..1506: mol_type = other DNA
atgtcatgcccagtgcctgcatgctgcgcacttctgctggtgcttggcctctgtagggcacgtccgagaaatgcattgctcctgctggctgacgacggcggctttgaatcgggcgcgtacaacaatagcgcaattgccactccccaccttgatgcgctggctcgccgatcactgctttttcgcaacgcgttcacctccgtgagctcatgttcaccttcacgagcatcccttcttactggactccctcagcatcagaacggaatgtatggcctccatcaggatgtccaccacttcaattccttcgataaggtgcggagcctccctcttctgctgtcgcaagccggcgtccgaactgggataattgggaagaagcatgtgggacccgagactgtctacccatttgattttgcatacaccgaggagaacggcagcgtcctgcaggtgggtaggaatatcacccgtattaagctcctggtccggaagtttctgcagacccaggatgaccgccccttttttctttacgtggcttttcatgaccctcaccgctgtggccattcccagccacagtacggaaccttttgtgaaaagttcggtaacggcgagtccgggatgggtagaattcctgattggaccccacaagcgtacgatcctcttgatgtgcttgtgccttacttcgtgcctaacaccccagcagcacgggccgatctggcagcacaatacactactgtggggcgaatggatcaaggtgtgggcctggtgctgcaggagttgcgggatgccggagtgctgaatgacactcttgtcatattcacgtcggataacgggatcccatttccaagcggcagaactaacctttactggcccggaactgcagaacccctgcttgtgtcaagccctgaacatcctaagcggtggggccaggtgtcggaggcatacgtctccctcctggacctcacccccactatcttggattggttctcgattccatacccctcgtacgctattttcggtagcaaaactatccatcttactggaaggtccctgctcccggcactggaggcagagcccctttgggcgactgtgttcggatcgcagagtcatcacgaagtgacgatgtcgtaccctatgcgttccgtccaacacagacactttaggctggtccacaatcttaactttaagatgcctttcccaattgatcaggatttctacgtttccccaacgttccaagatctccttaataggactaccgcaggacaacctacgggttggtacaaagatcttcggcattactactacagggcaaggtgggagctgtatgatagatcgcgagatcctcatgaaacccagaaccttgcaaccgacccacgttttgcgcaacttctcgagatgcttagagatcaactcgcgaaatggcagtgggaaacccacgacccctgggtgtgtgctccggatggagtccttgaggaaaagctgagtccacagtgtcagcctctgcataatgaactt

SEQ ID NO: 250707 - DNA, 1506 bp, synthetic construct
  misc_feature 1..1506: note = Description of Artificial Sequence: Synthetic coding sequence
  source 1..1506: mol_type = other DNA
atgtcgtgtcccgtgccagcttgttgtgccctgcttctggtactcggactgtgccgggctcggccacggaatgctctgctgcttctggcagacgacgggggtttcgaaagcggggcttacaataacagtgcgatagctactccccatctggacgctctggcccgtcggtctctgttgtttagaaatgcgttcacatcggtatcatcatgttcacctagcagggcatccctcttaacgggactcccacaacatcagaacggcatgtacggactgcaccaggatgtgcaccactttaattcgttcgacaaggtccgctccctgccccttctactgagtcaggctggtgtgagaaccggaatcattgggaagaagcatgttggcccagagaccgtctacccattcgacttcgcctacaccgaggaaaatggatctgttctacaggtcggccggaacattacccgaattaagcttcttgtcaggaaattcctccaaacgcaggacgatcgcccattttttctatacgtcgcttttcacgatcctcataggtgtggccacagccaacctcaatacgggacgttttgtgagaagtttgggaacggggaaagcggcatggggcggataccagattggacaccacaagcgtacgatccactcgacgttctggtgccctatttcgtgccaaacaccccagctgctcgcgccgacctggctgcccagtataccacagttggtcggatggatcagggtgtcggactcgtattgcaagagctcagagacgcaggagttttgaacgacactctggtgatatttactagcgacaatggaattccattcccaagcggccggacgaacctttactggccaggcaccgcagagccacttttagtgagttcccctgagcacccaaagaggtgggggcaagtgagcgaagcttacgtgagtctgttggacctgacaccgactattttggattggttcagtattccatacccatcctacgccatttttggatccaagacaatccatcttaccggccggtcacttctgccagccctagaagccgagccactgtgggcaaccgtttttggatcgcagagtcaccatgaggtcactatgtcatatcctatgcgcagcgttcagcaccgccacttccggctggtgcacaacctgaactttaagatgcctttccctatcgatcaggacttttatgtgagccctacctttcaagatctgctaaaccgtacaactgcgggtcagccaactggctggtataaagatctacgacactactattacagggctcggtgggaactttatgaccgctcgagggaccctcatgagacccaaaacttggctaccgacccacgatttgcacagcttttggagatgctgagagatcagcttgccaagtggcagtgggaaacacatgacccatgggtttgcgccccagatggggtacttgaggaaaaactgtctccccagtgccagccactccataatgagctg

SEQ ID NO: 250708 - DNA, 1506 bp, synthetic construct
  misc_feature 1..1506: note = Description of Artificial Sequence: Synthetic coding sequence
  source 1..1506: mol_type = other DNA
atgagctgcccagtccccgcgtgttgtgccctcctcctcgtgttggggctgtgccgcgcccggcctcgcaatgcactcttgctcttggcggacgacggcggattcgaatcaggcgcatacaacaactccgcgatcgcaaccccgcacttggacgctctcgcccgtcggtcgctgttgttccggaacgcttttacctccgtgtcatcgtgctccccgagcagggcctccctgctgactggattgcctcaacatcagaatggaatgtacgggctgcaccaggacgtgcaccacttcaattcattcgacaaggtgagatccctgccgctgctgctgtcccaggcgggagtgagaaccggaatcatcggcaaaaaacacgtgggtccggaaaccgtgtatccgttcgacttcgcatacacggaggaaaacgggtcggtcctgcaggtgggtcgaaatatcacccgaatcaaactgctggtgcgaaagttcctccagacccaggacgatcggccgttcttcctgtacgtcgcatttcacgacccgcaccgctgcggacattcccagccccaatacggaactttttgtgagaagtttggcaacggcgagtcgggcatgggaaggatcccggattggaccccgcaagcgtacgatccgctcgacgtgttggtgccttacttcgtgccgaacacccccgcagccagagcagacctcgccgcccagtacactaccgtgggtcgcatggaccagggggtgggacttgtcctgcaggaacttcgggacgctggggtcctcaacgataccttggtgatcttcacctcggataacggaatccccttcccatcgggtaggactaacctgtactggccaggtaccgcggagccgttgttggtgtcctcacctgaacatcctaaacgctgggggcaagtctcagaagcatatgtgtccctgctcgacctgaccccgactatcctcgattggttcagcatcccatatccatcatacgccatattcggaagcaagacgatccacctcactggtagatctctgctgccggccctggaagcagagcccctctgggcaaccgtgttcggatcacaaagccatcacgaggtcaccatgtcatacccaatgcgctcggtccagcataggcatttccggttggttcacaatctcaactttaagatgccgtttccgatcgaccaggatttctatgtcagcccgaccttccaggacctgctcaaccggaccaccgccggacaaccgactggatggtacaaggatctgcggcattactactaccgcgcccgctgggaactgtacgaccgaagtcgggatcctcacgaaactcaaaacctcgctaccgatcctcgctttgcccagctcctggagatgctccgagatcaactggccaagtggcagtgggaaacccacgatccatgggtttgtgccccagatggagtgctggaagagaagctctcacctcaatgccagccactgcacaacgaactt

SEQ ID NO: 250709 - DNA, 1506 bp, synthetic construct
  misc_feature 1..1506: note = Description of Artificial Sequence: Synthetic coding sequence
  source 1..1506: mol_type = other DNA
atgtcgtgccccgtgcctgcttgttgtgcactactgctagtcctgggcctgtgtcgggcccggcctcggaatgctctgctgctgctcgcagatgacggtggcttcgaatccggcgcctacaataacagtgccattgcgaccccccatctggatgctctggcaaggagaagcttgttgtttagaaacgcattcacctccgtttcctcatgctctccctcaagggcttccctcctgaccggccttccccagcaccagaatggcatgtatggactgcatcaggacgtgcaccatttcaactctttcgataaagttcgatctcttcccttgttactgtctcaagccggggttagaactggtatcattggtaagaagcacgtaggcccggagaccgtgtatcctttcgattttgcctatacagaagagaacgggtctgtgttacaggtgggacgcaatattacgcgtatcaagctgcttgtgagaaagtttctgcagactcaggacgaccggcctttttttctatacgttgcttttcacgatccgcacagatgcggtcactcacagcctcagtatggaactttctgtgagaaattcgggaatggagagtcaggtatgggaaggatacctgattggacacctcaagcatacgatcccctggatgtgctagtgccatacttcgttccgaacacacctgccgctagagcggatctggcggcacagtacactacggtgggccgcatggaccaaggagtcggattggtgctgcaggagcttagagatgcgggcgttttaaatgatactctggtgatatttactagcgataatggtataccattcccttctggtcgcactaatctgtactggcctgggactgctgaacctcttttagtaagcagcccagagcatcctaaaagatgggggcaggtgtctgaggcatacgtgagtctattagacctcacacccaccattcttgattggttctcaattccatatcctagttatgccatcttcggaagcaagacaattcatttgaccgggaggtcactgcttcccgcgctagaggccgagccactttgggcgacagtgttcggatctcagtcacatcacgaagtcaccatgtcctaccctatgagaagtgtgcagcaccgccatttcaggttagtgcacaacctgaactttaagatgcctttccctatagaccaggatttttacgtgtcaccaacctttcaggatctcttgaaccggacaacagctggtcagcccacaggttggtataaggaccttcgccactactattaccgtgcaaggtgggaactctacgaccgctctagggacccacacgagactcagaatctggccaccgacccacgcttcgctcagctgctggagatgctgcgggaccagcttgctaaatggcaatgggaaactcacgacccatgggtgtgtgcccccgacggtgtgctcgaagaaaaattaagccctcagtgccagccgctccacaatgagctt
